United States Patent Application Publication US 2023/0106033 A1 - sequence listing, part 4

SEQ ID NO: 16 - DNA, 87603 bp, Clostridium beijerinckii
tatatggagtattataataattatagatatcagtggggacttaaaaagctggctcctgtacaatacagaaaccagctcatagctgcctagcctttttcaaaatgtccttgacataggaaccattttaatatttaaaacttggcttcttttgctttttattttattatccagtatttcaacaaaatctcttcttatataatggtatctatttcaaagttcttcaaatttttcttcattagaatatatatatgttgcaaaaataattcttcatcataattctaaaaacattgcaagaatttcatatgtaattatgcattgtgaaatgataattgataattgtgcattaaattgagcattgtgcatttcaatatatatttcaatctattaagaaattactgtatatgtttgagtataagctatttgttcatcacctaatgtaaggtaataatatattggtatcatatacgttgaataaaataacgttgaagcttctggcacattgctttctattgctcttactaagatctgttggtgctttaaacttacaatatagcaagtagctataattacaatttgttctgaaaaaaacacgtcagaaattgaatttgaatatttatcagcatgatttaccaaattagtcctaataattctaagctgctcaatataacgctgtatctcaatatcaaacttcttcaagtcatcaactggtgtatctggttttatattatatacagttaaatttgcccgtataactttaatttgatttaagctgttaataatatcctccttattctgtaaattagatattttagggccatactgctgaggtatattcggaatttgtgcatatgctaaattacttgtgaatactgttatgaatactacaaacgttatcaaacggattattattttacgcattattgttcctccatattataataaatctaccttatttacaaaaagtactctttaagtttatcctttgttattttaaatattttattcctaaaagatagattatattaatgaggatatacgcactactcaaagggcatccgttctattgtttccagtattgtatagataaacctactaagacctgaacttatgtatatagctcgccgaaataaggattatgctgttgttccagtttctaaggaattatgatggatgatcccaaaattacaagttgcactcaagatgctagcatcaaaggcaagctttgaactagcatacttgaaacaacttataatctaggaatcagagccatcaaattcctaatgaaacatttcacaaaagcataattcttatttctagttgggatatatttcatagtataaatctaacttataattggtttatctatatacataaacaacttaagaatttgatttatactttgaaataaataccatactagaaagtagaaacatttttatgtagcatgcattgaaaatgagctgttaaaagcgcttaattgtaggttgttcaactaatgcttgtcacaatgaaattgggagcaagcattagtggtgcaacttgcaatttagaactttcagcgaaattttcataatcctgtgaaataacaatgtttttactttcggtggattattgcataagtctaggttatatattgtttatctatatagatatccacaacttgaaatttacttataccttgaaatatacgccatactagaaagtagaaacatttttgcgcagcaggcatttaaaaatgagctgttaaaagtgccttattgtaggttgtcctacttatgcttgtcactctgaaagtgggagcaagcataagttgcgacaacctgcaatttagcactttcagcgaaatttttatagtcctgcgaagcaacaatgtttcttctttcggtgaactatatgcataagtctatgtctcaagttggatatctatccaaagattcttatatttttcaagttctcttattggatctaattctttgtctttcttcatatattctaaaaagaattcatttaattctatacttttttctacatctcttaatgcttttaaattttcatttatatttacataataacaagctctattataatataaaaaaccttcatcatcattttcttctattcccttacttattacttcaatagcttttttaaaattaccttcttctctatatgctacagataaattcagaaaactataaggataattgggatttgcttcaatagacttgtaataataccctttgctctcttctatcttatttaacttatttaaaattactgctttattaaataatatcttgtaatgtctatcctcaatttctaaggccttatttatataattcagtgcatcaatattttcattgttttcttctaaaatacaagctaaatttgcatatgcccacatataattaggatttatctcaataacctttttatagttgcttatagccttatccttttcacctgattcatcatatatattggctaaaaagaaatatgctttatcataattgggatttttttctatggccttctcataatatttcttagccttttctaattcatcattttcatcatatattattgccaagccataatatgctctagcatcatcctcatctaattcaattacttctcgatactttttctctgcatcaccagataacccaatttcatcgtaaattaatgccatatccattagtaattctatatcttcttttcctatatttaaggcatatgccttttgataaaatgaaatagcttttaataagttattttctgatcttaaatttctcgccatatttatataattattgtataaataattcttgttttccatgttgctcttcatccattcatttgatttgttatatgcatacttatgtaatactaaccgaaagagcaggtactcattgtttcggtttctagagaatttggttgtggatttctaaaaatattattttttatctctatattttaatataacattgtccttgctttcctctaaaaacaattcaaaatatgctaatttttccaaacaaaacttttctatttcgctttcacttgtttctctaatataataatcatgagtatacctatttctcaacttaactactactgataaatatttttttaatgtctcatcaaaaaatccaatttcagaagcttcttcaataagctttaatgccgaagctgaactacttattttcccatcatttatgattatatagttctcacacatgtcaattacatattccgcaaaatcttgaaaataagctataacagctctttttattattttgttattggatttcttatattcatttatagcttcctttaaattttctaaattatcataggcagctttatatttttctaaaaatttttcttttttatatctaaagtaaggactcatctgtaattcctccaaaataactatattgctcatctatttttaatactttttcaaagtttgcattgttcctcgcatgttttaagacataatgctgaaaatcataccataattcttcatcaataatatatttattattactatctactgcaaatcttgcatacttacttccaaaatctttaaataaaacaaatgtcaaatgtatattatcgtagttataatattgctttgataattctatgattttatcttcaatgtctaaggtgtccataaatgaaacttttggttttactacaacagctaagtctatgtcacttctatctttgtcccaatactctgttctataactcccaaattcagcaatacaaacgatactttgaattttctttaattcatttaaaaaatatgattcagccaaaattatcacctctttagaattatatcactaaaataataaaatactcaatttatatacaattgagtattttatcatattgaacttatatatatcgcaatttaatttgcacattttatgtaaaatagttttatccctatatttaacctattataagtaaaaataatactgatggaaattaacccatcagcaacttttacatgaaattttttaattattaattttagatgtattatttctcactatatctcttacatattcaatatctatttcatttatatccgcaatatactctacagaaagtcctttgctatattgttttaatatcaattgcttaattgcttcttctcttccttcttctcttccttcttcaattttttctctatctctttccaataaagtcataaactccacctccaccgaaatatcatttttaacttccagcactcttttatgtatacttttaacaagattccctttagctctctttgctattccatctgttgattcttctacatattcaaggaattctaataattcttcgcttaaatcattcataattccctttgtatttaatactattttctgagcttcatcatttaacattatactattgtcttctaaacataaattttgaaaagtatatttatggcgacctttattaaataaatcaaatgtacaaacaaatataatatagcttttggtaagttttctgtaatcctcgcctttgcttattaagtctaaatctatgcttccttgataatatcttagccttttaggcaaattcttatgctttcctctctgcatttcaacattgtagattgtattattttcgtctttaacataaacatctaaacggattcccttactttcaagtaataaatctatggttttctgttcttcaactatttcaactttttctatttcaatttccaaaattttctctaataattctttacaaattgctttatcactcataacctttgcaaaaaggaagtcatcttcaagatttaattcctttaaagttttgttcatcttattaaccttaccttatcttttatcatttatattggtttcttattaatattatatctaattaaacattgtatttcaatatactcaaattatattgccattccatttatgaacactgcaataatagtaataatgctctgtcaccgttagtcttcaaagtagtatattctatctttccttatactaattcatttccaattagatagagaagtaatagtaactactaaaataataaaatactcaatttatatacaattgagtattttatcatattgaacttatatattgcaattcacaattacggccaaaattcttgtaatatttttagaatttatgatgaagtattattttttcaacatatatatgaaatatttactttttatatacgtctataacattttcagttttataatgaccgtagtaccaagtatttgtataagaagttgatctaaaattcaaagaatcagcaagcttagtttctactccatcttttgtcttccataaactaaatgaatcgccatcttttcttacaaataatatttgattttctgatatatattttggcatgaaatcaaatgatttgttatttgtaatttgagttatttcttttgtttcagtgttcacttgataaatatagtgcggttcactttcccagtttttcgaactttgtgatatgtcatcttttaaggcatcagctccagaatatactatattctttccatcactagaataatccggtgtcattgatacttgattttctggaattaaacttgtaaatttgttagctttgatatcgaaaattcctaacgccttattactatacatatctctatattcgccattgttaacagcaaccatgctgctatctactgggttttgagatatattatctttatatgctaatgcaatcatattattattttctataaatttattgtttaaaagatcatatactgcaaattctgtcatatctgctgacattgagcctgaattaggtttgttccatatatacatatatctatcatcacttgatatcctctcaacattaggccttgatccaatagattcaaataactcagatgctgtatactgctctccaatctctttatcatttccttctttaccttccaaaacaaccttttcttctttagtagctaaatcatagctaattatacctattgatttaatagttttccctttgtctgtagtagtttctagctgtttattagcatataccttatttttactatcgcaattgatattaaaataatcatactcattgcttataatatccactaactttttagtattggtattatacatagacataccttcatttttagcagagcaaattaaatttcctgagttattccaatcatatgactctacatttttagctacttcaattacttcacgagtctctatattgcaaatatataaattatcttctttagtataagcaacatataatccatctttagatattttcggcaatttaattttttcatttttatcaagaagaattgggttattttcttttagttcagacatgtatagcccatcatctgatacaaatactgcaaattctgctcctttagcactttttgctgtatcactattactagcaaatacagtttttgaagcaagcaaactagtagatgtaaaaatcatggttaccataagtgaaatacaaacaactattttttttgactttttaaaaaacactatatttttcaagcgtgtctcaatctccttcctacttttacaaactgatgcccctaagcttagggatttattctgagaatattctattaactctaatataatttctccataatattttctttttgatttatccatattctttataagttgttcatctaaagacagctcacagattatatttatcctatttctaataatataaacaataggattaaaccaattgattatatttgctaaaagcgctactgccttcacccataaatctttacgtttaaaatgaattaattcatgatccagtattatttcgagcttgtccaaattgtggtccatcttaggaattgtgatagtaggtgttaatattcctgtaatcattggacttttaatgccaccgcattcttttagaattatcttcctatatatatttaattttttcttacagttttcaaaaacatcaattattgatttatcatcaacaatatcgcttacacttttaagttttttataaaaagaaatatatacgtatgtctctttaattactaatatgagtgcacctaatatccatgcataaagcagcatatttctattcattattttttgcatcatacttgtctgctttaaatccacttggctttggcttacaggcttaagagtaccatccccttgcaaaactcttatctcatcacttttatcgttgctcttcagcatcttttcataattttgctgcaccaccgtattcgtatcatcctgcataaataaataattcttatgttccactatttgaggcagtttaacaaaactcccaataggtataataaaaattaaaagcgttataaatagcatataataattccaagtggcactaaaagttttcttagtaaatggcctaaataaacaaagtattaaaaacataacgctgcctgctagtgacatttgcagaatataatttagaatctccatatgcctacacctctttgagccattctttcaactctgcaatatccttattacttattttcttattattaaacaatgttgccataaagtttttaactgatcccttatgcatatcttctaagaaattatcagtttgaatagccttatattcttcttccgtaattttaggaaaataattatttaactttcctactttagttacactcaaaattcccttttcagttaatcttgatatcagcgtcattattgttgttaccttccatgaattttcttttggaagctcgtctagaatctcagctgtagtaatttgatcattctttttccatattattttcattatctccatttcagcgtcagatatcttccctaacttcatattaaatcatctcctctatgtaattctacaaagtgtagtatttatgtttttatactacactttgtagaattacatgtcaatatattcctatgaatttttaataaaaaacttattagcatatgtttgttacaattcacatttcacaattattcctagaattcttgtaatataaataaatagactaagacctgaacttatgcatataactcgccgaaatgaataacatatttttgttccagtttctaggtaattctgatgggtgattctaaggctataaagttgcacccaaagtgctagcctcaaagaacaggcgctcacagagaaagttcgaagaacgaaatatgaaatttcgattctcactttttgaactagcacatttggaacaacttatagccaaagaatcacatccatcaaaattaccaatgaaacattccacaaaaatatattactcatttctatttagaaaacatttcctagttcaagtatagtttatgattgtgttatctatattaaaactaagagtacataaaaataagctgttaaaaacagttaatgcagagctgttctcctcttgcttgtcctaatgaagtttagaacatgcgcgagaagatccccctgcattagtggtttcaaatgaatttttcataaatctactaaataaacatatatgttgcaattcacaatgcacatttcacaattatgcttagaattattgcaatatttttagaaattttatgaagaattatttttgcaatatatattgaattaatttatagcaatttttatttttctatttcactttccatttatatcttgtttctaaaaattcccctttcctatcatatccttttatgttatatcccatcttgttatatccttgcctgtcatatcctccactattatatccttctttatcatatccatatttatcgtacccgtctatattgtagccttctatattaaaatatgtgccatttttatgaaccccttttttatcaaaaccctcttcattaaattttgtaccgtttttatgaattccttttgaatcaaacccatgttcatcatatttctttaacctattaaaaaataacataaagattgcacctcaattttaatttattatctatatacttatttatagatatgccaagtgaaatctaaacctatgcatataactcaccgaaataagcattatgctgttgttccagtttctaaggaattatgatggatgattctaagattacaagttgtacccaagatgctagcttcaaagacaagctttgaactagcatacttggaacaacttccaatctaagaatcagaaccatcaaattcctaatgaaacatttcacaaaagcataattcttatttctagttagtacatatttcatagtctagatatagtttataattggcttatctatatttgagtcagcaaaaaaagaccgaccttaataaaaaggtcggttgcactattaactcatcgaatataaagtgcccaagtaaatattcgaatcacagtttccttatatacataatattactatttcatgattattttaacattgaatcaattagaaatcaatgaacaaatagcgaataaaatgacggaattttaaatttcaacatatatgttacaattcacaattctggctaaaattcttacaatatttttagaattatgataacggattatttttgaaatatatataagctattaagcattgttgactaaaatcataataatacctaatagctcatttctttaatatatatttatttatgtgttcctatatcacttctacaatatgctccttcaaaagtgacatatttaatattttcgtaagcgtcttttctagcttcttctagagtttttccaagaccaataactgataatactcttccaccgttagtctttaaaactccatcttctactttagctcctgctaaaaatactttatctttaactttttcatcaattgttatctcataacccttaacaaaatctcctggatatcctttagatgctaaaacaacatttatgcagacaccatcgttccacttaactgtggttttatctaattcttctcttaatgctgcttcaatgacttctactaagtcactttccattagataaagaactgattgtgtttcaggatctcccattcttacattatattctaaaagataagttccttttgcagtaatcatgataccaaagaagattattcctttataatcaaagctttcttctctaataccgattaaagtcttagccataatattttcttcgaaatccttcatcacatcttctgtaacataaggatttggtgctaatactcccattccacctgtgtttggtcctttacctccatcaaatatctgcttatggtctttacctgatataaatggaattattgtctttccatcagtaatagatagaattgatgcctcaacaccttctaggaattcttcaattactattttttgacccgctccattgaagatatcatctaccatataagattttactgcatctattgcttcttctttagtttcacatatagcaacgccttttcctgctgcaagaccatctgctttaaccactgttggataaggacatacttctaaatatttaagcgcttcattgacatctgtaaatgtttcgtattctgctgtcttaacgccatactttttcataaattctttagaaaagcttttactaccttcaagcattgctccattttcagctggtccaaatatctttaatccttccgttttaaacttattaacaattccctttgttaaaggatcttctggcccaactattgtaaggtcaataatttcttccttagcaaatttaattaattcatcaatatcagttatatttacattttcgcatttattttcaattgcagttccaccgttacctggagcaacaaatattttttcaaccttttcactttttgcaagtttccaagccaaagcatgttctctaccacctgaaccaattaaaagaagtttcatttacatacctccaaaataatattccgttatagataaacagtatacacccatagcttatgttacaaccaaccgaaagaaaggatactccattgtttcggttgacttagagaatataactgtggatttctaacatcaaaagttgcgcccatttctgcatgctcccaacacaagattgggacaagcaaaaatggaacaacttctaatgaagaaatcctacagccatattctcagatgcaacactgcacaaaagagtaccctttctttctaatgtgggagtcatttcaaagcataagtctaattcataacttgtttatctataacaattaactttaaaaaacacagggtttttattatatattttcaattcaatatagaatttattgcttaattacctaatacaaataacttatttatattaatgtttaaaatgtctatatcctgtaaataccattgctatcccatgttcattacaagcatctattgatttttgatcattcattgaaccacctggttgaattatagctttaataccgtttttagcagcttcatcaactacatctctaaatgggaaataagcatctgatgcaaggattgtagctccttttcctctctttaaagcatcttctgttggccagattctgttaacttgacctccgccaattccaagtgctattccattatgagcaacaactatagcattagatttaacgtatttaactactttcattccgaataataaatctttcatttcctcatcagttggtttcttttcagttacaactttaatttcttctactaatttattgtcttcctcttgaacaagcattgctccatcaactgtaaccatatatttatctgcctttggagtattatggaatttaagaactcttaagttctttttagtctttaaaacttctaaagcatcttcatcatattctggtgcagctataacttctaagaaaattttaaccatttcctcagcagttttcttatctacttttctattaaacccaataattcccccaaatattgaagttggatctacttcatatgccttcatataagcttcataagaatcttttccaattgcaacaccacaaggtgtattatgttttaatgcacaacatgctggttcatcaaattcattagcacatttccaagctatatcaacatctttaaagttattataagataattccttaccatttaatgtttcaaaagtattcatagctccatcaagcattgttgatgcgtaaacagctgcagtttgatgtgaattttcgccatatctaagactttgcatcttcttatatgaaactgaaagatattctggatattcttcttcatcatcagctaacaagaagtttgaaatagccccatcataagcactcataagattaaatactttaccagccaatttcttcttagtcttataagaagtttcaccatttgtttcaatctcttccataacaactttatagtcatttttatcagaaattactacaacatcctgaaaattcttagccgctgctctaagcattgtaggtccgccaatatctataaattcaaccttttcttcaaattctaaatcttctttaactttctcaaagaatggatatagatttacaactacataatctatagtatgaatatttcttccttttaatgtattcatatgttcttcattgtctcttatcgctaatattccagcatgaactaatggatgaagcgttttaactcttccatctaacatttcaggaaaatcagtaacttcattgatttcaattacatttaatccattttccttcaaatatttataagttccacctgttgatacaatttcaacatctttagatactaaaaatttagcaaaatctaaaactccctctttatcaaatacacttattaaagctctctttttcacgaaaaggcctcctttattcttctatcttgactctaccatcaattactctgattttattttcgctaattaacttaattgccttaggtaatatttcgtgttctttttctaaaatcctcttttgaagtgtttccgcatcatcttcaaaataaactggcacaacttcttgaagaagtatggcacccccatcaacttcagaatttacaaagtgaactgtacatcctgaaaatcttacaccacttttaattacggcttcatgaacctttaatccgtacattccaggtccacaaaacgatggaattaaagatggatgaatatttataattctattatcaaattcttttaatatttccccatctaaaattgccaaaaatcctgcaagaactattaaatcaacctttcccgttgttaattctaagatcttgttagaggattcttcaccatattcacgcctattaacaacaaaagtatctatattatgcttttttgctctctctaaagcataaatattatcacggcttcctataaccatctctatcttaacattcatatagttactttcaaccgcatctattaccgattgtaggtctgttccgcccccagaaaccaagaccgctattttaaacaaataccttcacccccagatgttacgtatcctatttcataagctttttctcccatttctactaaagcctttataataggttccacatcttcatctttaacagcaagaacaaaccctattcccatgttaaaagtgttatacatatgctccttgtctacacctttttcaatgattctttcaaatatagctggaagtggatatgaatctttgttaattacagctgtgaagtccccaccattaaacattcttggaacattttctataaatccaccacctgtaacatgagccatacctttaatctcatagctttctaacaatttaagtactggttttacataaatcttagttggtgtaattaatgtcttccatacttcttcaccattaaattcttcatttaaatctgggaatacttttctgattaatgaatatccattagaatgtattccagaagaggctataccaatcaacttatctccatctttaatattgcttccattaataatcttatctttatcagctataccaactgcaaatccagccatatcatattctccatctgaatagaatccaggcatttcagctgtttctccaccaattaaggcacagtcagaatcaacgcatccatccgatatacctttaactaaatctgctgcaacttcagcttcaagcttcccacaagctatataatctaagaaaaataatggttttgccccatggcataaaatatcatttacgcacatagctacgcagtcaataccaactgtatcgtacttcttgttcttaaatgcgatttctagtttagttcctactccatcagttccagaaactaaaactggtttttcatagcctgatggtaattcaaccatcccagcaaaacttccaagaccatttaaaacatattgactcatagttcttgctgcatattcttttataagcttaactgatttatatccttcttctatgttaactcccgcttctttgtaagtaatcatttattaactccacctttcaaaatgctattgacatattcaaaaaacaatagatgaatgtgccttagatgtctatatctctttctctactggtgttgcaactgggtaaactccattaaagcatcccatacaaaattcttctctatcaccgcagctcttataaacgccttcttcacttagatatcctaaataatctgctccaatcatatctctaatctcttctatagtattattagcagcaacaagctcacttctataaggtgtatctattccaaaataacatggatacttaacacttggtgatgctagtaagaaactaacttcttttacacctacacgtctaagtgattcaactaaatgttttgatgtagtgcctcttactactgagtcatcaataagtataactctttttccttctaagtttgattttagtggatttaactttactgcaactgctctttctctaatttcttgagatggcgatataaaagttcttccaacgtatctgtttttaataaatccagtatcataaggtataccagaagcctttgcatatccaatagctgctggtattccagagtctggaactgctataacaacatctgcatctaatggatgctctttatataactgttctcctgctttaactcttgttgtatgaacttcaagcccatcaattctagagtctggtctagcaaaataaatatattcaaaagcacatgtctgacatttagtattttcagaatatctgtatgattgtattccttcactatctattataactatttctcctggttctatatcccttacaaattcagcacctattgcatctaaagcgcagctttctgaagttagaatgtaaccttcttcaattttccccaacgaaagcggtctaattccatgtggatctctagccccaattaatctatcctttgacataatagttaatgcaaatgaacctctaacagctgacatagcatcaactactgcttttgcaaaacctttttttgcacttcttgctataagacatgcaattacttcagaatctgttgtagtatggaaaatttgtcctccatcttcaagcaattcttttattacatctgcatttactaaagttccgttatgagccatagctattggtcccatctttgatgaaacgagtattggctgagcattttcaatgccttttccaccagcagttgaatatcttacgtggcctatagctatatgaccttttagcttttgtaaatcttcctgcttaaatgcttcagttattaaacctaatcctttatgtatgtcaattttttcaccatctgctactgcaattccagcactttcctgccctctatgttgaagagcataaagtccatagtaagtcattgatgctacatctattggcttattagtatatactccaaataccccacactcatccttaaatttatcattacttggatccattattaattcaaaattcggattactcatctatacaatcctttcactaatctatttttgaaaaacttaaaatacatgagaactaatgcacaattaaggatgaaattttttttgacttctaaatcacataattcatcaaacttcatcagagaaatgagaattcaaaataacactcaagacttaatgtacgaattctcaaccttcctctgcgaacttagttccctcattgtgcattgctaattgcattctaatataaattttatagtaaatttgattctaaatatatactacttagaaattctctttaatatttcaacataagcatctttaacattacctaagtctcttctgaatctatctttatctaatttttctcctgttgttgcatcccagaatctacaagtgtctggtgatatttcatcagctaaaactattgttccatcagcacatctaccaaattcaactttaaagtcaattaagtttatgttttgttctttaaatacagctttaagagtgtcattaatttttgctgtcatatcatagattacttttaattcttcaaaagtagttgcaccaattccaactgcatgataatcatttattaatggatctcctaatgagtcatctttatatgataattcaaatacagtagtcttaagtttaaatccttcttcaagacctaatctcttagccatgcttcctgctgcaacatttctaactattacttcaagtggtactatttcaacctttttacataattgttctctatcatttagtttctctataaaatgagttttaactcctgctttttctaatatttcaaataatactgaagttatagcattattcattatacctttatcttcgatttggcctttcttttctccattgaatgctgtagcatcgtctttgtaatatacaattacttcatcagccttatctgttgcgtaaattttctttgcttttccttcatataacatttctaatttttccattatagttctaccccttccgcattttcctcaatgaattttttcttcatatttaatctgaattcttttaatttattttttaattcatcattattaactgataacatttgaaccgctaacattcctgcattgtagctgttatttataccaacagttgcaactgggattgactttggcatttgtactatagaatataatgcatcaacaccttcaagagctgccttaactggaactcctattacaggaagtattgtctttgatgctattactcctggtaaatgtgctgcaagccctgctccagctataataacttgacatccttgagcttgaatttcttctaatgtttcttctaacttttctggcactctatgagctgaaagtataaacgctttgtactctactccaaattcctttaaagcatttgccgctcctctcataacttctgtgtctgatttacttccaaaaaatattgctacctgcatttttaagcctcctgtttttgtaatgttcctattaatacatttatatatttctcttaagggctgtaccccgcattataagtgagaatcgaaatctttgatttcgctcttcgaacttactcagcgaacgaacgtgagtcgagtttcctttaaatacccgtaacccgcattacaactataaatatttacatatttatatatttatctatttacatatcttcatatttatctttttaaatatttatatacttaactttgtacatatttaaaaatttaacttcttacatatatacctatttaaatttttaaatatataactatttaaatttttaaatatataactatttttatattctgcatctttcatctaattgagagttagcaatcagcaagcaatgctaactttcaacttttatttaaaatattctactcctgctttgaagatcttttgatcaaagtctcctgggatgtttctatataaatctgttcctattctttcactatgtgccatcttacctaagactcttccatctggacttgttataccttctattccgtacattgatccatttggattgaacggcatatttaatgatacatttccatcaaagtcaacatattgagttgccacttgaccattagcaattaattctttaattaagctttctggtgcaacaaatcttccttcaccatgcgagattgcaactgaatgtatatctcctacattaacttcactgaaccaaggtgatttatttgaaacaacctttgtacttataattgaagacatatgtctgtttatattgttgtaagtcaatgttgccatatcttctttaatatcaactatttcgccatatggtactaatcctaatttaattaacgcttggaagccgttacaaataccaagtgctaatccatctctattcttaagtaattccatcacgctattgcttatcttttcatttctaagagcattggcaatgaatttacctgaaccatctggttcatcccctgctgagaagcctcctggaatcataagaatttgagcagtacttatttcttttgcaagtctttcaatagattcattaagtgcttctttagtaatatttctaaatactacttgagttacttctgctccttctttttcaaatgctcttgcacagtcatattcacagttgtttcctgggaatactggaattacaacctttggcttagctactttaattgctggagaaagtgttgatttcttatcatataaaactgtttctacttttccttctacatcttcagttttaattttaaatactgagcttaatttttcttcgtatgttttttctaaagcttctatatctaaattcaaatcatattccttagaaattataactgctgaacttattgtcttaccaacttctttatataaacactctttgaattcttcttctacattaacaccattcttaacttctagtactatagttccatagttaaatccaaatagctcatcctttgttaagttttcaatttctgcaccaattctatttccaagtgtcattttagtaacagtttctgaaactccaccatacttaacagcagatgctgaaattacttttccgctttgaattaagttatatagtacgtctaagttcttcttaatcttatctaaatttatagttccatcttctagtttttcagtttgaagtaaaactaaacttgatcctgcttctttaaattctggtgatattatatttctagctttttctactcctacagcaaatgatactaatgttggaggtacatctaaatctccaaaacttcctgacattgagtccttaccaccgattgctgctgtttcaaatgccatttgagcttcatatgcaccaagcaatgctgcaaatggttttccccatctagagctttctgatcctaatctttcaaaatactcttggaatgtaagcctagcttttctgtaatctccacccatagctacaagttttgatatactttcaattactgcatagtatgccatatgatatggactccaagtacctaattctggattaaatccaaatgtcattaatgtagcatctgcactttctccatctagaactgggattttagctgccattccttctgctggagtctttgcatacttaccaccaaatggcataagtactgttccatgtcctattgttgcatcaaatctttctgataatccttgctgagatgatacatttaattttcttaaattatttatccattcttctttaacatcaatatctgctactacatatggataatcaactggagctttaactgtaacatttgtcttttgagttgcaccatttgtatctaagaatattctctttaaatcaactatatttttacctctccagaataatctaagtctatctgtatcagtaacatgtgcaactaaattggcttccaagttttcatcgtttgaaagtcttataaattcatctgcatcttctttcttaacaactactgccattctttcttgtgattctgaaaccgcaagttctgttccatctagaccttcatatttctttggaactttatctaaatctatatctaatcctctgcaaagttctccaattgcaactgaaactccacctgcaccaaagtcattacatctcttaatcatctttgctactttagaatttctaaataatctttgaagctttctttcagtaggtgcatttcctttttgaacttctgctccacattcattaagtgaatctactgtatgttccttagatgaacctgtagctcctccaacaccgtctcttccagttctaccaccaagtaagataataacatctcctaaagctggttcttctcttaccacattttccttaggtgctgctgcaataactgctccaacttccattctctttgctgcatagtttggatgatatacttcttcaacttgacctgttgcaagaccaatttgatttccatatgaactatatccatgagctgctccaagtgttatctttctttgaggaagtttcccttctaatgtatcttcaactggaactgttggatctgctgctcctgtaactctcattgcttgatatacgtaagttcttcctgatagtggatctcttatagctccaccaagacatgttgctgctccaccaaaaggttcaatttctgttggatggttatgtgtttcattcttgaacattactaagtaatcttccatgcctttatcagtttcaattttcacgttaattgaacaagcatttatttcttcggaaatatctagatcttcaagttttcctctttttctaagttctttcatagcaattactgccatatccataagagttttattcttttctttctcgccataaacatatgatctagattttatataaccttcataacttgcttttattggagctgtatatttattatcttcaatttggatatcttctaatatagttgagaatgttgtatgtctacagtgatctgaccagtatgtatctataactttaatttcagttatacttggatctcttttctctcctttgaaataatcttgaatcataagaagatcatcaatactcatagccaaaccttgtccactatgaaattcttttaattgatccaatgtcttgctggtaaatccatctaagatttgtacatctttaggtatgtttgaaagtgatgataaatctttgctatttatatctacttcccttgaatcgactgggtttatataatatttcttaattttttcaatatcatcttttgaaaggtttccttttaataatactactttagctgattttatttcaaccttgtcttctgctgttaatagagctagacattctgaagctgaatctgctctttgatcgtattgacctggcaaatattctacaccaaaagctacttctccttcattcattggtaattctgattcgtaaactacatctactgttgcttcagaaaaaattgtatgtaaagccttattataatattcttcaggtatatctgatattatatatttattaacaagtcttacgtcttctaatccagttactcctaagttatctctaaaatcatttaataaactttgagcttctacattaaatccttttttcttttcaacgaatacgcttctaatatttaacattttaattcctccaaaaaatattatgagatttagcctaggtgcattcaaaaaataccgcgtcaatatacttgtatattatacttgttatttttttcatttacctactcactacaccttcgtaatggcgaatgttttccgataacactctactaactttcgtatcgataccataagattatcattcaacacgtatgttgtcaacctattttatgttaatttttcatttaatttatgtttttacgaactatatatttatattatttttatatagttcgtattttgtttgtttaatatatatttttatgtattataaagcattttttcttttttcttagaatagtgcacatttttatagtataaagaatcaatttcaacataatctatgttgaaaaaaagacgcagataattatagtgttttctatcaatactataattccctacgtctaaaaatttatttttctatataaaaaataaagagccataagatttctcttatggctcaacaacttactatctgtcgaagtttctgttgtttctttgttgctttctagctcttctacaatcaggacatctaactggatcgttgtcaaatcctttttctttgtagaattcttgttctcctgttgtgaaaacaaattcctttccacaatctttacatactaaagttctatcttccattataaaaatcctccctttttccaaagattataacctgatacctagacccaatctctgaaacagaggcgaatgtacagtattgattaaatcttgaattatcttacattcttataataccacactttgccacatatttcaacactaattcttacaattaaattgttaaatttaaaccttctcaatttataatatatcaaaacttttattaacttatatataatttgttaaaaaaattgaggtttaattcaacctcaatcctaatatagctactcttcttcgaacattagaccctcttgcaattttccagcatccattgatactattctatctgacacttttttagcaaagtccatatcatgagttataatcatcatactcatgcctttttcacttaaacgctttattaaatttgcaacttctccagttagtcctggatctagtgcagaagttggctcatcaaagcacattattttaggttcaagcactaatgctcttccaatagcaactctctgtttttgaccaccagataattcaaatggatagttatttttctttcctaacaagtctaagaaacctaaagtttcttctgctttctttattgcttcttcttttgaccatcctaacaccttttgtggtgcttcaataagattttctaaaacactcatatgcggaaataagttaaaattttgaaatactaatcctatatcttttcttatttcttttaacgcatttttatctacatacttaccatttttacataaaacttttccgttaacttctatatcgccttcatcacaatgttccaattcatttacacatctaagtaaagttgtctttccgccacctgaatttccaacgacaactaatatttcacctttttttatatgaagattaacaccttttaaaacttctgtatttccgaatctctttttcaaattacttactttaagcatataatctcctccacactatttataatagtcatacttatcttcaattttctttaatacttgactgaaaattgctattactactaagtaaacagcaccaactattaaaagaggtaataacgaaacatctctattagcagcagttttacctatctttagtaactcatccatacccactacataaactagtgaagtatccttcactaaagttgttatttcatttgcaactggtggtattactgttttaaatgcttgaggaagtattattctaaaaaacgtttgtctcgaacttaaccctaaaactttagccccttcaacttgtccattatctatagattctatacctgctctaaatatttctccaaaataagctccataatttaaagtaaatgctaaaattgctgctggaaatctatcaaagctgacccctactagaggaagtccaaagaaaatcacaataatttgtaataacagaggagtacctctcattataagaatatatattccacttatttgcttaagtattagagatttagatgtcctcattacagctactattactcctaatggaatagataatactaatgtaagtacaaaaatttctaatgtgacttttaatccctctaatacttgaggcattatctctaaaatataactcaaagttatttcctcctctttattttcaaattatttatgcgtaaaataatctgcttcgcagactgtgtgtttttaatacttctaaaagttatctatagattgtccaataatataatctcctaaagaataaaaagtggccaggccacattccaatcaaatgttaataaagaacaattaagagtgatggatgaaatcacttttaaatttccaaaaagaaattcttttataatttcatcccttattattcaccatcagtatttatatttctaactagttaatttagtaaattttatttataatattaacttcataaaattctaataaattaagtttataattatctaattaacactatttaaggattatatcttgttcgaaccatttctttgatatgtctgctgcagttccatcagaaataacttcatctaaagctttgttaaaagcttctacaaatttagtatcaccttttttaattccaacaccgtacttttcacttccaaaattatcagttaagattttatatttttcttctcctcttgctttcatataatatcttgctaaaatctcatctacaacaatggcatctaatctctttgcttctaaatccattaatgcagcgttattatcttcaaacgtaacaagttttccaccatcaaaagttttttcgattccattagctgcttcaactgcatctactgctgttgatccgttctgagcaccaacttttttacctgctaaatcatttttagatttaatattagaatctgctaatgttactataacttgagtattacttaaatatggctttgaaaattcaactttttcttttctttcatcagtaattgaatatccattccatattaaatctatattaccgttattaagttcagtttctttcatactccaatcaattgattgaaatttcacctttttattaagttttttacctactgcatttgctaaatcaacatcaaatccaactatttccccgttctcattcttaaatcccattggaacaaaagtatcatctaaacctattactaattcatccttatctaatgcactttttgctgcctttgattctgatgatttattggcattcccgccacatgcaaccaagcttactcccaatgtagctatgatagcaactactgttaatttttttattaaactatttattttcatatgtaataaccccctacatcactttctatttatcactttatcatactaaagcaaaagaatcaagtattttttatattctaaattataacaggcataacagatgctgtattacgcctatcatacctgtaaaaaacttagaattataaattttatctcgtggttgctattctatctatcgctctttcaaggttattcatatgtgatgtaaattcatctactgtatctgttacttgctttttatcaattggatccttaaatgtatctgctctatcttttgcatcatcaacattatctttaatttcatctaatttattagatatatcatcaaatttatttttaatatcttcactttttccttcaaaatcagcattattgagctcgtccgttaattcatctgctttatcatttaattctttcattacacgtgtagtatcactatctacttcattaactttatcagaaatttccttagggttagactttaatttatccattaattccttcatcttatctgattcaaaaacttcattaaccttatctgcagatggcttttcatctgtatcttcttttgtttgaagtatataatcatctttaagattacaaccaattaaagaaaaagaaagtattaataaaagtataaagctcattatatttttctttttcatttcttcacctcaatttgttttataatatatattacacaaataatccttcatcataattctaaaaatgttacaagaattttagccgtaattgtgaattgtgcattgcaacatatatagtctatattaatatttttttgctaatctttcaataatgaaattgaggcacacttaaacgcaacaagttcatctaagctaaagagtatttttcaatttagataataatctttttttatattttatacttgccacttcgcttatatcagctaataatctataatttgatattccaccatatactccaactatcggtattccttggataacttttgccacaactatattttcagataaacattttgaagctgactcaattaattcatttatatcaaccttaagatcatgattattttcaatactatatgcaattctatctgcttcatttgagtatagaattttttcatctgtttttatagaacttgcacaaattatatttaatataaatgccttttcacttttagacttataatcaaatccataattcacacaaatctcatacacagtttttaatattactccaataaacacgggtatatccggtattccaattcctaatataccaagtaatgtcccttcggctgctgtgatccctttatttataagcacaccttttttcactcttttatctattctgcttaaatttttgttattcatctgcttagataaaatatattcatctatatctgcttcatttttaattttctctgagttgtaacttttctctattactgtagtacctttttcaaaaacataataaaatcccttttcaaatgctttctcaaaagtttctatcatatttttcggaattttttcttctaattgctcttttacaggtaatatcttattttttatatattcattttcttttttataaaagaacttgtcttctctttttattaactttttcatttgactatttaatattctttcttttcttttatccctataatccatgcgcagctataccgaatcccttctataaataataaattactgtacttaattaacctacttatataatataataattgcaccaaaaacggtatttcaaacataattaattgatttacctaaaataatatatattaaatatgtaaaagttcaagcaaataaattaaaatttgcacgctctacattgtttctctacttagatgaaacttgactcactttcgttcactgagtactcacagagtaagcgaccatcatcaaatcatagattcgagatgtctgcttaactgattcacacaaaatcatagattttggttcactacttaaaagagagcaattatcttgctctcttttaggtgtatttaatttattatttctttcctgatccttttagcatttctccaattgcagctatactcccaagagatgataaagtctcatttggtaatataagcttgtttgctggactgttagccatttctttaagtgcttcaacttgctttaatgctataacagtttcatttgttccagactcaataatagcttgatttacttttcttatagcttgagattctgcaatcgctatttgttctatagcctttgctttaccttctgcttctagtagctgagattcttttaaaccttctgctcttcttatatttgcttgcttttctgcttctgctgataagatcttagcttgtttttctccttctgctttttctatttgagattgtctcaaaccttctgcttgaagaatcatagctctcttatctctttcagctttcatttgcttttccattgcttgttggatttcagctggtggaactatatttttaatttcaactgaaagtatctttattccataagcatcagtaacttcatcaataatgcttaaaagatcttgatttatactatctcttcctgataaaatttcatctaatgacatattacctaagatatttctcatattagttgtagctgagtatacaatacctgattgaaaactttcaatattataaactgcatctcttgcattcaataccttataaaatataacattgtctactaatattttaacattatctttagttataaccgattgtggctccacatctaaaatttgttgttttgtagaaatctttcttctaacaaaatctacaaatggcacaataaaatgtaatcctggttccaatactctatggaattgtccaaatctttctacaacatataaatgccctgtatttacaaccttaattgatgagataactactattaatattaatagtaaaataacccctaaaattataataacactcataatctagtcctcctgaaccttttcaatttttaattttataccttctattcctttgatagtaaacttgtcccctttgtgaataatatcgccttcatttattacagtccaatattctccaccaactttaacttgggctttatctctaatctctttttcgcttatcataatttttcctacatatgtttcttccataagtggtattctttcgtttgctgctttaaattttttcttgagtagcgggtatccaactgcaaatgatattatattcagtacagaaaatactattatttgaattataaatggtacttccattactccacacactgcagctacgacagcacctactgcgaatagtgtaaaacaaaaattactagttaaaatatctattgcaaatacgcatatagctataactaaccaaaaaactgccgcccccatacaacttccctccttaaaaatatcataatattagttctaagatttactgtccaatttttacatacatactggaatttgtaatcttattttatattatacagtacatttatgaatatttcaagatatttattaacttaaaaagagttattttataccttttatctttttttgatttcacaaacatgttagtatataattattaggatatgtttatgtttactaagcaaaatatacttaaaacgtatttaattatattagaactatatcttataaaccaataaaaaaacttaaactttataattgcaaggagtgattaaatggattttataaaagtcgcagctgcttgccctaaaactagagttgcagatgttgattataatgttaaaaatattttacaatgcataaatgatgcagtaaaaaatgaaagtaaattcatagtttttccagaactttgcttaacagcttatacttgtggagatctgtttttacaagaatacttactaagcaaagctttagatggaatttttgaaatattagaatctactaaagaccatgatgctttaattgctgtaggtgcaccacttatctgtggaagtactttatacaattgtgcttttctattatttaaaggaagtattttaggaatagttcctaagtcatatcttccaaattacagtgaattctatgaaaaaagatggtttactgaaggtctttcagttgaggatgaaagagtggatttaccattccaaaaagatgttccttttggagtaaacttaattttttcatcaagtatcgcaaactttggagttgaaatttgtgaagacttatgggtaacaattccaccaagctcttatctttctcttatgggcgctcatataatcggaaacctttctgcatcaaatgagcttgttagtaagatggattatagaaaaagcctgatatcaaatcaaagtgctaggtcaatctgcagctatatatattcttctgctggtgttcatgaatccactacagatgtattatttagcgggcatttattaataagtgaaaatggttcattattaaaagaaaatgacagatttcaaagagaaaacgaagtaatatattctatagttgatgtattcaaattaaagtctgaaagaatgaaaaacttgagctttagagattcatctaaatttatcaataagaatcctaacatgattaaatttgaatttagtgatgcttcaataagcacatttgatagatttgtggataaacatccatttgtgccttcttacgaaaaagaaagagaagttcgctgcaaagaaatatttaatattcaagctgctggcttagcaaagagattagaacatacaggctctaaaaaagcagtagttggaatttctggaggtttggattccacactagcattacttgtaatagtaaagacttttgaattacttggtattgataaaaaaaatatagtaactattactatgcctggcttcggtactactgatagaacttacaataacgctattaatttatgtaaggaattaggtacagatcttagagaaataaatatagttaaagcatctcttcaacattttgaagatattggtcatgataaagacattcatgatgtaacttacgaaaatgttcaagcaagagaaagaacccaaattttaatggatattgctaataaagaaagaggactcttaataggtactggtgatttatcagagcttgctcttggctggtgtacatataacggagatcatatgtcaatgtattctgtaaatccgtctattccaaaaactcttgtaagatatttagttcaatatgtagctcaacatgaatctactgaagttgtacgcgatattcttatggatatactagatacacctgtaagccctgaattattacctaaggatgctaacggtgaaatcgctcaaaaaacggaagatattgtaggtccttatgagcttcatgatttcttcttatatcactttattaaacatggctcaactaaagagagaatattctttttagctaaggctgcctttaaagataattactctgatgaggaaatacaaaaatggcttgataaatttatttttagattctttactcaacaatttaaaagaagtgctcttcctgatggacctaaagtcggaagtatttctttaagtcctagaggtgactggcgtatgccatcagatgctaagccttgggaatagctaaccgaaatcataaatatttttgttccgaaaaactatgaaaatatcgctgaaggctctaagttgcaagttgcgcccaattcagcatgctcccgctttcagcgtgacaagctaaatttgaacaacttacagctaagagcctttaacagcttattttcaaatgttttctacacaaagatatatatgatttccagttgagatattctcccaaaaattattaaacgcaaaaattctctatctagttgcgtttaataagttcttaattgtgcttcgcactctttttaactgtgaaatgatcttaattgcacttcgtgctctttttataggtgaaaagatcttaattgcacttcgtgctctttttataggtgcgtactttttttcaaatgtgtggaaattttttttaagtagtgctaaaatagatgttattaaataacaataataaacaatggcaataagccttatagatttggaggaatataaaaatggggaaaaaagctgatatagactggggtaaattaggatttgattacataaaaacagatcttcgttatatttcagtttggaaagatggaaaatgggatgaaggaaaacttgttgaagacaatatgcttagtataagtgaagcttctacggttattcactatggccaaagttgttttgaagggcttaaggcatatacaacaaaagaaggtaaaattcaattatttagacctgacttaaatgcagatcgtatgaatgaaagctgtgacaaacttcttatgccacatattccaaaagaaaaatttatcgatgcagttaaacaagttgtaaaggcaaatgaaaaatatgtaccaccttatggaagtggtgcaactctatatattagaccatatttaatgggagttggtaacaacattggtgttaaacctgctccagaatatatcttcggtgtattttgtataccagtaggaccttattttaaagatggtgtatctccttgcaattatatagttttagatgactttgatagagctgctcctcatggtactggcggaaataaagttggtggtaactatgctgcttcattacaagctcatgctgaagctgtaaaaaaaggatttgctgattgtatttacctagatccagctactcatacaaagatagaagaaataggtgctgcaaacttctttggaataactaaaaatgatgaattcgttactcctaaatcaccatctattttgccaagtataacaaagagatctcttctttacattgctgaacattatttaaagatgcctgtttatgaaagagaagtatttattgatgaaatagatcaatttaaagaggccggtgcttgcggtactgctgcagtaataactcctattggtggaattcaacataacgataaattacatgtattctttagcgaaactgaagttggtcctataactcaaaaattatatgacttacttttaggaattcaacttggtgatgttgaagctccagaaggctggatatacgaagtagaataatatttataaaatgaatttaaaaatagtatgaacttagcaaaaaataagttcatactatttttttatactcttatgtatatatattaatcaaataaatatacattatattatagaatatttagtaaacttttctagtagatatacgaatatataagtaatatattgatactaatattgaagctgaatttataattttagggaggggatattatatgagtgataacagaataatttctagaagtgaatatattgtggctagtgtatctggtgctgctatagataataaaataataaagagaccttatattaaccctcgaaatccttccaataaaaaacaaaataatgctaaatcttttgacaatactttgcattcatcagcttcacaatcatcatcaaatgacaattcaacgactttttcaaatgaattggaaaatatggcaagattaaaaagtgaagaaaactccagattagttcaggcaaagttcaacaataaaataaaagattctgagacttctgagaagaatgctactcaaactgaattgcataacaaacttgctcaagctatggatgttgatgtggatgtatctactctatataaaaaagtacaattactaaattcattaaaaaatgaatctaataactaataagaggttgccaaaacatatggtttttggcaaccttcttttatctaaagtttacactgctgctagtctatgtaaattactgtactctccttgtttctccattaattcttcatgagttcctgcttctattatacctgtttttccaagtacaataatttcatctgcattcttaatggtagacaatctatgtgcaactactatggttgtccttccagcgcataacttttctaaagattcttgaattatgcgttctgttgcattatctagtgccgatgttgcttcatccaaaattaatattggaggattcttaagaaaaactcttgcaatggaaatacgctgcttttgcccaccagataatttaacacctctttcaccaatgtaagtatcatacccttctggtaatgtatttataaattcatgaatattagccatcttagcggctcttagtaattcttcttcagttgcatctgtctttccaaacagtatattatctcttatagttcctgtaaataagaaaacttcttgctgaactattccaatattctctctaagagaatctaatttaacatcataaatgctcttattatctattaaaatatctccactatccacttcataaaatcttgggataagattacaaaatgttgttttacctccaccagaagctcctactaatgccaacatctttcctttatttattttaatagaaatatttttcaaaacttcttttccttcatagctaaaattaacatctttaaattctatttccccttgaacattttcaagttcagtcgcatttactttatctttttctttatcttgactcattatttctatatatctttggaaaccagtaattccattttgaaattgctccataaaatcaataagtttctttattggggtcataaagatttttataaacagcatatatgccataaaatctccaatgtttataagtccaataagtgtaaatattcctccccctattaaacctacgtaacttagcacgtccattccaaatcctgcaccagaagaatattctgccattactttgtatgctctttctcttgcattaatgaactttttgttccctttttcaaatttttcttcttcggcttcgtgacttacaaatgcttttgatatttttattcctgaaatactattttcaagatttgcattgactgctcctgtttctactttagtttcaagaaaagctttattcatcttctttctctcatataaagtaaaccatactataaatggtatgaatgcaaatattaaaaccgtaagaggtatatttattgtacacaatattataaatgaacctataagcataactattgatataaataaatcttctggcccatgatgagcaagctctgaaatatccattaagtcattaataattctagacattatatctcctgttttattattatcaaagaagctattaggtaatttttgaaggtgcttaaatatatgtcttctcatatcaccctgcattctaacacctacaacatgtccccaatactgcatgaaatatccacatgcagccttgattccaaaaattataagtaatgctatggcaaatacaataattgtccttaaatctttattaggaatcgattcatttactagatcccttgtcataactggatatactaaatcgcataaagatgcgataagcgctactactaaatctaaaataaatagtaatttatatggtttataaaatgaaataaatttttttatcatttaaaatctccttcctataatgaataaaattcatatagcttgtatatactttaatataatacataatttcccaattgtaaggtggtgaataacttttatgaaaaagctattttattttgtaagcttctgcttagcaattctattgcctttattctcactaaatatcatagcaagtaaatctgatccagattatttttttccattaatctttatttgcttaggcctttgtgatacattgcttggcattaatttattaaatgcaaataaaaaatttttgggtatttccagttttgtaatagcaagtttcttattcgttttagttggaagcaaaatttgtatatataattaaaaatgtgtactagtagtgcattcctactatataacttttatattatatttaaaatttcttccttacatttatctaaattctcaatgaatgttcctgctattttaactggtctattgttaaatactattatattccctcggaaatatatagcttcatctagatcatgagtaaccaatataaccattcttttttctttgtctaataaatttttaaattcatcaattatggcatatttcaacttataatctaaagatttaaaaggctcatccattaaaatgacctttgatggctttccaaatgctcttgctatattaactctttgtctcattcctccgctaagtgcatttggatatttgttttttgtatcgtaaattccaactaaatttaatacttcatcaattctattctctaaagtagaatccttgaaataccttttgaatgcaatttccaagttttctttaacagtaagccactcaattaacctatcttcttgaaatatatagcttatgtcacttaatgaaacgccacttatctctccactttgaacatctattagacctgctataatgtctaatagagtactctttccacacccagattttcctattatacaatttatcttatcgtcgtaaaaatctatgttgaaattctcaaaaattttctcagttccatatgacttatttagatttttaatacttatattcatttggaccacctatatgttcttttccttaacaacttatttaaaaactctaaaactagagatataatgacaataattacaatccatgcaaaaatccctggagtattaaaattaactttttctacctgtatctgtgatcctatcccaaactttggctgcccgtatacttctcctgcaattacaactttaaaagtcaatgaaaatgtcgatacaaagatgctcataaaataaaatttcatagttggaatatagatctttttgacattgttttttaggctcacttcatatatcttcgtcatatcgattatttttttatctatttgcaaaaggttatttcgtataccttcataaaggattggaaaaatgatagcaaatcctgcaacaaatggtgtactatccttatcaaaccacaccaatgaaagaactactaacaccatagttggaattgtcttgctaaatgaatttacaggctccattaaatacttgaaaaagggatacactgttgcgagcacccctaaaatcattgaaaaaatcaaagctaatacataactagtcgtagtcctgtaaaaactgctaaaaattatctttaacgaatttttatcaccaaaaatattcttaatagcttctaatacttgttctaatcttggaatatatatgtcattatttattattactgcaattagctgccatatccctatgaaaaatatacatgatagtaaagtatataatctacttttccatgaatatttcatcatttggtatacttcctcctattgtttttggatcaaattcatttaattttttaaaataagtttcatattctttataacaatcctttattcctacgtattttatatttgacctatcaatagcttttactactattggcttctttgccgaaactcctatttcttcgcaataatctccaacagtttctttattattatatatccactcttctgaatctttaacttgcttcaaaagttctgaaacaaattccttatcattttctaacaatcccttcttaactataattgttgattgaggatatccatattgagagtcgtttaattttttccattcttcatttaaatttagcattacattaaacttatcatttttactctgaactgttgataaagccggttctggaattactgcatattctgactttccagataaaattattggtgcaagctcatttactgtattcacatagctaaagttaatttctttatctacatcaatacctttttctttaagtattgttcttgcaattatatcaggcgttaatcccttcccaatattgtaaacttcttttccttttaaatcttcaacactttgattttgattagttgtgcctatataaaacgatccaaatccaactgttcctgctattttatattccttgttcttattaaacacagttgccgccacgtttgaaggaacaattgcaatatctggttcactcttcataacgcttgtaactaagctgtcagagttttgctcaatagtataattaacattgtatccagatttaatttccggtttttcttttataagtttagctactgctatagctgtaagaccatctggtgttacaaagctaatatcttttgttgatttcttattatcttcagatttgccttgatttgagctactgccacaacctgcaaatgtaaacacacacaatatcatgattaaaaataatgataccttttttttcattctaattccccctaaaaaatattaatatctaaattaagaattaaatcaaaatacttaatagtaatattaattaattgatattcactattaattataataacatattaaaattgaaataccaaatctgtatgtatatccaactttaaaactatatttatgtggtaacttaccgaaatcataaatattttgttccgaaaagctgtgaaaatatcactgaaggttctaagccgcagatttcaccactttagcatgctcccactttcagtgtgacaagctaaagtggaacaatctacaactaagaatcttagcagctcattttcaaatgttttctccacaaatatatttatgatttctggtgaatatatgaacttaaagttctagcgaccttgtaaatatgttcatctaataactccaatttttgattggatatctatatagatgccccgattataagttagattgatactatgaaatatatctcaactagaaataagaattatgcttttgtaaccacaagggtcataatatgaaatgtttcattaggaatttgattgttttgattcttagattaaaagttgttccaagtatgctagttcaaagctcgcctttgaggctagcatcttgggtgcaacttgtgatcttagaatcatccatcataattcccttagaaactggaacaatagcataatccttatttcggcgagacatatgcatacgttcaggtcttaatcagggtatccatatataatttcaataaagattaaaaacgacaaaagaacatgtagaataattattaaacatgttctaatatatttctatttataaaaaatatacatttatgtacttactgagattagatttccacattcccatcttgattgaacgattaacttaatagctttgtaaatgtgaatatgttattgcaacacatatatcatttattatctatatatatcaacaatcatcccttgaatttcatcaattgttgacgctatatttatattatctttttcatcagaaaggagtgcttttgttaattcttcaagttttccatcaacagtatcaaccgttacgaaatactgagtctgccaaaagctaatatcttttttagtctcatacatgaactttagtattgattctagatattcttttatcatcttcttgtacataactacatcaacataagtcttagtagttacgagtctgttaccccttttttttatgtcatctatcatttttttgagttgttcttctgattttttatgtctttcctgactaaaactttgggaaaaatcttttttttcagaaataatttttctctcagaagttacagtccctcttcgcactctaccaatctccatgtatattcaatcctttcctaactcaaaaataaagtttatctaaaagtttaaaactctaaaaatagctaattacgctctattgtatatatgttgcaattcacaattacagctaaaattcttgcaatatctttaaaattatgatgaagaattatttttgcaatatatatatttaattaattatatcaaaatccagttattttctctacttaatatttgattttgatatgtatatttcattttttcccatgtatataaattcatcaaacctctaatatatatatgtatatactaaattatgaatggagtgatgttatccatgtggtttgatgcaccttcacaagaagttctgcaaaaattaaatgttaatcctgatgttggtctttctgaatcagaggcaaaagagcgccttgaaaaatatggagaaaacaaattagcttctcaaagtaaaaagagcctttggcagctattcttatctcaaataaacgatgttatgatttatatacttttagttgcagcaattatttctgcatttatgcacgaatatagtgacacaattgtaatactgcttgtaattttaataaatgctctaataggagtgtttcaagaatctaaggcagagaaatctctcgaggcattaaaaaaattatctaccccaaaagctatagttaagcgagaaggtattataaaagaaataccttctgaagaagttgttgtgggtgatattattatactagatgctggaagatatctccctgctgatttacgattaattgaaagtgctaatttaaaaatagatgaatcagcatttactggtgaatctgtccctgctgaaaaagatagtaatgttacccttgcaaatggcaatatacctataggtgatatgataaatatggcctttatgtcaactttagtgacttacggccgcggaactggtgttgttgtaaatactggaatgaatacacaaataggaaaaatagctgatatgctaaataaagaagaagataatacgactccattgcagcgaagacttgcatctcttggaaaaactttaggctttggagctgtaggtatttgtatattgatctttgtcatatcaatgtttcaaggacgagattggttcgaaatgcttttaactgctataagcttagctgttgctgcaattcctgagggccttccagcaattgttgcaatagtactagcaatgggtgtacagcgaatgataaagcaaaattctatagtaaaaaaacttccagccgttgaaactttaggatctgttaatataatatgttctgataaaactggaaccttaactctaaatgtaatgacaataaaaaaatgctgcataaataataaacttgtatctattaatgattgcgatctaggtgataatgatacaaaattgttgtttgaaggaatgattttatgcaatgatgctacttcaaaagatggtagtaaaacaggagatcctactgaaattgctttgcttgatgctggaatcaagtatgacttatataaagaagatttaagcacagatcactcaagggttgatgaaattccttttgactcagatagaaagctaatgactactgtaaataaatacgattcacattttaaagctttcaccaaaggagccattgataatttacttaaactttcagacaaaatcttattagatggagaaataattgatttcacacaagaaaaaaaggatgaaatcctaaaaatatctaatctaatgtctgacgaagccttaagagtcctcggtttaagctataaagacataaaggatgaaagcgtcagcatagattctctcgaaaaagatttaactttcgtaggattaatgggaatgatagatcctcctagagaggaagttaaaccatcaattgctttatgtaagcaagctggaataactcctattatgataactggagatcataaaaatactgcttttgcaattgctagtgaacttggaattgcaaatagtataaatgaatgcatgactggcgctgaaattgatagctatagcgatgaagaatttaataaaatagttaacaattataaggtatttgctagagtttctccagaaaataaagttaagattgtaaaagcatttaaattccatgggaatattgtatctatgactggtgatggcgttaacgacgctccatctttaaaggctgctgatataggtgttgctatgggtattacagggactgacgtcgctaaaggtgctgctgatatgattttaactgacgataactttaccacaatagtcaaagctgtagaggaaggaagaaatatttatgcaaatataagaaaagctataatattcttattgtcctgtaacttgggcgaaatagtttctttatttgtagctattctattaaattttgatccaccattattaccaattcatattttatgggtgaatttaataacagacagttttcctgctctttctcttggtatagatccaaaggatccaagcgtaatggagcatccacctagaaatccaaaagaatcactttttgcagaacacatggggttatttctggctttaaatggtgtactaattggtggtgtaacattagctgcttttcttcttggtgaaagattgtatatgagctccctagttcatgctcaaactttagcttttgtagttttaagtttttcccaattatttttttcactctctatgcgaagcagagaaaaatctcttttaaaggttggactcttcacaaacaaatatttattgctatcaattctacttggtatgtgtattcaatttttaataattataattccattcttcgctgatgtatttaatgtatttattttaagtgccagagattggcttctagtaatatgtatttctttaatcccattcttgcttaacgaaatatttaagttaattaaatatcatagataagcataaggtaattaaaatattacatttattacaatattttaatgatcaatttttatgaatattgacaaactttttttatctttttaattatagttgaaacaagataatatctatagtacaatctatcatataaaagggatttaggaggtattaaaatgataataaaatgtatagataatgatctttgttcaactttaactttaaataaggaatatgtggtcatagaagaagcacctgaatattatgtaattattgatgataaaaatgatgaaacaacttgcagaaaatcaagatttgaaattattgaagatggtggtttaactaagaaagctaaagctactattacagaattaacttatcaattagaaaatgattttaaagacataaaacaattttcaattagaaaaaattcaaaaggtgaaattaaagaaatatctgtaaagttcaaatatatctagaaaaaagttctgctggaaggcagaacttttttgattcacaattcacgattaaatttttagatatatatttttaaaactccaaagtagcttacccataattgtgcattatgaattaaaaattaaattagtagattaacattatattcttcaagccaaatatttacttgaatcaagaaagcaagcaattgtggtccagtcattagctgcccataccatggagctttatatgattctccttttgtgagtattatctctctaactaccttttcatcaatgatttcatgaattggtgaagatttcttatctaaaatctcagttatcatcttacatacaatgtctgtataaactggattatgtgtcttaggatatggactcttctttctgtatataatgtcatttggcaatattccttcaaaagctgctcttaataatcctttttctctgcctttatataattttacatcagctggcaagttgaacgcataatcaaccaatctaatgtcggcaaatggaactcttgcttctagtccattatacatgctagtcctatcttttcttgtaagaagctgaaccatgaaccattttagatttaaatatgacacttccctcatcctataatctctcttactctccccatcaagatgagggactttacttagagatttttcatattgagttctaactaattcctctagcggcatattttttaatttcttattaactatagcctttctatcattaacaaaccttgaccatgggaatgtatctaaatagaacatttcatcccttgtaaaccaaggatatcccccaaagatttcatcagcacactctcctgtaagtccaactacaaagtctttacgaatttctttacaaaatagaagcattgatgaatcgatatctgccataccaggtaagtctcttgatatcacagcatctcttaatgcagctgctaaatctgaatgattcaaaactacttttctatgatcactatttataaactttgccatttcttctgaccagtattcatctgatgtcggttgaaataatgacgctttaaaatacttttcattgtcttcataattaatcgcataagtagtaagcttctttccctgttttctaaattcctcagcagctattgctgatataattgaggagtctaatccccctgataggaatgtacaaacaggtacatctccaactaattgtctctttactgcatctattaataattctctcgcatgaactattgcttcttctgctgtttcatgaaattcttttgcttcaactgtccaatattcccactttttaatgtttccatcacctgaaactaataaacagttggctggtgcaatttcttttatattcttaaatactccgcttcctggtattgtcgcaggtccaagcccaaatatttcagttaatccttccatatcaatttctcttttaactcttggatctgctaaaagagtttttatctcagaaccaaaaacaagggtattatcatgaacagtatagaataatggcttaacccccatttgatctctagctaaaaaaacttctcttttatcttcatcaaaaactccaaatgcaaatatacctataagcttatttacacagtccttcccccaacaaatatacgatgtaagcaatacttcagtatctgaataagaatcaaaagtaaatcctttagcttttaattcttttcttaaatcctcagtattatatagctcaccattataaaccaatgtgtatttcttaccctcaaatattttagtcataggttgcaatccaccttctggatctacaactataagccttctatggcctaataaaacatttggagatatataatatccttttgcatcaggtcccctcttctccaaagtctttatcatattatttaatatatctttatcttgtactatattctttttaaaatttactaatccagcaattccgcacatccatttcaccttctaatagtattgatactattaaaatatgcacctttaaaaaaagtgcgacagcacattaagatctttgcacatttataaaaagtgcgatagcacaattaagatcttttttactttaaagaaagtgcgacagcacaattaagaactttacacatttgaaaaaagtacgcacaataaaaaaaagcacgaagtgcaattaagatcatttcacagttaaaaacttctctctctaataattgtataaagaattataaacttatatatttgataaacatgaatactatttcttatctgtaacatactagatatgtatatttaaatagagagagaaggtaaaataattgaatgttgcaaacaattaccaagcaaatattgacttaattcattcaaatttagttgtagataaaagtttcgatatcgttgaacgaaacttcattgttgggggaagaagctctgttttatattttttgaatggttttattaaagatgctatcatggaagaaatattaaaatctttctttaagataacacctgaaacaatgaattcatacaaaacaattgatgactttatcaacaataaagtttcacacgtatccgttaaaactgaaactgatttagacaaaattttaatcgcattattatctggccaaacaataatgtatgttgatggctatgattcatttatactcttagatttgcgtacttatccaggttcagattcatcaaaacctgaaaaggaaaaaactttaagaggtggaagagatggcttcattgaaaagttagtatttaatgctggtttcattagaagaagaataagagatcctagattagtttttgacatacaccaagttggggatatatcaaaaacagatgtatgtattgcatatatagatggagttgcagataaaaaagttcttgatttaataattgatagcatatcaaaagtaaatataaaagccttaacgctttctgaccaaagtttagttgatgtaatgtgcacaaaaaattggcttaatccatttccaaaggtgcgatttacagaaagacctgatgtagccgctgcacatatagttgaaggaaaaataattattattgtggataattctccaaacgtaataattctcccaacaggaatttttgattttttacaagatgtaaatgattattatttcccattattcactggaaactacttaagacttgttagaaatttcgtaatgttagcaacaatattattaactccagtttatttgatgattgttaatggtaatatttttataccgagttattttgacttcttgaaaccgcaagaggaatttgctttacctctgctcggacaattcatgcttttggaatttgctgttgatatattaaagctggctggtttaaatactccaagcccacttggaagtgcaatgtctctgattggtggtttaatccttggtgattatgctgtaaaaacaggctggtttattcctcagtctatattatatatgtccatcgttactataggggactttactcaacctagtatagaaatgaattttgctttaaaatttgcaagaatgattttacttatactttgtggtttctttggtttctggggatttttaggcggtattatattcattctaatagttatggcaagtacaaaaacaatagctggtgataaatatttttatcctttaataccatttaactggaaagctcttaaaaatttattattcagaacaagaatatcaaacgatgtacaataagtcctgtgaaggaaaaaagtgataagttaacataaaacttatcacttttaatttataacttttcacttgccacttataggagtctagttccctctttatcctgtgtaattaatttctctctcattagcccgcctaatgtcattttaaaataatttttgcttgtattaaactctctctttatatcttcaggagatgatttatcattataaggcataaatccaccatttgcttttaaataattaagtatcgtttcacttaattcacttcttgcttctaaccttttctttcttgttgtaactccaatagtcccatcttcataaattctcttgactcttccctttatttcttgtccaggatatatgtactcaaaatgttcattagctaatattaatcctctatattcaccatctattgcaacatttaaggtcgcattctcatttatttcataaactatagcatttacttcatcagaaactttatatttaccttcttctgctatatctaaataagagtgtattctagtagttgccgctaatctatcagttttatctacatacatataaaatagatatttttttccttctttaagcttataactttgctcttttaatggaacgaataagtctctttcaagcccaaagtttacgaatgccccaatgttattctggcttactacttctaaataaccaatctctccaactgttaataatggtttttttagagttgaaatcatcctatcctttgaatctctataaatgaatacttctaattggtcaccttctgttatttcatgtccttttgccgcactgtttggaagtaagacctcatcaccaaaattatcttcaagataatatccaaagtctacttttttacttacttttaatttactatattgccctactgatatcatttttaatttcctccattaatcataacaacttaatcgatgttatcttctttattacttttcttgatcattctatatattgaaattaactttctacattgctatcatcaattgggtactcaccttactagaaccttgaatgtaaatttattactacacaatatgataataacttgtatcttttctttatataaaacatgttaaatctaaattacttgaaatctttactcaattccagataacttatatatgatttcttaattccttcaatttcttcttgtgttaactttcgtatcacttttgctggatttccaagtatcaaaacgccatcttcaaattctttattttgagttattaaacttcctgctcctataattgtattattgcctatttttgctccatttaatattattgatcccatacctactaaaacattatttttaatggtgcatccatggattattgcgccatgccctatagtacaaccatctcctataactgtattatatccataatcaacatgtaccacacaattttcttggatgtttgtattttctcctatagttattgatgcttcatcacctcttataacagcaccaaaccatatattcgcatttttcttaagtgttacgtctccaataattactgcagtttctgaaatataaatatcgctatccaaaacaggttttttgtctttataaattttcaccataacaatcacctcactaaacactaaggttattttaacattacattcacttattgtcattattttgctcactttagaaatacgaaataaaataataatttaaaccataattaattattaattgtgaattgtgcattgtgcattgcaatatatatatactataaataatttttagaggtaataactttgggaaaaaaaaaatcacctaaaaataagcttaatatagatgatctgaatttttactatggaattcctcatgcccattgcaatttttccactggacatggaactccaattgaagcatttgattatgcacgacataacggccttaatttccttatattaacagaccataataatcatttaacaaaaacaataaaagtaaaaagctctgagctaagtagatgggatgctctaaaatatttaactgttcgttataataaaaaacatgaaaactttttagctgtggttggttttgaaagcaaaactaatccgtttggagacattaatgtagtaaatccaaacaggttctttactggaacagtaaataatatgcaactattagttttatggatgcttaataatcctaatgcatttatttcaattaaccatccccacaaaacaataacatatttagaatacaactctattttaaataaactaataacttcaatagaagttggaaatggatcttatccaaacaagtatttaagatatgaaaaatattattaccatttactcgataaaaactggaaactaggcgcaatcaatggtcaggataatcatagattaaactttggtgacgatgaaaatttaacatgtataattgcagaagagcttacaactcagtctctagtcgacgcttttagaaaacgacacacttattcaacagaatccagaactttaactatgtactttacaataaataatgaatttatgggcgatattatacctatggaagatgataatttacaattttcaatttttgcccatgatcctaatcacaaaatattagaaattgatataatatctactggtgggactataataaaaaaaatatctaacttgaatttaaataaagtaaaatacttgtattctcacgagcccttaaaaactgagttgtggtatgtaataaagatagcactggataataacaaaatcgctattagttctcccatttttagaggtcaagaataatattgtttatatacttaaaatatatatgttgcaattagcaattcataattcactatgcacaattacagctaaaattcttgcaatatttttagaattatgatgaagattttttgcaacgcatatatattcttaaaaaaataattcatataaaaagaaatagaatatataatttcaaaacatttacattgttataaatcatacattctatttcttttctatgtttctatttattttttttaactctatttggtttagcttttggcttaatcactatttgcttttcttttttcttaagtccgcctctttgtgtaatatccatgaaccataagaaaaatagaactgcaaaaatagataatccacttgaaatataagtatttgatgcacctacgaatatttgggccgcaaataatactgcagctatcgctaaaggtatccacttatttatacgcactttaccaaatataaattttttgcataatgcataagctacaaatataacaagaagcattactacaaataaaataattgatgtaaaaagattcatctactcacatatcctcctataaaaaagtctatatggttaatgataatttatatataaactattatcaagcattccttttaattggtgttgatttcatcagtatacattgtaatcaaaaagtaataatttttattaaaatatcaatattataatttttttttaacaaatttatagttttatctttaattattcgcgtatatttgataaaatagaaaaagtatatgatataaaagatatgaggtgatataatgaatttaatttcaaataatcatttagatgaattagatttacaaatacttgacttattaataaaagattgtagaactccttacttggagattgccagaatatgccacgtaagcggtggtactattcatgtaagaatgaagaaaatggaagatctaggaataataaaaggttctagaataattttaaaccttcctaagctaggatacgatgtatgttgttttgtaggtatctatgttgataaaacatcttcttttaactatgtatttgaccaaatgtcaaacataaaggaagtagttgaattgcatctaactactggtgattattctatgtttgctaaagttgtatgtgctaatattttagatttgcagaatgttttacttaacaagataaataacattgatggagtacaaagaactgatacatttatttctctatctcaacctatagacagaaatatatcattagaataattataaaaaaatagaataaaaacacatttttatatacatactaaaggtatcttataataaggagtgtgttttttatgaaaattttaaattcaatttcacttgcccttataattataggcggcattaattggggcttaataggtttttttagatttaacttagtagatttcctttttggaagtttttcaatgttatctacaataatttattgtttagttggaattgctagtttatattctatctcttttttcgttcaagaaagatctagagtataatgcagcataataaatattaatattatatttgttaaaataaaaatgacttaaacgctaattctatcgctgctaatctcaatataatatttatttatacttaagctttatacatagtgataagaaatttttaatgtaaaattaatatttctttagctatgttttgatatataatggaataaattattaatacttatattttactaggaggttagtatacatttgcgtacagtattaaattttaatttttataatttaatatatttttttgtattctattcatttgctggctggtgcctcgaagtcttgtattattttaaaaatgaacgtaggtttgttaatagaggatttttatatggtcccttttgtcctatatatggatttggtgtcttatttcttgtagtctttcttgataactacaaacataatattttcgccttattcttcttagcctgtttctttacaacagtcttagaatatattactggttttgtattagaaaaagcatttaagacaaagtggtgggattatactgacgatccatttaatatacatggtcgtgtttgtttactttattctctactctggggagttggtgaggtaggcataattaagataatacatcctatagtggtaaacataatcaataatattcccaaaacacttggtgaggtatttattttctttattattatttattatcttattgattttagtttaactatagcttctttaatgcaatttgaaaaaatgtcttttgcatttcaatttgtgccagctaattttttatttgataaaccaagttcattattgaattttacaaaagaaaaagctgttggtaggattagacactttgaatcatttttcagtaagctaaaaatgaatttatataatagacaatcaagacaaaacttttcaagtatttcttatagatctttaaatatttttaaggctttaagagataaattaaaaagagattaaggtaaatgctttaccttaatctcttttaggcacattaaaataaataataagtccaaagttgccatagatatttttcattaggcaatgcgacaaattgccctcatagcgggtctattaggtcgattttccaacgtagcataatgggaaataggctggcaaatggactttttatttatttgattgtgccttaatacttatttcatctttttaatttcatcgaataattctatagctgcatttcttggcccatttttttcttgcccttttacacctaaacaagttctaatttgtccaacttttacttgtccattttcaaacattgtattaaaatatttttctataagaatatttgtttcatcctgcttttgcgctggcccaaatggatttgcaaaaaatgactctactaagcccttctccgttgttgttcccttcgccattctagcacctgctttaaatactttaatggcttcctctggagttttaaagtaatctaaatatttttctccttcattaacgccgtcgtagttattagcatagaagaaaaagtctattggatgtccctttgatatttccttatatgatgctactggtactacaagtctagcattgaccttatccggattcataaatatacttctatccatttctttaaaggcgtatccttgatctaagtcatctaatcggacaaatgcaccaatctcagttccatatccattaattaatccatcctctattttaaaagttcccatatcatcaaagataatagtcatatctgaaatataatcttcgcttaaactacgaaaagcttctaaactttcagatttaccagctccgctatctcccatgataacaacattagcttcatctccgctttttaaaataatattcaccattgaaccatgtattggcaaatatcctctctttatcattattaagttgtataatgttaatgtcatcttctttatatacccaaaataatctatcttttctgaatgatttacatatccaagcattatatcattttgaacatcatcaaagaacactgtttttagatcttcatcgttatctttagctccatatacataaataatgtctggctttcttccccttgtttcttcacttctagccatctcgaacagattacataaagttattccatgttccataaaatctctatggaaataaataaaagtaagtaacccgcctatcttagctggataacaaaaccaatgctctttatttatttgtgcatactttaatggattatattttatctctgtgaacattccatctcttgtattctttttaggataagttataaatggtgtttctaaaagtatatgatcaataaatggtacttcctctaaagcttcatatccatttggtcttacccattccatttcatgaatcattatgcaggcatttccaccagctggtatttgtctataaacttttggctgatatcctgcaacatgctgttcaatttttctgtacaaacttagaattaatgtagaaaagttagcatttgcttctgtaaaactaactgctgcaaggccttgttgaaccttatatctatgaactattgtatatctttcaagctttctccaaaataaatagaaatcttctataaatactacaaacttgtccctatcctctaatagtttcgaatatgagtcactaatctctataatttcctcaacactcataactgttaaatattttattactacagttaaatctcttctaatatctataagactatctgtatctaatgtcttacttaaatatctgtatgctactgaatttttctttttagctcttcttagataaacttctaaaattcgtctaaatccatcactttctagtatagcctcaaagctattacagtactttgctgtaaagtttatcatcactttgtcattactcatagaaaattctttcttcatttcatggccccccatatgaattttttcatatttaaatattgcatttttcttttcaaattccacatattgaaataattatatcatactttttgcaatattcaacctttgcatttttcattttaaagtttttttcatctaaaaataactcgagttcataagaaatttcttaaattaaaattcaacaaagttaattcctccacccctatctgactatgctataaaaaagctcagaaagctcattatatgaatattatatcgtctttttacaattttgttcgtgttttattttaactttttatttttcttttgcttgcatttagaataattttgtttccattacatttccttaaatggtagaattatattaaaactatgtaatcaaggagacaacttttttatgaacaaaaataagtataatgtaaaaaaatatttattaacttttcttgcaattctattattttcattttccatagtaagttgtggccttacaaaattcaattcaaataaagccaataacgctgatataaacaagatgttcgttcattatatagatgtaggccaaggcgattgcattctcgttcaagtaaataacaaaaatcttttaatagattctgggcctaaatctgatagaagaaaactttttaactatttatcagggctaaacttaaataaattagattatgtaattgcaactcatccacatgaagaccatattggtaatatggatgatataataaaaacttatagtataggaactttctattctccaaaagttgaatctactacaaaaagctttgaggacatggtagatgctttaaaaaataagaatttaaaggtacatgtattgaaaaacaatagtaattctattgacttaggtgaaaatactaaagtaaatgtcttctctcctaataaggatttttatgataatttaaacaactactctcctgtaataaaaattcaatatggtaacacttcttttttatttactggtgacgccgaaaaggaagtagaaaaagaaattcttaataataatgaagatatcagcgcagatgtgcttaaagtgggacatcacggatcctcaacttctactagtaaagactttctaaaaaaagttaatccttcaatagcagttatatctgtaggtaaagataatatatacaatcatcctgatgctattactacaaaattattagatgaaagcaatataaaaacttatagaacagataaagatggaaccatcgtcatctgctcagacggctctaacatatcaaaaaaataaatcaacacctaggatgcttcattatattaaaagcatcctaggtgttcttaaagcattaaaatagaccccaaaaacttggagccatttaaaaatcagaaataaaatttatttatttctaaattatttatttctatcttatttattttgcagtcattaattagaattattattcaatgaattttcttgaatatcatactcttcttctagattttctaaatcttcaacttcatcttcagcgatagcttcttcgataatatcttcataaatatattttttccaatttacatatatataatataaatttataacatcctgctcattataaagaagaattttttcaattttctcttctggcattcttttgaaatagcttttatctttcataactttgtgaaaagttttagctaaattagatccgctgattacctctccctctcttacaatatcaaaaactttttctaactttttaagcccaatagacaattttttattcttttcatattctttttgaatatcaatcgaatcaaattcttcactaaaattataatatatattattttctttgaaaagataattaataactgaaaaatcattattccctgaaaaagtgataatggccttttttcctttttgtttcatctttataaaatattctttagcgagatacaatatatgtgtcgcctcatctctatcttcaatcatatattgggttactagaatattattatttttcttatcatactcacacgccccaaatactccaatacacttaggcttcttatatacataatgctctaaatcaaagaagataatttcttctggtgtatattctttatctagagacttcatcataaattcttcactatattcttcaaccttcaccttattttcacgaataatcacagtatcactcttttctataagaattgtatatcctcaatgtccaaattgtatattacatcctttctttcaacaacaacattcactctttttattaattctcgatctttcaatactttttgcaaaagttctttagttggattcatacaataaggatgttttacatttttaaacatagtataatcgcctgctgtatctccatatgcataactatcgtttaaatctatatcatactttttaacaaattcatttatcgccttcgatttacttttactatcccacattggtgtaacttgccctgtatatacatttttatcatctataatatattttgcacctatataatctgtaaagccatatttcttggccatctctccaacaagttctgaaggcgatccagatattataattagagtatggttattagcttgatgccactttattctgtccctcgtaaaagtatatactctatcgcccttttgttctacaactttcttagctatatattccatttgatacttctgtaatcctttaattgactcaatatatatatcaatcattttcaacaggtattgatcataatcaccctgcctcttatcccacttcataaagtaaggccttaaatcattataccatctttctgaacctataatttcatatttaaccatctttttaaatacttctgttattagtccttctctgtataaagttccatctaaatcaaaaaacgcacctatatttgccattaactcacatccttttatacttatttattatactttattttttcatttcagaaaagcttataaaatctatctgattaatttaaatatatatgttgcaattcacaatgcacatttcacgcttcacaatcacgacggaaattcttgcaatattttttgaattatgataaagaattatttttgaaatatatcatataaattgtataagtaaaaacactaccaaatatatttattattgatagtgtcgttaaaatttatccatgactattctataaaagttagaatttcatctatattctttctcactttttttcttatattatcattttctggatatccaacagccactactaatctaattcgctttaatttatttatatttaaaagtttctttagttctttttcattaaaccaacctaaaatacaagtacctaaattttgttctgttgccgctaaacatatatgctcagttgcaatcccaatatcaacagatctataatcctgctgtttaattaatgctccagctcgtgaagttaaatttccactttcctccaccactattataaaagctggacattctgtagtaaatttattcataactgcatcctgtaagcattctgaaaccttaggtactagctctttattattaactactacaaaatgccatggttggctattacatgctgatggagctaatctggcagcctcaatacattttactaacttttctttttcaacaggtttatttaaatactttctacaactttgacgttcatttaataaatcaataaattccttcataaaacttctcctaaattctttataatcttttataaatcaatttctccaagactttctttcttaactaatcctggattcttttttctaaactcctctactgttttctcataatatatttttatggttgccattgtaggtgatcctagaagcattccaaaaggtccccaaaagccaccgcctattgcaactcctaatattatccctaatggactgactccaaccttttttcctataagcttaggatcaaggtaccaagcatcaaaaagatgaatacaaagtaaaagtatgaataccataaaagccttcataggtgaaacaaagattgcaactcccgcaccgactacttcaccaataagtggtccaaaataaggaatcatattagtaatcccttctatcagggctattagtggtgcatagggttccccaacaattaatagacctataagtgatataaaacctattattgctgaatcaattgcttttatccctatataaactcctatcattttattataggttctaataaatgtaactaacttattccccttttcttcattaaaaatcatatatgttatggttctagcacgttttaacaacttttctttatccattaaaacataaattgaaattaaaaaaccaaaaatcacactaactaaatttgatgtaaatgataataagtacataataaaattttgtagtagtcctattgttacacttcctatctggcttgacatttcctgtagcttatttaaaagtcccgcttgtacaatcagtgtctttattctttcattttgaagaagagtattgatccacttttgtataatttccacataggccggcatttctctagttatatttactatactatctactatacttggtatcgtaaaaaataatattataataattaaagctataattataaaatatgtaatcaatatcgatattgctcttttagttttaaaattattttcaaaaaaacttactactggatttaatatataagcacaaataatagcatatataaaaggtgacataatagataaaacttttctgcctatatcaaagaaaaaattataattatctataagtttgtatccaattacacctattaaagcaaatattaatatatccctatatttaatatttctatttataaacaattcattccacatcctttccatgcttttttcaattataccatatatcattttttaaggcatataaaagaaattaacgagtcaaaaaatagagggttgctacataagacatccctctatttcaaaaaattataataaatttaatattaaataactacattttttctactacatctattccaagtaactctaatccattttttattacttgtaaacttgctttaactaagtttagtcttgtagcttttaaatcctcatcttctaagttcaataccgaatgcgcattatagaatttattaaatccttttgcaacttcaattacgtaccttgttaatattgaaggttctaacttatctaaggctaaagttattacgctattaaagttagctatactcttaactaactcaaattcttcttttgaagataatttactatattcaacagttccagtacattctttacctctgtttaatatactatttcctcttgcatatgaatattgaacatatgggccagtttctccatcaaatgataatatttccttccaatcaaaaacaatatctttttctcttgagtttttaagataagtaaagattactgctccgacaccaattttctttgcaacttcctctttattttcaagttctggatttttttcatttataacttccattgtcttctctacagcttcacgaagtaaatcatcaagtaaaacaatcgatccatttctagttgaaagttttctatctgcaaatttaactaacccaaagcctacatgaacacagtctttagaccattcatgtcctgcaagttctaacactttaaatacttgtttgaagtgaagtgattgaggagttccaactacataaacacatttatgaaaatcataagttttctttctatacatagcagctgctaagtctcttgtagcatatatagatgcaccatcacctttaagtactatacaaggtggcatattatattcttcaagcattacaacttgagccccattactttctacaagaagtcctttttctttcaattcatcaacaacaacatccatcttatcattataaaatgcttctccagctaatgaatcaaatttaactcctaaaatgttataaactctttcaaattcttttaagctcaactctctaaatctagtccaaagtgctgttgctttttcatcaccagtctctagtgccttaaagtttgctcttgcttcatcttctaatgaaggatctttttcagcctcttcgtggaatttaacatatattctaagtaattcatcaattggagccttttctaatgcctcttcgtctacccatctatcatacgcacttataagcttaccaaattgagttccccaatctcccaagtgattcaatcctacagtattatatccttccttcttaaacatcttatataaagaattacctatagctgtagtgaataagtgaccaacatgaaaaggttttgctatattaggcgaagaatattcaacgcaaactgttttcccttcccctatatttgatgctccataattttctccatctgctaaaacctttttgatcgtattttctgcaaatactcctttatcaacgaagaagttaacatatggccctaaattctcaattctttcaaatccatcagttgacatagaattcttcaattcttctgctatcatatttggagcttttctcataacctttgacaattggaaacatggaaatgcataatctcccatttctggctttggcggtatttcaatcaatttttcaatagcttcaatttctaattccacatgtttttttattagttctgcaactttacttttataatccataatatcctccttatatttagacaaactcttcataaattaaataactttataatttgtaagaatgtatttctttattctttctcaaaatttaattttcttagtcagtatttctcataataaatgcacaaatttaacttcgatatagatttctaaagaacaaaaaaaatccgcctcttaaataaaaagagacgaattatccgcggtaccactcttattgtattttatataaataaaatacctctcaacttttaacgcaatttaacttgcgaccagccctactaaaggtttaaaaataataattaatatatcataccagctatattagattattatcttttcaactacttatttcaggtgatttctccaaggctcttttcacttaatctatccatagggcttacaccatctccctattcgctaaaggaattaattaaactactttcctcttcttagaatttttcaatattaatgataataaattatacaaattatcttaaattttgtcaactttatttttaaaataggaaacgtgttattaaattagtaatccctaaaagcatattacgtataacgccggctggtatagaaattattcttcctccaacaaagattaacgctaacataatgaacatttgatattgataaaatttttcttcaaatctatagaacgtatttggacttaaatctcttaaaagactaaagccatctagtcctggtattggtatcaaattaaataatcctatatttacattaataacaagcgtcatatatatcattcgctctaaaacaccagctaatgcatctggtaaaaatctatatgcaaaactataataaagtcccaaaactattgaagttgctatggcaactaaaaaatttgcaattggtccagctaaacttactttcaagtcatctttataatagtttttatatgccgatggattagtttgtactggctttgcccatccaaagctaaagataagtacagccacaaatcctataggatcaatatgcgcaattggatttaaagtcaatcttccttgaaaccttggtgtcttatctcccattctatctgctattaatgcatgtgcatattcatgaaatgtaaaagcgataagcatccctggaatcattaaaatcatattaagtactgaattcatgttttcctcctttttcgatatgtatgttttatattatatcatacttagaacaaatcctattaaaagaacatatatatttcaactaaataatattactctgttcttatagacttattcatttttgccacctaataatttaagataaatttttataaattaaactttttaggtatatatattctttatcttccttacgctattatagtgtcttaaatgtttatataaaatgtatatactgcttactatttattcccaacattatatcataaaagattactatcaacaatgtaaatgcacttattagtttatatcagaacattgttctatatgttgtactaataaacctacatttaaaattttagtaaaacaaatgctcaattaagacaaaaggtagaaactcagttacaacatatacattataagatctaatttaataaagagtgtttaatttcaatttaattaaacactctttatttaccctctttatttactattatttaaacttttataaactaattttccgctattatcttcagtcgctatgaaatcttctttaatctgaacaagttttccttcatattcaacttcttttcctgtacttaaattcttgacactacctttaagattatcattaactagtatttcacttttattactaaaatacaagtcattagcacttacaaccgaatcaagtgttgcctttttccaatttgctgtatcttcatcaacttttccataagtgatactggtaattttatcaccgttaagctcaccaatataaatcacatcatttctgtcgattccaagaagcgtcagatttttattaccactaaatgttaattgcttattggggctggtaacaaaaaatttactattcaacttatcttcatatattaatctatcgttgtgaggcattactttcatatttcctaaaacattaactgctagaggaaccttttttctttcataatctctatcaaatctataaactgcgctctttaaaccacctgtatatatttctacataaaatacacctgtaaagacagaagtggttatctttttaacttccataccctcttggtatgggcaaatatcttctttacttgcaactgtttctgttaaatctttagcattatatgttataagctgaactttagattccccatctttttcaatcttctgagctattactagtatatctctttctaaaagccaatcataatacataattgtaccctttttttccgttgtaattggattacttgttcccgtcttggtatcttccaaatacacactttcgccatcctggtaacatatgtatttaccatcatctgatattttagtatcttttgcacttcccggaatagatgctgaaatatcttttgtattatcctttttttgaacttctattttattacttttaaattctgacgtatgcttaaaaataaaattttctaaaatatataagccagaaatttgtaatagtatagataacaatgcccatgcagttatcttcttaaacatcttcataattctacctcaccttctgtttatttaacaataactgctgttggaatagttctttctcccatactatttgatggtttatttctaacttctccatagtaatacaatgttgtcgattttccaccatccaagttcattgcattccatgcacctagctgatgcataatttcttgtaattcctttaatgttgctcctatgcttccaatttctctaccatctataactaggagaattattgagccatccttcatttgtcctatagcagttttaggggctgtcccaaatcctccatcaccgtttatctttaccatatttccattaattattaatgccggaccaaaacttaaagcttcctgaattccaagttctttaagtttatctactgtataatcacctacaaccattactccatttttatctatcccaaaagttgttgttgggttatctcctacatcattaactttcacttcaccaccagtcattacaattcctgatgccaatccaccatttcctgtccactgagcagcagatgattgatctgtaaatgctcccccattaatagcagctatagcatcattgttttcagcaattgttgatgtagtttcaccttcaactcccaatttagaacttactccaattttaactcttgttgggtcttttaccaccaaataataaccattatacttagaattttctatatcatgaagttctatagtatcatctttaacctttggaactttaatatcagatatattggtagtttcactagtttcttcagttgagttttctcccataatttctgctatttttttatctgataagaaccatgtagccagatattgatgactcattgaagtcattgctgctccaacatattggcttttcgcattatcaaatggtccatataaaagtaaaaatgggaatgtacatccagtaaaaaataattcaaatgcaaaaaatatagctaatgtcttaaatgaaatcttatttactcttttcttgcttttttttaccttagatttcttattttttctatttatatccattttattatcctctctaaaaatgcattttaattgcatttataaaaattacaccagacctaattatataatattttcaattagattacaataatttcatttttccagcattttattctatttggtacttggattttgcttttaaatactcacattatgttataattagtcttaggaggtatatataaatggaagataaaattttaaatgaattaaaaaaatctcaagattatgtttctggcgaatacctaagttctactttaaatgtttcacgaactgctatatggaaacatataaaaaacttaaaattaaaaggctatataatagaaggaatttctaataagggatacaaattacttaattctcctgatttattaaataaaaatgaaattctacctttattaaaaacatctgctattggaaaaagcatagtttactttgatgaaatagattctacaaatattaaagcaaaagagcttgcacagaaagaaatcgaacacggtactatagtaattgcagaaaagcaaactttaggaagtggtcgcttcaataggaaatgggtttctccaaatggcggtctttggttttcattaatattaagacctaaacttcctccaacggaagctcctaaaataactcaaattgctgctgcttctgtatataagacactaagtaatttaggtattaattcaaccattaaatggcctaatgatatacttttgaatgacaaaaagttttgtggaatcctagctgaaatgaaatgtgacatggatagtgttcattatttagttttgggcgtagggatgaatattaatatagatgaaagtgactttgatgataatataaaagcaattgccacttcactaaagattgaatatgataaagatttcaaaagaactgagatactttcagctttcttaaataatttcgaagtattatacaataacttcataaataaattagatctttccgagacaatttcaatctgccgagatcattccaacattttaggtcgaaaggcaaaattaatcacatataataatgaagaaattgttacctgtgtttctgtttctgataacggcgaccttatggtcatagatagcaacggaaatgaaaaagctgtaattactggagagattagttttaatggaatgaactaaaaatttatattgcaatgtttaaagttaagtatatgtattatcgaaaagaagatcatgcatttgttcgggttactgaggattttgctgtgaatttctaacagcagaagttgtacccatttctgcatgttgctacagtaagtgcatgacaagcaaaaatgaaacaacttctactgaagaaatatctacagctaaatcctctatgtaacgcctctacaaaagcatgatcttcttttctggtatatactaaaattaagatatactcttaactttagcccgttatctatgtgtgaaataaccaaaatgtattaatcggcaatctctcattaaaatattcttataggatattctaaaattcttaagccacatatatgtattctctttctttgttttgctatcattttgagtatttcaaatattataaatttatgatgatagttataagaaaaagtcacagacgaatgtgtagtggtatcttttaccagctactttttcaaatatatgtgagaaaaacttaggaatcaatatagactctaaaatatttaagtcaattattagatgggatattgctaaatgcagaaatataaaaatacttgcataaatatgaatttgatttaagtttactactaaataaagaaaaagaatatatgcttttgtgcaatgttcattagaagatcttgccggctgcgattcttagattagaagttgttccaaatatgctagttcaaaactcgcttttgaggctagcattttgggcacaacttctattcttagaatcacccggtaaaatcttcagagaaccaggacaaacgcatatattccctttcgagagttcagcagtaaacttagaacttacactcatactgcaagtatttttatatttcgcttagtacacaatacctttagttaattctagttatttattcacaactttttcaatatgtccttttagaacacttgctgattcttttaattttttcaattcttcatcatttagaacagggtttacaattcttacaacacccttactatttaaaattgttggggctgctaagtaaacatcttctattccatactctccctgcatcaaacatgatacagttaaaatagtattttcgtctcttaatatagcttctactattgtatttactgctaatgctacagcaaaataagtagcatttttcctgcttattatttcataagctgcatttttaacatcgctttctattactgattttacatcatcatcccactctaaattgaactttttagcatattcttcaaaagtttctccagctatgcttgcagtgctccaacttacaacttcgctatcaccatgttctcctaaaacatacgcatggatattattattatttacattaaagtatttaccaataacgtattttaatcttgacgtatctaatacagttcctgatgctattactctttccctagggaatccagataacttataagttatatatgcaagcacatcacatggatttgatactactaacaaaatagcatttgggcttgctgctgctatttgtggaacaaagctcttaaatatattgtaatttttttcaataagatctagtctagtttccccttctttttgagctgcaccagctgtaattataactatatctgaatctctagtttcttcaatacttcctgcataaatgctaacaggctttacaaaagaagtaccatgaactaaatccataacttctcccattgctttatccatatttatatcaaataaacatatttctgtagctactccactattcattaatgcatatgctgttgttgcacctacaaaacctgcaccaatcacagatattttacgttttctttctaccattatatattcctcctaattaatacaatattaattctattctttccagataacaaatttattatttgctcataaaaagtttcatcttaaattattatccaaaaattttattaattaataatcattcttatctgattataccttatttgaattttttcgtaaatactatataattaaatttagcaacttaataatgaatttattagtaagcatatagacgtaattatttttaaatgttttacgcagaagatggaggtacactttaatgaaattattattttttgatacagaaaccactagcataaaaccgggcagcatatgtcagttaagttacataactgttgatgctagtacaaaacctcagataactactggtaaaaatttcttttttacagtcgatgagatggacccttctgcccaagaaattcatggtttttctttagagaagctttatgaattatctaatggacaatattttgaggatttagtacctgaatttcttgatgattttatgactgctgattttctaatcggtcataatgttaattttgatgttagatttttaaaacatgaactattatctttaggagaggatttttacccaaaaaatgttttctgcactatggcttactatagagatatatgtaagattccaaaagccaatggagaaatcaaaaatccaaaattatctgaagtcatagattggttaaatatttcaagcgagcaaattgttgaaacatctgaaaaattatttgaaggtagtggaaattatcatgatgccagatttgatacagctgcaacatatttaactgttatcgaaggattaaagaaaggctactttccaaaagggtatttttcaaatcttctagctaagaactcaaacggcttaaaataaaatataatttttattaattaacacctcaataaaaatatcatataatatactataacttgtggtttttactctatctattctttatggtatttagaactttagatttagacagttttaaaatttattcttgtcttgtttaatttataaatgaggtgataaaatgaaaaaatatgtttgtgaagtatgcggatatatttatgatccagaacttggagatcctgatggtggaattgctccacatgtagattttaatgatttgcctgattattgggtatgtcccatttgcgcttttaacaaagataatttttctgtactagaataacacattataaaaattatatttaactcatctcgtaaaaattagtatacttaaagacaatttgaattaatattttcatatgaaaccaaaaagactatatggactggaatattatgtcctatagtctttttatatttgtaattaatttattagcctcaatccatttatgttttcttaaaatttttgtgcatttaaattcatcaaaactttactataaacacaataattttattttactaaatactttcatggaatgttctgcttataacttctaattgctgttcttttgataatctactgaagttaacagcataccctgaaactctgattgtaagtgttgggtatttatcaggattttccatagcatctatcaatgtttgtctattaagaacattaacatttaagtgatgagccccttgagtgaaatatccatctaatattgcaactaggttagttatcttttgatcttcattttttccaagtgcatctggaacgattgagaatgtattcgatacaccatcttggcaaatttcattatatggtattttagctactgagttaagtgatgctaatgctccattaatatctcttccatgcattggatttgctcctggtgctaaaggttcacctttctttcttccatctggagttgtccctgtcttcttaccatacattacatttgatgtgattgttagcgctgataatgtatgttttgcatctctgtatagtggatgtttcttaagctctccagagaatttagttactaattctacgcctaaatcatctgctctgtcatcatcatttccgtatttagggaaatctccttcaacttcaaaatctacagttataccttcttcatttctaattggtttaacttttgcatattttatagctgataatgaatctattgctactgatagacctgcaataccaaatgccattaatctttctactgctgtatcatgaagagccatttgacttgcttcataagcgtatttatcatgcataaagtggattatgttcattgtatctacataaacttttgctacatactctaatactttgaagtaatttgcttttactttatcaaaattaagaatttcttcgtctgtaagcttttcaattcctggcactaccttaataccttttaattcatctactccaccatttatggcatataaaagtgatttagctatatttgctctagctccaaagaattgcatttgtttaccaaccttcatagctgatacgcagcaagctattgcataatcatcaccataaaccggtctcataacttcatcattttcatattgaattgaatctgtttttattgatatttctgcacaatatttcttaaagctttctggaagtttatctgaccataaaactgttaagtttggttctgctgatgttcctagatttattaatgtatgaagatatctaaatgaattcttagttacaagcggtttaccatttatacccataccaccaattgattcagttacccaagttggatctcccccgaataattcattgtattctggagttcttaagtgtctaaccaatcttaactttatgattaattgatcaactatttcctgggcttctttttctgtaattaatccggcttctaaatccctttcaatgtatatatctaagaaagttgaagttcttccaaaggatgttgcagctccattgttttccttaattcctgctaagtaaccaaagtataaatgttgtgctgcttctcttgcatttgatgctggtttagatatatcaattccatactttactgccattgattttacttcgcctaaagctctgatctgcattgagacttcttctcttcttcttactaattcatcaagcatatcaccatttagattatcaagatcctttttcttttcttctattaagtaatctataccataaagagctactcttctataatcacctattattcttcctctaccgtatgcatctggtaggcctgttaataatccagcacttctcgctgctcttatttcttttgtatacgcatcaaatacaccttcgttgtgagtctttctgtattttgaaaaattcttattaatttctggatcaagttcatatccatattcctttaatgaactttgaaccattctcattccaccaaatggatttactattctcttaagtggtgcatctgtttgaagcccaactataacttcgttatctctatctatatacccaggatcataattatctatccctgatactatatctgtagcaacatcaattattcccttttttacttcctcaactattaaggcataagctttgtcccagactttgcttgtcctttctgttttctcttctaagaaacttccatcaccctcgtataatttataatttttttgtataaagtttcttacatcaataccctcttgccatgttccgtttttgaatccttcccattgtttaaacataatttttcctccctaagataaatttagttttataattttttccatataaaaaagccgacgcaatccaggctttttttgcccagacggtcggctttttgtggcatataatatgcctagtcatacttcatgtggtaactccacttccgtcagtcatatgactaatatctaatataagaataataccaaaccatttagtttgtcaataagaataattttacacttattagtattaggcataatgaagaaataacgaacccatcttatttgccataagaataatctccaaatatctctttctggtattttttaattaattctttatccatagcttttacattttcaagaggatatttaatccctagtccttcatacttatttgtacctaataaatgatatggaagtaattctactttctcaacattaggtatctcgtcgatgtattttttaagttcctttaaatgttctacatcatctgttaatcccggaaccacaacatgccttatccacatctttgtattatttctcttcattgcttctaagaatttcaaggattcatctatattcattaaagttatatttttgtatccttctggtgtaaaatgttttatatcaaataaaactaaatctgtatattttaatatttcatcataatcaccaaatccataacctgctgtatcaatacaagtattaattcctttacttttgcatagtttaagagtttctagtagaaattctggctgccttaaaggctctccacctgagaatgtgactcctcctccactacttgcaaaataagttttaaatctttcaatcttattaactagctgttctggagtatattcctctccaccattagtagcccaagtatcaggattatgacaatacttacatcttaacgcacaaccttgcaaaaacactactactctaattcctggtccgtccacaagacccatgctctctattgaatgaacattaccttttaccatttgttacaccccctatactttattatacttcaaattaatatacataagttctaaataatataattcatcctctataaaattatttggggacattatctagtattttaagagaacgcttattgaattaacacttttagaatatatattaatttattattcccttaaataagctattaatatttaagcgaattgtatatggtacactatatcattacttaatattatctaactctattgtttcttcatcataaggcaaaagaagggaaagttcaccttccccttcctccaaaatttttttattttatagtaatccttaaataatatacattattctacttctcattagatgctctcatggaatgttctacttataacttctaattgttgttcttttgataatctactgaagttaacagcataccctgaaactctgattgtaagtgttgggtatttatcgggattttccatagcatctatcaatgtttgtctattaagaacattaacatttaagtgatgagccccttgagtgaaatatccatctaatattgcaactaggttagttatcttttgatcttcattttttccaagtgcatctggaactattgagaatgtattagatacaccatcttggcaaatttcattatatggtattttagctactgagttaagtgatgctaatgctccattaatatctcttccatgcattggatttgctcctggtgctaaaggttcacctttctttcttccatccggagttgtccctgtcttcttaccatacattacatttgatgtgattgttagcgctgataatgtatgttttgcatctctgtatagtggatgtttcttaagctctccagagaatttagttactaattctacgcctagatcatctgctctgtcatcatcatttccgtatttagggaaatctccttcaacttcaaaatctacagttataccttcttcatttctaattggtttaacttttgcatattttatagctgataatgaatctattgctactgatagacctgcaataccaaatgccattaatctttctactgctgtatcatgaagagccatttgacttgcttcataagcgtatttatcatgcataaagtggattatgttcattgtatctacataaacttttgctacatactctaatactttgaagtaatttgcttttactttatcaaaattaagaatttcttcgtctgtaagcttttcaattcctggcactaccttaataccttttaattcatctactccaccatttatggcatataaaagtgatttagctatatttgctctagctccaaagaattgcatttgtttaccaaccttcatagctgatacgcagcaagctattgcataatcatcaccataaatcggtctcataacttcatcattttcatattgaatagagtctgtttttattgagatttctgcacaatatttcttaaagctttctggaagcttatctgaccataaaactgttaagtttggctctgctgatgttccaagattaattaaggtatgaagatatctaaatgaattcttagttacaagcggcttgccattaatacctacaccaccaattgattcagttacccaagttgggtcccctccgaataattcattatattctggagttcttaagtgtctaactaatcttaactttataattagttggtcaacaatttcttgagcttctttttctgtaattaatcctgcttctaaatctctttcaatataaatatctaagaaggttgaagttcttccaaatgatgttgcagctccattgttttccttaattcctgctaaatatccaaagtataaatgttgtgctgcttctcttgcatttgatgccggcttagatatatcaattccatattttgctgccattgattttacttcgcctaaagctctgatctgcattgaaacttcttctctttttcttactaactcatcaagcatatcaccatttagattatcaagatcccttttcttttcttctattaggtaatctataccgtaaagagctactcttctataatcacctattattcttcctctaccgtatgcatctggtaggcctgttaataatcccgcacttcttgctgctcttatttcttttgtatacgcatcaaatacaccttcgttgtgagtctttctgtacttaggaaaatattcttcgatatttttatctaactcatatccatattcttttaaagagctttgaaccattctcattccaccaaatggatttactattctcttaagtggtgcatctgtttgaagtccaactataacttcgttatctttatctatatatccaggttcatagttatctattcctgatactctatcagtcgctacatctataattccttttttaacttcttctactattaattcataagctctcgcccatactttgcttgttttttcagttttatcttctaggaaagttgaatctccttcatataacttataatttttttgtataaagtttcttacgtcaatactctcttgccatgttccgtttttaaatccatcccattgtttaaacattagttttcctcctttatacttttgattaaaaactttgttaatttttaatcaattaattcataccattattgtatactttaattaaatgcatgtcaatgatatcttttatcaattagtaattagtttcactttttgttaataaatccatcagactttcataagataatatttctataagttcgcgaaataaattttcctcttaacttgtcacttattgctaattaagatattatctttaatttataaaaaatattattaataaatagatcaagttatttatctctagattactaactgcaaatattataacctttaccatttcttaaatttataatatttttctttcagtgtataaatcaatttatattgacatattagtattatcagaaaacgttttaaacataatgttatttacatttataatttttaaatattcttcaatcttttaaaatgcatttttgaatttcatattttagattcataagcttataaaattataccaaaaagttttctttgtcaactttttttagaatttataacataaatttaacatttgtacaaaataattgacacaaaataatgatataattttgttacaatattgtttatacataattcaaaggggagaaaacatatgcaaaggaatgctaaactatctttattttcttttttagcaatagctctatctgtctttatattatatcaagttctttcttattttaatttttttagaaagaatctaactattattaataaaacattatactcaagtatgctaccagaggaaaaatttaaaagtacatatacacccaaaatcaaattttcggacaagcctgtaacaaaagtaaatgatgtaaccctaaatattttgaatacaggaaatctaactaatgttccaatactgctaaaagcccaaaggtattatatacctctaacttttatttgcagtaaactcaattatactttagatacttctaataattccatatcaatatataatgatagtaataaaattttcttaaatgaaaccacttatgaaaagaattctagaaaaggtaatcttcgtggtaatttacttaacaataatggtagctattatatttcaatttcagatatagaagaaatttttgatttatttgctgtatttgactttcagaacaaaaaaataaacctaatacctaacgatgtaaaggaaccagaagattcagctatactatatagcgataaaattggtttaatacgttttgaagattttggttgcggttatacaaatgttgtagataaaaatcaaacaaaaataaagataatggctaatttgctattttcccaaggactgaaatttcatatttcatggatacctagatttgtagttccttcagcaaattttgataatgatttgttgacgaatgataacattgtaaatgtaggatttgtagatgtattagattatgctcttaataaaggtggagaaataggtttacacggatatactcatcaatctggtaatgactcaagcggaactggtgaagaaatgtctaaagacgtaaatagtacagaagctgagactagagcagtaatagaaaaaggtatagatactgcaagtgctctgaacattcctatctcgtattacgaaagtcctcattacagagatactgagcaacaaaagaaaataattagtgaatattttcagttcatatacgagccatatgattatacaaaaagtaacatttataagccagatgactctcacttatttgttccaactccattaggccgtatagctgatccatcaacagatacgactcgtatggtaaatacgattaatgaaggagatgctgatacgcttaatagcttttattatcatccatctatagaaatagattatataaactttaacctaaatggaaacaaacttaacgtgaattatgatgcacgttcacctttgcaacaaatagtaaaagcatttaaagataatgattatactaccgttcatattgatgaacttataaacaagtaataaggaaggcttgccattcacatgacaagcctttatttttcaaatattttcgtaacatcacttaatattgcaaaatcagtaaaatcaaaatgaagcggtgttaatgtaacatatccttgatatagataatataaatcactttcttcttcctttatagcatttcttgttccttttgttgtatacaagtcaccttcttcattactttctaaaagtatatattctgttttatatgtggaccttccaatcttacagactttgatgccctttatatctctttcattaaaatttggaatgttaagatttaataccacatcactttttaaatattcttcctttgctatatctaaaacttttatcgcccatttaacagccttagaataatcctcatcatctttcccatattcaacatccattgaaactgcaattgacggaattccgtatatggttccttctattgctgccgataccgtacctgagtataaaatatcagtccctacattaggtcctttatttatgccagatattacaagctctatattctctttcaaaaaggataacccaacttgagtacaatcagcaggcgttcctgaaacactataagccttacaatctaagccttcaatgaattcttctttaattttaatcggactatgaatagatattgaatgactagacgcacttttttgatccttgggcgcaacaattgtaaccttatgctccttagaaatttcctttgctaaagcaattattcctggtgcatttattccatcgtcgttagtaattaaaatattcataaaccctccttgtaaatgtatttgatcacaacttaatgtaacgcaatgaataaccgaaatataaaaacacttgcagtcttatgaacatttaaatttcctgctaaacaaccgaaatggaatatatgtgtttgctccggttctctgaagattttactgggtaattcaaacaatataagttgcacccaaagtgcttgcttcaaaggctacgctttgaactagcacatttggaacaacttatattctaagaattacttccagcaaaatcttcttatgaacactcctcaaaaacatatatttcatttctttgtttatcttaaatttaaagtaaagcatatttaggcaagtatttttatatttctgttgttacaatacctttattttaactatattgtaactttttataaaatatatattctctttttctatattaagtgttactaaaagaactaaagtgataataaaacaaagaaagagaatacatatatgcggaacaggcattgaaaaataagctgctgcatatattaacgggaagttgttccaagtctgcttgtcatgggcttgtcgcaggagcatgcagacttgggtgcaacttcgcgtttagatatgctaagcgaaatttttcacagtcctgagaaacatatatgtattctctttcggttgttcattgcttcacgttgagttgttcttaatacttttattttgcaccatattgtttgtaatattcgtcaattctacctttaacttcgtctgttataagtatagttccgttaatctctttattgtataaatattctataacttccgccattgtaactatggcacaagttttaaatccgaatttttctctgatttcagttaaggctgattgttcaccttgccctctttccattctatctaccgatattataagacctttaacattaacatctgcttggctttttaagataggcatagtttcgtaaattgatgttcctgctgttgtaacatcttcaactattagtactttatctccatcatttagtttacttcctaaaagaattcctgtatctccatgatcttttacttcttttctatttgaacaatatcttacatcaatatcaaatgagctagacaaagcaatagatgttgtaacgcttagaggaattcctttgtatgcaggcccaaataatacatcataatcatctgcaaagttttcttttattgcctctgcataaaattctccaagtcttcttaactggcttcctgtttgatagttacctgtattaacaaagaacggagtctttcttccactcttagtaacaaaatctccaaatgtaagtactccacattctatcataaaattgataaattctttcttatatgccttcatttaaaattcctccaatatctactttgtaattattaatattcacttatcagttgcttattttcattattaggaattaggatctatgatcaatttatattattcctataatctcgttaatatccttaattccttgttccttcaagaaactttccatttcttcaactatttctttcccagccataggatttacaaaattaatcgttcctatctgtactgcgctagctcctgccatcataaattctacggcatctttaccacttgatattcctccaagtcctattactggaatatctacagccttagccacttcataaaccattctaagagcaattggttttacagccggccctgaaagacctgcagttatattattaaataccggccttcttttatatacatctatagccatcccttttaaggtatttattaatgatatagagtccgctcctgcttcctggcactttacagccatatctactatatcttctgcattaggagataatttaaccatcaacggcttcttagtcatggctttaatttctctaaccacatcatatgctacttttgacttaatcccaaaagccataccaccatgttttacatttgggcaagaaatattaagttcaatcatgtcaacattactgctatcaattttacttacagcagcttcatagtcttccaagcatcctcccccaatatttgctataacattagttccgtactttctcattttcgcaagctcattttctataaatgcatctattcctggattttgtaatcctactgaattcatcattcctgatggtgtttcatatactcttatcccttcattaccttgcttggggtttattgtaagcccttttgaagatattccgccaagaattccaacatcataaaaattattaaattcctcaccaaaaccaaaggttcccgatgctgctattacaggatttttaaattctacattattaatagttactttcatcatattcttcttctcctttggttattataattcaacatagtatccatcaaatattggaccatctttacacgttctcttatgtccatcttttgttttacaagtacatactaaacatgcacccactccacatgccatatgcttttccatagatacatatacagcaacattcttttctttacacatatctacaacttttttcatcataatttctggtccgcagcataacactgtatcgtaatcttctggttttaaaatttcagtaacaaatcctttatgaccattctttccagtgtttgtagatatataaacttcatttacatattcttttaactcatctattaagtaaacatcatgtctgaatcctgcatagagatctatcttttgatctggatttttctttcttaatttctttgctagttcaagcattggtgctgttccaattccccctgaaactagtgctaccttgttatattctttctctaaatcaaacccatttccaagaggccctgttaagcttatttcatcatcttctttaagcttagtaaattctttagttccgtttcctactacagcatataaaaatgttagtttattcttagatttttcgcatatacttattggccttggcagaaatgttgcaccatttagctttaacatataaaattgtcctgcctttatttctgcatcatcttcaactactaatttatatatatcttttgagatctctttatttgaaactacttttgcatttctgtaagttatagccataaccctgcctccttaagttatctttaatgtaaaatttatatgttcttcactgcttctcttattgcatctctcatctttatggcttcttctctagcacataaagcaaactctttttctctattttcttttttgtaagcaaggagtattcctcttgaagaatttacaaccccaccatttccattgtttaaatatagtgcaacatcttcagctttcccgccttgtgcaccatatccaggtattaagaaaaacatattgctatagtttgatcttattttctttccttcttcaacatgagtacatcctataacaccgccaattgctgtatatccacaacttccagtataattttttcccatttcagtaattttatctgctacaacttcgtaaactttcttatctccagtagtatctagatactcaatatcttctgcacctggatttgaagttctaactaagctaaacacacctttacttcccttttctaaataaggtagatatggttcaatactatccattcccatatatggactaagtgttataaaatcagcttcaaaatccccatcaaaatgagcctttgcatacatggttgctgtagctgctatatctcctcttttaatatccgctatgataatttcacctttatctcttaaatagtctagagttttcttgtaagcaattaatccttcaagtcctaaagcttcatagtaagcaatctgcaccttaaagcatgctgatacatcccaagtcgcatctattatttgtttattgaattcaaagatagcttcactgtcagttctaccttcttttatatgatctggaatatagcttaatgcagtatccaaccctacacaaactactcctctttcttcaaccctattgtataatttatcaattatgtaatttgtcatttcagatctccctccaaccctatttagtccacagtcagaattcacaattaattcctttaggaactcatatcttataattttcttaattatgttctccattttctacttatgatattatttaagccactcttattttacacttgtccgcttcctaatttataatcatagttgcgcctaaaaattctctatctagctatacgcttttttgatatgaaatgttcttaattcacccaaaaattctttattacgattctctcatatttcatatgtgtgtgcttttttaatacgaaatgttctcttttgtgctgcactctttttctaatgtgaactgttcttaattgcgcttcgcgctttttctaacgtgaaatgttttttgtcgcgcttcgcgcctttttctaatgtgaaatgttccctattgcgcttcgcgcacatttcatatgtgtatacttaatttctccaccctttattgtcataagaatttcaccgtagaattccatacctgtaaatggcgtattccgtccctttgatgcaaattcttctggattcacttttaggcatttattaatatcaactaaaactaaatccccttcgactccgatgctaatttttcctttattcattcctaggagctttgcaggattatatgacataagctcacttaatttatttagtgaaacattgttctctttcactaatttcgtataacatattgaaaatgcggtctctattccaaccattccaggcgaacctttcatcttctcatccgctgtatgtggagcatgatccgttcctattgtatcaaccatacccaattttatggcatttattattgcctctacatcctctttttctctaattggaggatttactctataatcatttatatctcttgttagaccaatatgatgaggagtaacctctagtgttatatttgcgccactcacttttccatcaattatacattttatagcttcctttgtgctgacatggcacatgtgtaatctagctttacttagtttagctaattctacatctcttattgtcatcatattctcagctatcctcatatctactttggagaattcaggactttcagcatgagacattataacccagttattcttcttcgcaatttccatggcttcaagcattgtattggagtttgatatcccaactccatcatctgaaattgctttaatttccttatcacctaaaagctcttctaaatgagttaatgtcactccatcaaaatcctttgttactgataaacattgatgaatatctattaaattaatttctttagatttatttcttacgtattctagaaccttttttgatgaacatatagggtttgtatttgccataagacaaactcctgtgtaaccaccttttagcgctgctctagatcctgtttcaatatcttctttccatgtaagacctggatctctaaaatgtgcatgtgtatctataaatgatggcattaaaatctttccttcacactcaatagtttctacatctatcttaaagatcttttgccctatttcttcaattattccgtccttaatatagatgtcgcctataaaatcttgggttacatctactatcctcgcgtttttaattaacagttccatataacacctcttaattcttctaaatttctgaaagctttgttatctcatcgcaatattcacatctatatcttccattctctttatctactaaaataaaagaatgaggtacatattcttcctggctagttatgcagcttggattcttacacttaattatattttccactttatcaggtagcgttggcgtaactttatttattatcatttcatctttcacttcacaaattgttattgtaggtgagagtaatcctaaaacagtatagtcaagttcaaagcagttttctatcttaattatatctttctttccaagcttcttactatccgcattaattatcaaagcaacactgcaatcattagtgtctagttttaagtacttaaatatcttaactcccactcctgcttggatatggtcaattactattccattcttaatacttgttatttcaagcatcttacatcacccccaaaagcttaatcattaacgccattcttacatacattccgtattcagcttgcttaaagtatgaagctcttctatcttcatctacctcataagcaatttcatttactcttggcagcgggtgcattactatcatatcgtctttagccagatccattttcgctctgtctaatatataactatctcttaatcttaaatactcttcttcattaaagaatctttccttttgaactcttgtcatatataagatatcaagactttcaattacatcttctaatttttctacctctatatattcaatgtgatttttcgctaaaacttcttctcttatatattgtggtatagcaagttcttttggagatattaatacaaacttattattttggtatctggacattgcttttattaacgaatgtacagttcttccaaattttaaatcaccacaaattccgattctatgattgtttaacccattttttaagcttgtaatcgtaagtaaatctgctagggtttgagttggatgttgatgtccaccatcaccagcattaattattggaacgttagaatagatacttgcaacttttgctgcaccttcttttggatgtctcattgttattatatctgaatatattgataccattttaattgtatcagctaaagtttctcctttagaaattgatgttgaattcggctctgaaaatccgagaattttaccaccaagtctcatcattgcagcttcaaagctcaatcttgttctcgtacttggttcataaaataatgtagctaaaattttcccgtcacaaatatgagaaaattcctttggatgtgcgattatttgatgtgctaaattgaatatttcatctaattcctctaccgtaaaatccataggctctattagatgtttaatatcttttatcattttattatcactccttcttaacctctctgtgttaatttaaagggaaaaattatataatactatataataaaaaaccttccttaaaataaaggaaggcataataatcctagatcattggtattatataacttccttattgatctctctgaatcaaattaaaggttattctttgtgtaagaataccatttctttgaggttgtgtcaataaaaattattttatataaatttcagataaattagtttaaattttaattaggttataaaaataactcctagttttctaggagttattaattatgtctctaaaagttgttcattatgttatcccacatcatttttccacatttagcaagggtaactgttccgtaaacactattaggaattcccattgaaagaacagtaaatgtaaaagatccttttggtgagtggatcaaagctgtatcgttttcaacgctagccttatcgcctgtcttgcttgatatttcatattttaaatcatcaggtatataaagtgctaatttgtttttcatttgttgtctttgtaatatatccataagcattttgctatttttctcatctaaaaagcttgaattatataagtgtttccatatctttgatagatctaaagcgcttgttatattttcaattccattacttacagctctttcatctgaagtttttctatttaatttagtatttttcaatccttgtgcttctatatcgtcatttatcttatctataccaactatatctatgagcttatttgctgccgtattatcactttgtataagcattgcaactaacaattcaaatatagtatattctctattatcaaattcatggagtattcctgttccataaactttatcttcttcttcaatttttattttatctaaaaatgtactgttcccttcttgaacatgctttattatagatactgctatcggcaatttcatacaccctgcacttgtcatttgaacattttcattgtatccataactaaaaccactttctaaatcctcaaagaaaaatgaatatgttcctattctagactctaaatatctttttatttctttcataatacccaccgctttctaaaaatactactaaatgtcattaggtatcttatgagtactaaatcactagtataatttggtactcatattaagttaactaatcggcaaatgatatccctattctcttagctacagctactaactctccatcttgatctactttcttgttattaccaatgacattttctaaactatcataagtaatttcattaccttttaagcataccatgcttccgaacttacctttattgataagctctattgcttcaacaccatatcttgttgataatattctatcatatgttgatgtagttccacctctttgaatatgaccaagaactgtacatctaacttctctatccttaactaacttttccaaatcttcagctatcttatttccaataccaccaagtctaattggatctggactatcttcaactatcttagatactataacatcgccgttcttaggttttgcaccttctgctacaacaattatagtgaataactttccatgtttttttctatcttcaattttttctacaactttatttatatcatatggaatttcaggtagtagtataacatctgctgaaccagctattcctgattccaatgctataaaacctgcattccttcccataacttctagaatcataattctatgatgagattctgcagttgtatgcagtctatctaatgcttccgttgctatacctatagctgtattaaagccaaacgttacatcagttgaccctaaatcattatctatagtctttggaacgccaataacatttactccttttcttgaaaaatctctagctgatgttaatgttccatctccaccaattacaactaaaacgtctacaccctctttttttaaattctcaactgctacatcggatacatctttttttactatttgaccattttcttctactgagtaatcaaacaaattatctttatttgaactataaagaattgttcctcctcttgatataaggcctgatacagctcctaaatctaatgaaataaaatcattgttatataatcctctgtaaccgaatttatatccaataacttcatatccataatttaaaattgctgatttcgttactgcacttattactgcatttaagcctgggcaatctcctcctccagttaatagagctatctttttaatatctttggacatcttctaatccccctataccataatcttcattggaaattattgttccgattaaattatcattattttctgactatttacttaataatatcacaaactttaatttatgaaaagtattaatttacaatatattcattctttaaataagaattgaaatttttaattttaatatttagtcgtttctcttaaattttcattattattcctaggaattttgatcctaaattattataaagaaagactattttgaattttacctacattaattactatacccaaacttacattaagtattatattttataaattaatatttagaagtgttatttctatttttattaataaattccgtagattattaactattaggttataattaacttcttataataattaatcttaagtgctatcattatttaagtttctttttaacatatatgcttaattgcgtttctgaattttattccccatcaaactcttaacgtattcaaataataaatataaatttactatttgaatacacttatttgttttaattcttttttataaaaaaatcgcagactactgtggatacagagattcttttcacgcatctgccttttcgaatgcatgtgagaaaaatttagcggtcgaataaaaaaagttgaattagcgtgtagctaatccaactctttctttttataatgtgaaatttaaaaaaccaaagaacataagtattccaaatactatacctgcacctattctataaactgcaaatacacgcattggtcttttcttcaaataagaaacaaatttatccataacaacgactgatactacaaatgccacaataaaacctactactaatgaaatccatgaagtcaaattcattcctgaatagtcaaattccataagatcttttgcagatgctcctatcatagctggaatagctaaaaagaatgaaaattcagcagctattggtgttgaaaggcctgcaatccatcctcccataatagtcgatgcactccttgacattcctggccatactgaaagtacttggaatactcctacctttagagcttgcattggagttatactgtctaaactctttgttgcatgtttgttactttttctaaacatgttttcaattattattaatagaatacctccaactataaatcctataacaacagcttcaggattaaataaactttttatctttttataaaataataatcctattatcagcattggtatgcatcctactattacatttataccaaagttaaaacctgttttaccttcttttccttttgtaaatatatatctgaaaaattcaattacgctgttttttatcttcttccaatataaaacaacaacggccaatattgcacctaattgaattacaacctcatacattttaacaaagtcacccttaaaattaatgatgcttgacgccagtatcatatgtccagttgatgacaccggaataaattctgttaatccttcaactattgctattattatagctttgattataaataaaatatccaatcccacttaattttcactctctttcttttttgtttacttatttacttttttaaccatattaatatattttaaacctattaggtcttatttcatattaaaaaattattaat

SEQ ID NO: 17 - DNA, 86611 bp, Clostridium beijerinckii
attttatatagaatagttattgataattatagaaaaaaggaaatgtttgaatttataacggataattattttttcttaaagcaatctgaaatattagaggttgaagatcaaatactaaaggtgttaaagtatgaagaagtagatgcaaatgaggatactatattttgtttaaataaaattaattctatggtagaaaagattagagactgcataagtgaaaaacaagagattaatatagatggatttataacttttaggatgagaaaattaagagaggatatagaaaaagttatagataaagtagtagaaagatatatggtagaaaaagaatataaggaatttataagactattaaagtactttgtagaaatacaggaatgtaaaatagaagaaataaatataatagtagaagataataattatatagtaagagataaggaaggcaaagatttatattacgattttttcagtgaaatcgcaacagatcaaaataaagctgaattaaatatggaagatatattaattagcggactaataacaagtgcacctgaaaatataaatatctatggaaaagaaaaatgtagcaataaagaatttttagatactattcaaaatgtatttggagataaggttcatttttatgaagcaaatagcgactataataaaattggtcaaataatagcaaaaaaatattgacatggattaacaacaatgatatactcatacatgttaagaagaaacagccgtttctcaccctgcagtgttgaatttactagtatgggttttgtgtgatgtctatacattgagtattgataatttgaggcggcagttatgccgtctttttattatgtatatagtttttcggaggtgaaaaatattaataaagatttttctatgaatgaagaaattagagaaaaagagattagactaataggaagtaacggggaaccattagggattgtcccaactattgaagcaaaaaaacttgctgaagaaaaagatatggatttagttatgatgtctcctactgcgaaaccaccagtttgtagaattatggactatggtaagtatgtatatgagcaatctaaaaaagaaaaagatgctaagaaaaagcaaaaaatcatatctattaaagaagtaagatgtagtctaactattgaggaacatgacattgatataaaagcaaaaaatgccagaaagttcctattagaaggagataaagttaaaatcactgtaagatttagaggtagggaaatggaacttgcccacatgggacaaaagattcttgataactttgcagctaaattagaagatgtctgcctagtagaaaaaagacctaaaagagaaggcagaaatatgacaatggttttagggcctaaaaaggcgtaacttgagaggaggatttaatcatgccaaaaatgaaaactcatagaggtgcagcaaaaagattcagaaaaacaggtacaggaaaacttaagagaggtaaggcatttagaagccatatcttaacaaagaagagttcaaaaactaagagacatcttagaaaagctggatatgtttcagattcacaattaaaagtaatgaagaaattattaccatacctataatataggggtaatgcaggaggtttaagtaatggcaagagtaaagagagcgaagaattctcgtaaaaatcataaaaaagttttaaaacttgcaaaaggatactacggtggaaaaagtaagttatataaaactgctaatgaatcagtaataagagcattaagaaattcttatgttggaagaaagaataagaagagagattatagaagtttatggatagctagaattaacgcagctacaagaataaacaacttatcatattctaaattcatgaatggaatcaaattagctggaatagacatcaacagaaagatgttatctgaaatagctataaatgatccaaaggcatttactgaattagtagaagttgctaagaaacaattaaatgcttagtacataaaatgcggcttatgccgcattttatttttatattcaaatataaataataatactattatttttccataatcctatagttttgaggtgtaaaactttgatatatatagaaagtaaagaaaataatttgtttaagaatacaaaaaagcttaaagaaagaaaaaataggactaaaacaagtagatatataattgaaggatttagattagttcaagaggcatttaaggccaaagtcgatgtagattacctaattgtgactgaagatgcacatgataaagtagacgaatttttgggcaaatatataaatgatgaaattaagatttatgaaatttccagcaatttatttaaagaacttatttctacagaaaatccccaaggaatacttgctgttataaaaatgaatacaatggaattgaaattcgatggagatttttacttgctttgtgacaaggtgcaagatccagggaatctagggactataataagaactgcacatgcagctggagtacaagaaattatattaacaaagggtactgtggatatatataatgaaaagacaattagatctacaatgggatctatattttatattcctatttattatgatgatgagaatctctctttggtaaaagaattaaaggggaaaggttttaatttagtagtgacatccttagatacagataaaaatttctttcaagcagatttaagagggagagttctcttaactgttgggaatgaaggaaatggagtaagtaaagaagtgttagagatggcggatactaaggttaagataccaatgccaggcaatgctgaatctttaaatgtagcagtagcttcatctgttataatgtatgagaaagtaagacaaaatcaattgtgattaaatcttattaaaataggaaagtatattaataggtttctaggaaaatttgaaactatttaagaatgaaagtagatttgaatatttctaggaatctatattaatatgaaaaaattttaaaatttatatatttatctatgtaagtatgcgaatcaatatttaaataaatttaatattccgaaaataacaaatatatttatcttaaatgattttaggaattagcaaatttatacagttaagataccagaaacagatatcataaatactgctaatttaccccatacatgagttaacacgccttttaaagagcgaactttagatgcattttgcaattttactttttcatcaatttgattaaaaagtgattctattggttgcctaatgcgacctacagaggtggaatgcaatgattcagctgaatccagttgtttctgaccacgttttttcttgattggtgtacggattaccgttccgttagcgttagctgatatttttacatcagaatcaatatatgctttatcagcatatatattgcggttttcaaagttacttataatctctctaactgcttgtaaatcatgctctgatgcaggagttaatagtgcatattctggataaggtgttgttttaggtcttacatgtgcaataacatgtaacttacatccataataatgaaagtctttagttgcacaataacctttattgcatattaaacctgctactttccctttatatgagcgtttatcttttgctaacgctatcggaaaagaatctatgatgctttcagtagagatagaaaacttattttcaaataatgctgttaatgtagaagtaatttctctaaatgcctcatgtaagttattgagtcttttattaaaagcttgatagctcggtatatcaggaaaatactctattaagtgatttatagcatatttgtaaacatcctttttagtaaattgtttttgcattgtagcccataaatatattgttattatctcctcatctgtgaatttgggtaaacaattattactaaaacgttgcacagaatacgctattctgctatcataaatagcagaaacatagcaatataattctattagttttaagataaaatggtttttcatgaattttattttacactaattcttgctatgtttcttttgttattttctaacagttgattcgcatgtaaattttaaaatatataaatatttataggaaacatctggtgttcagaggttttatatttaaaatagaataattatgttaagataaaatatttaatttgatttgggaatatacttataaatatggtatattagaaaagcagtggatttatatataaattttgaaaatagtattgatattttatatatttatttgtataatgagttgtattaattgaacattgaaaaactgtgaatgagagagtagatattagaaaagttttaagggagagaaggtcatagactgtaagccttcttaaataatataatattgaagttcgctcaggagttctagctgtgaaatttatagtagtagctagcggcaagaagagtcgttaattaaattgagttgggtacttttttagttccaattagggtggtaacgcggataattcgtccctttttatgaggtggcgtttttttttatgcaaaaaatctttttaattaccaacaaatgattttaaaagaaatatttataggtctattattatttttatatgtcttattgaaaggagaaacaataatgaaagaaaaacttaaagaattacaagaacttgcattaagcaaaattgaagctgttaaaactagcagtgaattagaagaaattagagttaagttcttaggaaaaaaaggggaacttactacaatattaagaggtatggggaatctttctccagaagaaagacctattgtaggaaaattagttaatgaagctaaagctgctgttgaagaaaaattagaaagcgtgttaaaagctattaaagataaagaaaaggctgaaaagcttgcaggtgaaactatagatatttctcttccaggaagaaagaaagttataggaaagaggcatccgttagatttgactcttcaaagtatggaagaaattttcgtttcaatggggttcacaattgaagatggacctgaagttgaatatgatcattataattttgaagctctaaatatacctaaggatcatccggctagaagtgaacaagatactttatatataaatgataatatagtacttagaactcagacttcaccaattcaagttagaactatggaaaatcaaaaaccaccaataaagatgatttcccctggtaaagtatatagatcagattcagtagatgctacacattcacctatattctatcaaatggaaggattagttatagataaaggagttacatttgctgatttaaaaggaacattagaattatttgcaaaaaaaatgtttggagacaaggttcaaactaaattcagaccacatcacttcccatttacagagccatctgctgaaatggatgcaacatgctttgtgtgtggcggtgaaggctgtagagtatgtaaaggcagcggttggatagaacttttaggttgcggaatggttcatccaaatgttcttagaaactgcggacttgatccagaagtatatagtggatttgcttttggttttggtgttgatagaatggtaatgctaaagtatggaatagatgatataagattattatatgaaagtgatatgagattcttaaatcaattctaaaagcttagttttatttgaaattcaagaatttaagaatatacattcttaggaatatttattctgaagaatattaccatatatattctaaagatatgcccatatgaaaaaagcagctatgctgcaattaaaaacttattaacttaaaaaaagcagttatgtttcaattacgaacttatcaccttaaaaaagcagttatgctacaactaagattttttgaatattaaaaatgagggttagtgaagaaattggattaaaatattattctatacccagcaataaaaggaggaaacaaaatgaaagtaccatataattggcttaaagattatgttgatataaatgttagtcctaaggaattaggagataaattaactttaactggttcacaactagaagaacttgttatccaaggagatgtaattcaaaatgtagttacaggaaaaattactaatattgaaaaacatcctgatgcagataagttaagcatatgtcaagttgatataggaagtgaacaaatacaaatagttacagcagcaacgaacatgaaagagcaagatgttgtgccggttgctcttcatggttcaacacttgctgacggaactaaaataaaaaaaggaaaacttagaggagtagtatctaatggtatgttctgctcagaagaagaattaggtacagctggagatgagccagttcatggattgatgatcttacctactgatactaagcttggagttgatattaaggaacttttaggattaaataaagctatcttagattttgaaattacttcaaacagacctgactgcctaagtatggtagggatggcaagagaaacagcagcagctcttagaaaaacttataaaatgccaaatttagaatataaaattaaaaattctaaaaatataaatgaagagttaactgttgaagttaaagatactctttgcaataggtatatggcaagaggcgtgaaaaatgttaaagttcagccatcaccaggctggatgcaagagagacttcttgaagctggtataagaccaataaataatatagttgatataacaaattttgttatgcttgaaactggtgaaccaatgcatgcttttgataaaagagaaattgctacgaataaaatagtaattgaaagagcaaagagaggagaaaagtttacaactttagatgaagtagaaagagaattagatgattcgatgctttgcattaaagatggagaaaatattatcggtcttgctggaataatgggtggtttaaactcagaaataaaagaagatactacagaagttgtttttgaatgtgcaaattttgatggaactaacataagagtaaattcaaagaaattaaatctaagaacagaagcgtctgggagatttgaaaaagatatagatcctaacttagctgaaattgcattaaatagagcatgtagattaatctgtgaattagatgccggagaagttatggaaggtactatagatgtttacaataacaagaaagaagtatcaactgtaactgttgaatcaaattgggtaaacagcttccttggaacagatctttctaaagaagagatgaagagatgtttagatagtgttgatttatttacagaaataaatggtgataacttagttgtgacagctccaacttttagagttgatattgcaattagagaagatatagctgaggaaattgcaagaatttatggatatgaaaaaattcctacaacaatttttaaagtttctacggaaagagagccaagatatagaaaaggattattagataatagagtagtgatgcttgctacaggaagtggattaaatcaatctatcagttattcgtttgtatctccaaaggtttttgataaaattaatttactagaagatagtgaccttagaaatgtagttaagataagaaatccattaggggaagattatagtgtgatgagaacttcaacacttccatcaatgatggaatcacttggaagaaattattctagaaataactcatatgtaagattgtttgaaatggggaaagtttacattccaaatgtggatgaaacaaaacttccaacagaaaagaatattttaactataggtatttatggagattgtgactacttagatcttaaaggtgttgttgaaaatataactgatggattaggtataaagagtgttaaatatgaaagagagagcgaaaatgtaagttaccatcctggaaaaacagctaagatagttgttggcagaactaatgctggaactttaggagaagttcatttagatgtatgcgaaaattacggtttggatgtgccttgttatgtagcagaattagatttggatgttttatatgaaaatgctgatatggataaaaaatataaagcacttccaaaattcccagcagtaacacgagatattgcattacttgttgatgatagtcttttggtccaagaaattgatgatacaataaaaagagctggtggaaatttagttgaaaaagtagaattatttgatatatataaaggaaaacaaattccagatggtaaaaagagtatagcttatgcaatctggtacagagatgaaaataaaacattaacagataaagatgttaataaagttcatgaaaaaatcctaaaatctttagaatataagcttggagctacattaagagattaaaatataataactcaagctttgctccatgaaagctgcttcagaaataagttttattatttttgaagcagctatttttatttatacaaaaaaatataagtttaaagaaggaaatatcatgtttctatagaataagtatagataaagtggttaaaagtggtgttaagtggtttaaaatagagggaaattacctaatcaataaaagtaggagctgagaatattgttcattggggaatatcaacatgcgttagatcctaaaaatagaataattgttccagcaaagctaagagatggacttggtaataaatttgttattaccaaaggacttgatgggtgtttgtatgcttatccgcttgatgaatggagaatattggaggataaattaaaaactttacctttaacaaataaggatgctagatcctttgtgaggttctttttttctggagcttgtgaagtcgagttagacaagcaaggaagaggattgattccacaaaatttaaaggaatatgcaggtatagaaaaggacatagtaagtattggagtattatctagagtagaaatatggagcaaggaaaagtggagcgaatataacgaatcaaatatagactttgattcaattgcagaaaaaatgaatgatttaggaatataaggagtttttattatggaatttaaacatgtatcggtcttattaaatgaatgtatagaggcattaaacataaaggaaaatgggatttatgttgatggtactttaggaggagcaggacactcatctcatatcttaagcaatctttctaaagatgggatgcttattgggatagatcaagaccaagacgctctaaaggcagcaaaagaaaaacttaaagattttgaaaatgtaaagtatgttcatagcaatttttataatattgatagtattttaaacgatctagatattgaaaaggttgatggaatcttgatggatcttggagtttcatcatatcaacttgatgaagcatcaagaggttttagttatatgaaagatgctccgttagatatgagaatgaatagagaaaatgatttttcagcgtacaatattgtaaataattacgatgaggacagcttatataaaataataaaggactatggtgaagaaagatttgctaaaaggattgcgaattttattataaatagaagaattgagaagcctatagaaacaacttttgaacttgtagacattatcaaggctgcaattccagcaaagatgagaagagaagggcctcatccggctaaaagaacttttcaggcaattagaatagaagttaattcagaattaaagatacttaataaaactatagaggatggagtgaatagattaaataagggtggaagaatggctattataactttccattctttggaagatagaatagtgaaattaaagtttagagaattagaaaatccatgtacttgtccaaaagaatttccaatgtgtatatgtggaaaatcgccattagttaaaaatatagctaaaaaaggtattgcaccaactaaagaagagattgaagaaaatccaaggagtagaagcgctaagcttagagtaattgagaaattataattattattatgttataaatgagttgggatgtgaataaattgggaagaagagaatatgattatataaaagggaatacagtattagctccagaaagaaaaacaagagtacgtaaaccggataaaaaatataaacaaatacaaagaagaaaacaaattataagtaaaaatatcctattaaaaaacaggagaaaaaatgataggaaatacttactaactgtggcagttgtcatatttagtttagggtttattactattcacggagataacaaggtttatactatggaaagcaatgcgagaaacttggatactcaaataaaacaaacacaagaagataatgaggcattaaaagtaaaaatattgaaattttcttcattaaataatattcaaaaaaatgctgaaagcaaattggcaatggctattcccaaaaaagaacaaactataaaagttgatttttcacagaattattttgaagatttaaaacctaaaagttccgaaaatactgctaaaagtaagaacatattctctaaattaataagtttaataaaataataagttacttaaaataataaaaaataagtaattatattagaaaattaattggctttatcttggttcttttgggttttatgtaaaagaaagtgtgcatgggggaaataaaagttgaaaaaaaagaattataaagatagggcaaagatgcgccaaaggatgagtatagcagcttttgcgttgacaattgtttttgtaatattaactcttagactttcttatataatgatagttaaaagagctgattatgcagcaagagcagaagaacagtggacaagtgaggtaaaaatagatgccataagaggaaggatattagataggaatggtaaagaattagcggtatctgcgaatgtttatagagtagacttcgatttgaactctataagagcatatttatcaagaggattaaaggatttatcaaaaacagaaatagagcatatgaaaagtgtaggaattccaataccttctggagatgatggattaaaaactgatgatattgcgcctgttattgcaaaggcattagatttagatgtagataaagtaaaagataagcttgaaacaaggcttccaagtggagcaaaggctggatctgctactttaattagaaggatagaaaaagaacaggcagataaggtaaaagatcttaatataagtggagttttagtatcaccagatactaaaagatattatccaaataataatttcttatcacatgtacttggaagtactaatgttgatggtaaagggcttacaggagtagagcttcaatataattcgtatttatcaggaattcctggaatgaagatagcagaacttgataaaaataatagagatttaccttatacaatatctcagtttacagcaccggtaaacggtaaagatgttacacttacaattgatgagaatatacaaaattttgcggaaaaagctgccacacaagcttataatgatacaaaagctaaggcagtctcaattcttgttatggatcctaaaacaggtgaagttttagcaatggtaaacaaacctgattttgatcctaataatccgcgtgatggtgcagataaatttgatggggcaaattcagatgacaaagtacaaaaaatgtggagaaataggcttgtaaatgatacttttgaacctggttcaatatttaaggtagtaacagctattacaggtcttgaagaaaacattgtaaataaggatagtaagttttattgtggaggttcattaaaagttggaggaattactcctaagtgctggagaactcaggggcatggagcagaagtattcccagacataattcaaaattcatgtaatgtaggcttcatggagcttggagcaatgattggaaaagaaaaattatgtgaatatattaataaattcggttttggaaaagcgagtggaattgatttacctggagaagcaaaaggaattgttaaaccagttgataaggtttctgaggcagatcttgctacaatatcttttggtcaaactaatacggttaattcagttcaatatatgactgcgtttaatgctattgctaatggcggaactttgatacaaccacatgtaatgaaagaaatcactcatgaagatgaaaataatgttaatattgtcgatgaagcttttaagcctaagacaacaacagttgcaagtactgaaaagacagcagaacttagaagttatcttgaaagggttattactgggggatctggaacaggaacatttatagaaggttaccatataggcggtaaaacaggtacggctcagaaagttattgatggaagatatcaagaaggtaagtatatatcttcatttgttggaatggcgcctgtggatgatcctaaaattactatgatggtaactattgatgaaccaagtaatggtgcttattatgcggcacaagtagctgtaccgccagcaaaaccattatttactgatatttttaattaccttaataacaaattttctgatgaaaatatgggacaaattactagagatgttattattccagaagttagaggaatgaaagttgatgatgctaaaaaagcgttgaaggatgccaagttagattttaatatagatggtgatggggagtcagtagtaaacttaacaccatatccaggatattcggtaaaagaagggtcaaaaataaatctttatacaagtagcgatggaacaaataataataatgttgtaatgcctgatgttaggggatattcaaaggaagatgctaatacactattgaagaagcttggaatagtgcctgcctttgaaggaagtggagcagtctcagaacaagatatttctcaaggtgaagttataacaaagggaacaactgttaagttgacattaagttcagactataaggattaaaaagtgagaataaattaatactaaaactttaaaacgaaacgggtatgttttgtaaggggtttggtatgaattatacaaatgaaaaaatattagtatgtgagaattctcgcatactaatattttttagtaataatatccgttatatatttacgtattttattagaattgttaaaagcaatactcagctaataggtgaatatctaaattagtgttttattcagaggaaaataaatggaggaacaggtattgaaaaagaaaaaacatgtaagtaaagtaaaaatacgaaagagaacgagaagtgtcgctttttcattaacagctatttttgctatattaataattagactctcttatataatgatggttgatggaaaagactattctgcaagagctgaagaacagtggacaagtgaagtgaaaatagatgctaaaagaggagaagttctggatagaaatggaaatgagctagctgtatctgctaatgtctatagagtggattttgatttaaattcaataaggaattacttgaaaagatctgtaaaatccattccaaataaagagcttaccaatatgaaaagtgtaggaattccgatccctacagaaggaagtggcttaacaaacgatgatattgcacccgtaattgcgaaagtattgaatatggatgtgtcagaaataaaagcggatttagaaaagaagcttccaagtggggcagatgcattttctgtgactgtagcacgaaaaatagaaaaagatatagcggataaagtaaaagaacttaatataaatggaattatagtttcgcaagatactaaaagatatcatcctaataataattttctatcgcatgttttaggaactactgatcctgatggcaaaggattaagtggtgtagaacttcaatataattcatatttgtcaggaattcctggaatgaaggttgcggagcttgataaaaataatgaagatttgccttatacagtttctcaatatacggaacctgtaaatggaaaagatgttactttaactatcgatgaaaatatccaaaacattgttgaaaatatagcacaaaaagcctataaagatgataaagctaaagaagtttcgatattagtaatgaatcctaagactggggaagttctaggaatggtaaataaaccagattttgatcctaataatccatatgatggagcaagtaaatttgatggagcagacctcactgataagatacagaaaatgtggagaaatagattggtaagtgatacgtttgaaccaggatcaatatttaaagtaatcactactatatctggtctagaaaacaatgttgcaaataaagatacacaatttgtggataatggatcaatatctgtaggtggaattgtagtgaaggatgcggaacgagaaaataaacttcaaaatttacttcaaatcattcagaattcatcaaatgtgtgttttgtaaaattaggacaaatgattggtaaagacaaattgtatgaatctattaataagttcggattcggaaaagtaagtggaattgacttaccaggggaggcatctggaattgtgaaaccaatcgataaagtttcagaagcggatcttgcaacaatatcatttggacagactaatacagtaaattctgttcaatatatggctgcatttaatgctattgctaatggaggtactctaattcaacctcacgtaatgaaagaaattactcataatgatgaaaatagtgttaagattgttgatgaaacttttaaacctacgactgctacagtcgcaagtgtagaaaaaacagcagaacttagaagttatcttgaaggtgttgtaactggaggaacagcaactggaacttttatagagggatatcacattgggggtaaaacaggaactgcagaaaaggttgttggtggtaagtatggagaaggcaaatatatatcttcatttgtgggaatggctccagctaatgatcctaaagttacagttatgataactgttgatgagcctagtaacggtgaatactatgcttcacaagtagcagtaccatatgcaaaaatgctgtttacaggtatctttaactatttagatagtgcatcttctaatgagaaaattgttaaggatattattatcccagaagttagaaacatgaaagtttcagatgctgagaaagtattaaaggataaaggcctagattttaatatagatggaaatgaagaaacaatattaagtatgaagccatatccaggttcatcagtaaaggaaggttctaaaataactctttacacaagtggggatgcgacttataataataatgttgtaatgccaaatgttaggggatattcaaaagaggatgcgactactttattaaaaaatcttggaataacagcaacttttgaaggaaatggagttgtttcagtacagaatatttcagaaggtgaagttatacctaaaggaacaactgccgagttgattttaagttcgtattatgaagattaagaataatggtagatatataggaaatttaaattaaaatcgctttttgcggaaaatttaaagtaaattggcgaatgataaaatactagcatgtgggggtgctcgcatgctatatttttttatcatataagttctaattaatggatttcatagttcataagatcattacatacaaaataaatcatattcgttgagattagataataattgtgcatttaattttcttaaacgtaataattattaatataaaaaataaattaaaatattcatataccataagttaattaggaggaattcaatatgaatttgaaaagtattttaaaaggaatagattatgaatcaattcagggtgatattgatattgaagttaacaaaataaactatgatagcagaaaagctggcaatgatgatgtttttgtctgtgtaaaaggatatgcaactgatggccataaatatatagaaaaagctattgaaaacggagcaaaagttatagtaatccaagatgatatagaaataaaggatgagaatattaccattattaaatgcaatgatacaagaaaagcattggcattaatgggagcaaattattatgataatcctagttctaaaatgaagataattggagttactggaactaatgggaaaactactacagcttttatgattaagcatattttagaagaaagtaataaaaaagttggtcttatcggaactattgcaaattttataggtgatgaaaaaattcatactgaaagaacaactccagaatccttagagcttcaagaattattttctgaaatggttgataaaggtgtagagtattgtgttatggaagtgtcttcccattcattagcattagatagagtttatggtattgaatttcaggttggaatatttactaatttgactagagatcatttggattttcacaagacttttgaaaattattataaggcaaagtttaaattgtttgaaagatctagaataaaaattgttaatgttgacgataattacgggagacaagtaattagtgatttaaacaatttaaaatgtgatgatatatattcattctcagtaaaaagcatttcagattttaaagcttttgatgaagaaatgggaagtaaagaaatcaaatttaaactcaacttgaaagaagatgagcaatttgttttaaatataccaggtgaatataatatatataatgcgttaggtgcaatagcagcgtgttttaaattaggtatgcctataaaggatataaaaagcggcattgaaaatgtagtagttttgggaagatgtgaaagagtagcaaaagaatataatttaggttatgaaatcatcatagattatgcacatactccagatggtttagaaaatatattaaagacagctaaggcatttacaaaaggaagattgatatctgtatttggttgtgggggagacagggataaggtaaaaaggcctgaaatgggtaaaatatctacagatattgcagacattacaattgtgacatcagataaccctagaagtgaggaacctctaagtataataaaagatattgaatctggaattgataaggataattattttgtaatagaaaatagaaaagaagcaataaaaaaatctatagatatagctctagataatgacgtaatagttattgcgggtaagggtcatgaaacttaccaagtattgaaagatgaaactatacattttgatgaaagagaaattgtaaaagaaatattagataacatgaacaattagggagcttattcataatgtaacaatgacggatttaagcgatatttaggattgttattttggtgatgaagctaacaggaaaataaggggtggatgaacttggatttaaatttagcggaaataattaaggcagtggatggagaaataatagttaaaaataacgaaggtatttttaataagatttcaactgatactagaaaaattcaggaaaataatttattcattgcattaaaaggagagaattttaatggcaatgattatacaatacaagctatcgaaaaaggggcatctataataataattgatgatgtgaagtttaaaattgaagagttaaaaaataggggaactattattaaagtaaaagatactaaagaagctttaggagatttggctaggttttacagaaagaaaattggagtaaaggtagttgggataacaggatctactggtaagacttcaacaaaagatttagtagctgcatttctaagtggaaaatacaaagtttttaaaactcaaggaaatttcaataacgaaattggattaccacttatgatatttgaactttctaaagattatgatatagctgtccttgaaatgggaatgagtaattttggagagataaacaagttggcgagtattgcacttccggatgttggtgcaataactaatattggagtggctcatatagaatatttgaagactagagaaaatatacttaaagagaagatgtctataacagatttctttgaaaacaaaaactcattaatagtgaactgtgaaaatgatatgctaaaaacaatagttgagtgtgataagtttaatttagagagagtaggttatgattctacttataatctttactctaagaatataaaattaacatctgaaaatacttcgtttgatgtagttactgatgataatgaaaattatagatttactctaaatatggtcggagaacataatgttttaaacgcacttataggaatacaaatagcaagaaattttgggttgacttttgaagagatggaaaaggggttagggaattttaatgctacttctatgagacttgaagttataaataaagataagtttactattataaatgattcttataatgctaatccagattcaatgaaagctgcacttgaagtgctaaaaaattattctggatcaaggaaaatcgcagtacttggaactatgggtgaacttggagattatgcggaagaagcacatatccaagttggtgaatttgcgaaagataaggcagatattttattgactactggtgaatttaaagagtattataagaaaggctttggagagcgtacaatggtgtttgagagtaaacaagaattaatgcagaggttaactgatatgattaaagtaaatgatactattttaattaaagcatctagaagtgcaaaatttgaggaaataaccaaatatctatagaatttaaaataacacgaaggaggtgacttgccttaattaggatcttcaagaaaataattacttagcatgattattttctttcggatattttaggcaacactggatgggggaagcaataaacttattaattaactcaaaaattttagcaccattaattatggggttcttattttcaatagtacttggaccaatatttataccgatattacacaagttgaaatttggtcaaaatataagaaaagaaggacctaaaagtcatcagaaaaaatctggaacaccaacaatgggagggcttatattttttatagctacagctacagctatattaattatggggcaaaaacctatgagtagagaaatgatattactttattcatttttagcttttggatttattggatttttagatgatattttaaaaataattcataaagataatctaggattaagagcagcgcaaaagatgattttgctagtcttattttcagtagctttagcatggtatggatatacaaatgtgggtacagatattttgattccatttataaatcaaaattttagattgaatttaggaatactatacataccatttatagtagtatattatgcagcagtaactaatgctgtaaacttaactgacggaatagatggacttgcaacttcagttacggttatagtgttaactttctttgctatcattggttttagaacacagaatgttgaagtagcagtttttgcaatagcattagctggagcattacttggatttttaaaatttaatgctttccctgcaaagatatttatgggtgatacaggttcgctagctctagggggagttattggaacaatagcattaatgttaaaaatggagttgtttgtgattatagttggaggaatatatttaatcgaaacattgtctgttataattcaagttacatcatttaaattaacaggtaaaagagtatttagaatgtctccgatccatcatcactttgagcaagttgggtggagtgaagtaaaaatagtaacaattttttcaagcattacagcaattttatgtataattggctttgtagcactttaagttaagtagtagatttggaggatttatgtatgaaggtcattgggtccaaaagaaaatcaaaaatgggtgaaatagattatggaatattttatacagtagcattacttttaacaattggtgtggttatggtatattctgcaagttcttattatgctatgtttatgtataaagatagcatgttttttctgaaaaaagaattaatggcaggggttgttggagttatagcgatggcagtagcgatgagtgttgattatcataagataaagaaatatacggctataataatgatagcgactatacctatactattagcagtatttctttttccaggaactaatggagcgcaaagatggattaatttaggtccgttaagctttcaaccatctgagcttgcaaaatatgttgtggtgctctttttagcaagaagccttgaagtgaaaggtgaaggagtaaaagattttaaaactggaatagttccttatttagctacatcaggattttatgcagctattgtattagctgaaaaaaatttaagtatagcttctgttataatgatagttacatttcttgttttgtttgcagcaggtggaagaataaagcatttatttggaattgttgcgccagcattagttgcagcagcagttgcatttacagtattagaaccgtatagaatgaaaaggttaatgagttttacaaatccatggaaagatccaataggagatggatatcaacttatacaatcattttatgcattaggtgctggaggggttacagggcttggtcttggccaatcaaggcaaaaaactttgtatatgccagagccacataatgattttattttctccattatcggcgaggaattggggcttattggatgtatatgtataatattactttttgtaatatttgtttggagaggaataagtgtagcgatgaaagctagagacacatatggtactcttcttgcaataggcataactggagttgtagcagttcaatctttaataaatattgcagttgttacaggatcgatgccagttacaggggttccgctaccgtttattagttatgggggaacttcattagtaataaatatgacggcaataggaatacttttaaacatatcaaggcaaactgaaggaaaagatgaatttaaggaaatataagaaaatacagggcaaagaattagaatacaagtctttgccctgtattttttaggtaattatttaaagtagttttaaattttagatgaaaatatatcgttaaagtggtattattatatatgaaatttatactaaagattataaaataataagtgttagaatatataaggcatagataagaatagggatgggtatggtaaaaacgaataataataaattgatcttgaggtcgcaaagaagaagactaataaggaaaataattatgactattatagtcctatttatagtgggaacaatttttgcaataaaatcgaattttttcattattaaaaaggtttctattttaggtaatccagtaatgagtggagaagatgttaagaatggcacagagaatctaataggacagaatattctatttataaataaacaaaatataataagcaatgctaaaaagaatccatacgtagaaaatgttgaaataagcaagtcgtatcctaaacaagttaatataaagatctcagaaaaagaggggatttattatgttgaaaaagatggatataaatatgttttggataatgatggaaatttacttgaaaaaacagatagcgttgaaaacagaagtttagttaatgttaaaggaatagatttaaaagatgtagcgctaggacaaaagatgatagatgacagtagagtattagattttttagatattttttatcaaattataaagatcaatccgacaaattataaaattgattatgttgatataagtgattttactaacataaaggtatatgttggtgaagtagaaggaagacttggtaatgatgaaaatataccagataaaatgaataaattattacatataattcaaaatcctgatatagggattgttaagggatatgtagatgtaggatttaatggtgcgcctgtatattataaggaagaaaggtaggtaattaatgaagatatctagatcacaattatttatagcaattgtttgtggacttttaggctttttattggcatatcaatttaaggtattatcaaataagaatatagagtcaaaaattagtaattatgataaaaacgatattatttcagaagttgaatctctaaaaaaagaaaaagaagaattagcgtcaacaaattcaaagttatccgatcagttaaaacaaatggaagaaacagcagctaaaaatggtgacatggggcaagatataaaaaatcaacttgatgaggctagaatgcatttaggtatagttgatgttaaagggcagggcattgttcttacaataacacctaaaacatctatttttggttctacgacaaatgatagtagcagagatctaggagaagatgaattggttcatatagttaacttactttggtattcaggagctgaggcaatatctataaatgatattagaataacaccacaaacgggaataaaaactgctggaaatggaatagccataggttcgactgggaaagtttatcctagagataaaattataattaaggcaattggagacaagggcagacttaacgttggaatttctttcccaggttcattagaatatcttgctcttcctaactacaataatgaagttaaatcagaagatgatatatttataggaaaatcaaaacagtcattgaagagtgactttattaaatcagttaaagaataggagagagttaatttgatagcaattataggactactaatcggaataatacttggatttgtattagatgttaatatatctgataaattgtcaccatacatgtctgttgcaatactagcatgtttggattcagtttttggagcagtcagaggaaatctctctaaaaactttcaagcagatatattcatatctggattttttggaaatgcattacttgcagcaggacttgcttatttaggtgataagcttggaatacctatatatatggcggcggtaatagttttcggaggaagaatatttgataacttcgcaataatacgcagactattattagaagaatttaaaataagaagaagaaataggtctagaaataattctatagataaagaaaatcatgatgataaatagagaggtgatgtgatgaaaaataataaaggttttttctttgttttcattgcaaccataatattaggggttttaatatcaatgaattttaattttaaaggtattcagtcctatagtcaattaaatgcaacagagtaccaaaatgctgttgaagaaagggcagcattatatagagacattggaaatcttcaagaagataataatgagaaaaaagataagattaggaattatgctcagaatgataaaaaaaatgataagatccttgatgatatgaaaactcaaattagtgattataaatcatttattgggtcaaataacgtagagggaccaggaattatacttaagataaatgatggaactacaaatgctcttgaagaaaatacagatgaaataaataataagcttttacatgataatgatatggcgcttgttttaaatgaacttagagtggctggagctgaggcgattagtgttaataaccatagaatacttccatggtctggagtaatttgtaattgggcatttttagggtttgatgatggtggaatggagtatgctccttttaatatatatgccataggagatccagaaaaattgaaggcggctttacttgaagatggaagccatgttaaacaattaatgcttagaaaactttatgttgatattaaagttgtagataaaataattatgccgccaacgacagcaaattcaaatgtaaaatatatgagtagagatgaaagtaaaaaatgaaattaattgatatttaggaaggaaattttaagtttatatagaatattatacaaagtgataaagaaaggaataatttagtaaggtgttatagtatgggaattaagcaaaatattgaagaactaagatccaaacttccagaacaagtaacgctcttagctgtttcaaaaacgaagccattagaggctctagaagatgcgtatatggcaggaatgagagattttggggaaaataaagttcaagaattagtaaaaaaatccgaaaattttcatgaggatgtacgatggcattttataggacagcttcaaagtaataaagttaagtatttagtagataaggtacatttgatacattctttatctagtattagtttgctaaatgaaattgaaaagcagtttagtaaagttaacaaggttgctaatactttaatccaaattaatattggaagagaggaaagcaaaagtggaattttggaagaagatttatatgaattcatagaagcaattgaaaaatgcaaatttgtttctgtaaaaggtataatggttattattccaataggggatgaagaaagcaatagaaaatattttaagaaaacaaaaaaaatatttgatgagcttaaggaaaaaaattataataatattagtatgaaaatattatcaatggggatgactcatgattttatgacagctatagaagaaggttctaacttagtaagaataggaacaggaatatttggagaaagaaattataatttaggaggcgaaaataatgggtaatgttatatcaaaagttaaatctttattagggtttgaggactacgaggagtatgacgagtacgaagaagaacaatacgaagaacaggtgaaggatgaagacgaaatagaacctgttattaccaataagaagaatagtaaggttgtaaatatccatacatcttcgactacaaaggtaacaataactaagccaatcgattatgaagaggctactgaaatttgtgaagcacttaagaatagaagaatagtattagtaaacacaacggttttggaactaaagattgcacaaagattattagatttcatcagtggttcatgttatgctttaggcggagaattacaacaaattgaaaagggagtatatattctttcaccatcaaatgtagaagtaacaaatgaattaaaaaatgaactaagttcaaaagctctatttaattggtcaaaataggaggtataaattatgatatatagtgtttacatagttattgatatgtttctaaacatattagagctagctatattcatagaatgtatagtttcgtggataccacaaattcaggggaataaatttattgatttactacacagttttgttagtcccgttttagaaccaattagaaagttacaatatagattaagtcctggattaccattggatttttcacctatatttgcattgattattataaattttttacaaaggattataccataaattatgaaagaaagaatagcaaagtattttgcagatgatgatagaaatgatgcattgaatttatatgagaaatatttactagctagagataaaaacataactgtatttggaaaaagtttttatacaccaaatatatggatgtggtttgagaaaaacctctctagcaatgatttaaaaattgaaagtaatggacttttagatgattctgaaagaagaatggtttcttttaataacatatataaaagtccatttcctatgaaattgattaaaattgaaagtacctcgaaattttctaatcttactcatagagattttttgggcggaattctatctctaggaatagaaagaaataagataggtgatttattagtagataataatacatgttatgtgccagttcacgaagaagtagaagatttcattatatataatttaaacagaatttctaaggttatttgtaatgtaaaagtggtggatgattttggatttttaccaaaggttaattttgaagaagaagtagttttagtttcttctttgagaattgatggaattgtctctaagattataaatatatctagatctaaagctcaagcaatgatcgagcagggtcgagtgcttatagattacgttaagataaaagataaaagttatgaactaaaaggacaagaaagaattactataagaggttttggaaaatttatagttggtaattctgttggaaatagcaaaagtggaaggataaaaattattatcaaaaaatatacataatagaggtgaaagtatgaagttgacaccaatggatataaacaacaaggaatttaaaaagggattaagaggatataattctgatgaagttgatgaatttttggatgaagtagtagataactatgaagagctttataaagaaaatgcaaatctaaaagagaagcttgctaatttgaatgaaaaggtagagcattactctaaaatcgaaagtactatacaaaatacattgatattagctcaaaatgctgcagagcaagcaaaaaattcggctaaaaaagaagccgaatttatgatgaaaaatgctaacgaaactgctcagaaggttatggataaggcacataatgatgttattcaaataaatgatgaatatgaaagagttaaacaagaatttattaaatttagagcaaaatatagaaacttcatgaatgcacagttagaaacatttgatgatttagagaaggattttataaaaaattataatgtatctgatcctatagaagatgatgaagtaactaatatagaaaaaatagttgaaaaagaagttgcaagcactacgagtggattaagtgaaaatatagaggctgaagaaaatgatccttcattgaatgatgaattaaatgagattaaaagtttttttgttcaaggtgaataaatttactatccaacagaaataatgaataaaaattatgcatattttatttacataacgtaataaaatgaagattatgtattttttgaataatagaaaagctatcctgaagcgattaaggatagcttttctatatttgcttaattacagataaccaaactaagacctgaacttatgcatataactcgccgaaatgagtaaaatacgtttattccagtttctgggcaattctaaggctataaagttgcacccaaagtgctagcctcaaagaacaggcttttaactagcagatttggaacaacttatagccaaagaatcacatccatcaaaattactaatgaaacattccatattatgacccttgtggttacaaaagtattttactcatttctggttggaatatatttcatagtctaagtagagtttgtgattgtgttatctataatattattcctttgggatttcagaattattaaatttagtatttaatattactatatcaactcttctgtttgcagctctgccatcttcggtattgttatctttaacaggtctatactctccatagcctactgaagataacctctcgggtttaacgtttccctttgaaattagaaactctactacatttgcggctcttacagctgaaagctgccagttagaatgaaaataatcattattaatagcaacattatcagtatgtccttcaacatgtatatagttatcaatatcgtttaaaatctttgaaatagatattagtttaccttgccaatcaggtttgatagtagattgtccactattaaagaatacgctatcattgaagcttattatgagtcctctttcttgaatggatgtagtaacacttccttttagctcggaatcattgacaagatcatctactttcttttttacatcggatagtttttcttcttctgctatagagtctgaattgttctgagtattttgttgatcaattacagtaggaggagaatttgagctatcagatactgctattacgttttctccattaccactattaaatccaattttcaatgaatttgctagagcttgagattttttagtatccacattagaaatagcatacatcattaaaaagaaaatcatcattaatgttataaaatcaaggtaagataacatccatctctcagtatcatctttttctttttttgtattctttttcataattatacctctttaaattccttctaaatctttagcttcatcttcggttagataactaacaagtttactcactaaggtatttggattaactccttcttgaatgagtaatactgcttcaatgatcatttctttttcagcaatctcttctttatttatttctcttaatttacttgctataggaagccaaaaaagatttgctgtagcaagaccatatagagtagctacaaatgcaacagcaattttttcacccattgcagctacatcacttaaagcgctcaatattataactaaactcgttatggttcctactattcccatagtaggagcatagccacctgcagaggtgaacatttcaatacaattttcatgtcttgtagaaagctgttcgagcttggtatttaagatgcttttcacagaggatggatctataccatccacaaccatttgtagccctttttttacaaatggatctaaggcatcatctgttagctcagattctaaactcaaaagcccatctcttcttgttttaagtgatactcctttgaaatagtctatataccccttaagatcaatctctttctttttgaaagctattgataatactttcgggaatttcttcaatgttgaggaaggaaatgaaattcctacggcacctagtgttccaccaataactatcattgcagcagttggctgcagtaaagctatgggttttcccccttcaataataaagcctactataatacaaataaatgcaaatagtacacttaaaattgtcataatatccataaaattatcccccttgaatatatgaaattttagctcatatgtagcatttttcatactggttaatatatatttatgtaaatttgatacagtatatgaatttatatacttatataaaaataatagcatattataaaaaatatgtaaaataattatatatttaggggagaagttcatgtatgaccgttaattcatacaaattaatctaataaatttaaggtgttaagtaattgtaaagtctaagttattatattataatgttgaaagaatatgctaaataggaagggatattgatttatggagaaaaatgtttttatagttgatgaaaaagatagaggagagcgaatcgataagtatttagctgaaatttttgttgataaatcaagatcttttatccaaggacttattgaaaaggatggtattaaggttaataataaaactcctaagagtaattataagctaagagctcttgatgaaatagaagtaacatttagcgaacctgaagtattaaaagtagaggctgaagaaatacctattaatatactttatgaagataaagatgtagttgttgttaataaatctcaggggatggttgtgcatcctgcgcctggaaactataatggaacgttagttaatgctctgctttatcattgtaaagatttatcgagcataaatggaattataagaccaggaatagttcacagaattgataaagatacatccggagttctggttgtagcaaaaaatgatgaagctcataataagctttcagatcaattaaaagatcactcaatgaagagagaatattatgctttggttgaaggaagactaaagaatgataaaggtataattgataaacctttggctagaaataagagagatagattaaagataggaattgtagagggaggcaaaagagctgtaacacattatgaagttttagaaagattcaatggctacacattgataaaatgtatattagaaactggaagaacacatcagataagagttcatatggcatctatcggatttccgctagttggtgatcctctttatggatttaagaaacaaagattcaaattgaaaggtcaagtgttacatgcgaagacattaggttttgttcatccaagcaaaaatgagtatatggaattcacaacagaattgccagaatactttcaagaaataatagaaaaattaagaaatgaagtaagataaaaatattggaggaataacatgaaattaaaatcagttttattagatgaaaaagctgttaatagaacactaataagaatttctcatgaaataattgaaagaaataaaggaatagatgaactagttttacttggaattaagactagagggtatccgcttgcaaaaagaattgctaggtatataaagggaatagaaggggtagatgttccagttggatctgtagatataacattgtacagagatgatttaactaagataagtgaagatttagagattaagaatttagatttaggtcttgaaataaaagataaaaagataattataattgatgatgttttatatacatgtaggacagcaagagcggctatagatgcaattatggatgtaaatagacctagaggtattcaattagcagttcttatagacagagggcataaagaactaccaattagagcagattatgtgggcaaaaatattccaacttctaaaaatgaggttatagcagtatctctaaaagaaattgatggagaagattcagtgaaaatatttgataaatagataaaaagggagaatgcaaaaatatgtatgagttaattgcaacaagtactttcggaatagaaagcataactgcaaaagaattaagggcacttggttatgaagatttgaaaattgaaaatggaagagtaacttttgagggagacgaaatggatatagcaatttgcaatattcacttaagaactgcggatagagtacttataaaaatggcagaatttgaagctaaatctttcgaagaactttttcaagggaccaaaaaagtagaatggagtaagataattcctgaagatggagttatgcatgttgttggcaaaagtattaaatcaacgcttcatagcgttcctgactgccaatctatagttaaaaaagctgttgttaaaagtatgagtgaaagctatggaatggagacattcagcgaaagtggaccagtttataaaatagaagtagctatcttaaaagatagagttacgcttactatagatacaacaggaccaggattacataaaaggggttatagagaacttgctggagcagcaccattaaaagaaactttagcagcttcaatgcttctaatctcaagatggaaggacgagtttgaattaatagatccattttgtggatcggggacaatcttaattgaagcggctatgatagctcaaaatattgcaccaggagtaaacagaagttttgtatgtgaaacatggccttcaattactaaagatatatttgattcagtaagagaaggtgcaaagaaatctgaaaagaataaggatataaaactaataggatacgatatagactatagagttcttaaagttgctatggaaaatgcaaaaaaagcaggagttgataaatatatacaatttcaaaaaagagattttatggaattttcaacttcaagaaagtatggatttgtagtttcaaatccaccatatggagaaagaatcggtgagaaggaaatattacctatactatataaacatatgggaaatgcaaagaaaaagctggaagattgggattttaacatattaacatcctttgagccatttgaaaaaacatttagattaaaatcaacaaagaatagaaaattatacaatggaaaaataaaatgttattattatcaatactttgacaataataaaattaaaaatgctggtgatatattaataaatgaattaataaagtaaagtttaaggcatcagaaagctttgaaaacatatttacaaagttttcttaaagtgataaaataaatttaaataaaatttgatagcaaagacgctaacaatcagttggaattgttagcgtctttttttgttaaagagtttctgcatatgataattgaaataaaaacatataagatatacagtttcaataacaaatttaaatttgaaaatttaataatccaaatctttagttataagtaaaatgtagggaatcaattgtaatatgcatattagaaattaataatttgagaaatgagattgtaaagaacttgaaactagtagtcagatagatactcttaaattgccaaaagaaaggagtttaaactatgtcagaggtatatcaaaaaatggcagaaaaaataccgaatatgagcaaagcacaagaaaaaatagcaaaatatatattagcgcacccaaatagtacgccttttctaactgttgaaaagttagctaaattatcaggagtaagcatagcaactgtcacgaggtttgtgatttttttgggatacaaaggttatcctgaatttttaaaacatactcaagaatccatgcaacagcaagtatctaaagccaagcgtataaggattgattctgattcaagtgatagtgaagaaagagatatttataacatatttgaagatgacgtaaataatattaaactgacaatggaggacttaaatatatatgaattaagaaagtctgttaatctgctattaaatgcaaaaagaatatatatagtagcaagaagaagttctgctgtactcggaatgtttttaaaatattatcttgatttaatgtttaacaacgtaaatttaattgagcatatagagcaaattccaaagcagattagtggagttaataatgaagatgtaattatagggattacctttgagaaatatgcaagaagtacagtagaaatttttacacatctaaaaagaaaaggagctacaacaatatcaataactgacagtatgttgtctccgcttgttccatattctgatataactctaacagctataagcaagggaacaaggtttatagaatcttttgctgcaccattgagcctgattaatgctttgattgcatctattgaaaaagaaaagaaagacttttttaatagtaatgtagaattgctagaggaagcgtgtagaaagtttgatttgtttatttaaatctaaaaatattatatgtttactaaaaagagatatatcctaggattaagatatatctctttttcagtagattatgaattaaatatgttattaaagtcagcagggtttacaattagagttttattagtatggtaaattaccattccaggttttgccccattaggcttttttaattctttaacttttgtgtaatcaataggtaattttaatgaattttttcctttactatagtaacctgcgactatagctgcttcctcaagagttttgtctggtacatcaaaagagcaaactataacatgagatccaggaatatcttttgcatggagccacagatagtttttatttgcaaattttaaacttagataatcattttgcagattgttcttaccaacataaatatcaattccatcgcttgaaacaaagtgattaggcttagaagtctttaccttttttgaattcttgttgttttttctaaatcttatatatccagtttcaataagttcgttttttatttcatcaatttcattatagctttcagcatttagaatattagtaagtacagaatttaaatatttcatttcttcatcatttttcttgagttgaactttagcgtattcctcagatgtctttaacttattatattttttataataatactgaatattttcagcaggtgttttggttttgtttaaagagatagtaatatattcttcttgattttcgttataaaaatttagtagagtacattcgctatcacctttttttatactataaatatatgaagttaaaagatcaccttttattctaaatgattctttttcatcgcactcactaagagtttcattaagtatttttaatttcttattacatctatcaatatttgtatgaataagcttttgtaaatcagtagatttattttgtaatctatcttgtttatctttcttctcataaaaggcatccattaatacattaggatcatcatatgaaattgataaataatcttcatttagtgaatttaattttagagaataaaaatcttttacaattcctaatttatttgtatacatattgtaagagatattttgatttaaatcataaatgaatttattaaaattttcataaatttcacttattgtaggtgaattattatgatttgtaatgttataatataaatcattagacaatagattacttattcctgtgaaacaattaaaataaaatttattatcaaaaacaatagaatttttgtttgtaaaagaggatagttcttctaaagtaatagaaaaaggatttaacttagtagaagatgggggataaataaaattaacaccaggatataatactctataactatttatatcagcagttatatgttttattgattccataactttattatctctatttctaacaagtgtgatattagagtgtcgtcccataatttcaactataagagaatataaactatcaaatcctagttcgtctctattttcaatttctattattaagattctatcgttatctttttgagtaacatttgtaattctaccacctagtatatattttctaagaaccattaaatacataggagctttaataggattctctttcgtgctatttgttaaatgtattctggcaaacctaggggatgctgaaattaaaagtttgatattctgacgatcttttcttagagtcagaataatttcatctttttcaggttgatttatcttatctattttggaatttaatattgatttttctaaattatttactaaactatataggtagataccatctaatgccattttatgtcatcctttcttagtgtaactataaatagtataacattataggcatataattatcaattaatagcaaaaatgagaagaagggtgaatcaaattcatgcatagatgttatattgatgtattataatatagttttatcattgtaatcctaattgagtttttggattgctaaaataccaaatgtaaacttatattaaaaaattatatattataaatgtaaaattagaataatagaatgaaaaaagagccaaatattataaaaaaatttaaaaaagtatatagaaaaatttttaaataagttataatttaaacttggtgatattattaaatgattaaatacaaaagtttaatattaaatagttgaagcttatgaaattatacaattactaattataagaaatacagttaatcagtagggggaatttagatgaacttttataaaatgcaaggggcaggaaatgatttcgtatttattgaggatttcgataataagattaaagatgaatgcttattagcaaagaagatttgtgacagacattttggaattggtgccgatggtcttgtgattgtcagaaaatcagagttagctcatgctagaatggttataataaatgccgatggttcaagagctaatatgtgtggaaatgctataagatgttttggaaaatatgtttatgaacataaaatagctacgggtgataaattttcagttgaaactggtgatggaattaaagagattgaaataatattagaaaatgaaaaggttaagtatgtgagagtttatatggggaatccatcttataacggatgcgatatacctttaaataatttggaaagtcttatagaaaaagaaattgcagtagatgataaaaagtataagatgactacgttgctccttggagttcctcatacaataattttcgaaagtgatagagaatacaatgttattcaagagggatcaaagatagaaaaattggatatttttggtgaaggaagtaatgtgaattttgtgaaaatagttgatgatacccatataagagttaatacatgggagagaggcgctggagctacgttagcttgtggaacaggatgtagtgcttcagtagtagttgccaagaagttgggacttgttaataaggataaagaaatttttgttaaagctcctggaggagagttaatcatagaaattttaggtcaagatgtttatatgaaaggtcctgcagaagtggttttcaagggtgaactttctttataaaattataaaaaacgaggaaacaaaaaatgaattcattagtaagaaagtgcttaagcatttttgctttcattgcaattccactgtttgtcttaggatgtgcatctaaaaaagaagacatacctaatgtgacagaggatattaagttaaatataggagcagttctaaaaagcgaagacggtaattataaactatataattatgacaatggtaagtatgtggagacaaaggaaaataaggttatcatagattatgataaaagtagttctaattatatatatgtagatagtggtaaaaattatgtagttaataacggaaatagatatgaaatccaagatgaaaattatagtggattaaaattatcaaaaggtggaaattatatttcttactttatagatgataatgggcttaagttaaaaatattcaatacaaatggaaataaagaaattgaaatgaaatctaatgtttcaatatcgggaacattatatgattggtatgatacagatacattggtttattatggagtaagcaatgatggcgttaatggattatttacttataatataaaagaaaataaagaagagttactttataagattaatgaaggctatttagcatttataaaatcaagagatgacgatgtagtatttttacaattaacactggaaaataaaagagaagtaatgatgataaacaaaaaaacaaaggatgttaagcttttggcagataacgtagaagagatttcagatataattataaataaagataaattgtattttacaggaaaagcgtataataatgttaattctttatatgaattaataaataataaggtaaaaagattagtttttgattttccgggtaccgtaaaaatagaaaaaggattagaggtaagtgaaaatggagatgttttgtttataggttctagtaatggagatctcaagaaagagcaaatttatacatacactcaagatggtagtataagtgaaatagggaatagttcatcagaatatgtttttttagcatatacgcagtaatttaaatttagaattctttatcatgtttttatatgatggaggattctttattaatataaaaaagtattgactcttaccttacgtaggagtatatgctattcttatcataaaaataataatatacatattgcaaaaataattcttcatcataattctaaaaatatcaaaagaattttagctgtaattgtgaattatgaaatatgcattgcgaattgcaacatatatattaaaaaaggagatagtagaatggatctaaaattacaatataactgtagtaatatagattgggaagaagtatctagtatactagaaaaagtagggatgagtcattatgaaggcgaaatacataagaaagcatttgaaaatagttatgctgctgtatttgcttttgataatgataagttgattggctttggacgagcaatctctgatggagtttatcaatctgcaatttatgatatagctgtgctacctgaatatcaaggtaagagtataggaagtaagattgttaataaaatcttagaatgcgttcctacatgtaatgctatattatatgcttcacctggaaaagaaaaattttatgaaaaattaaattttaaaaagatgaaaacaggaatggcttttttcagaaattcaattaaaatgcaaatgaaaggttttatagaataataaaagaataagtaagagttaatggataaactaaagctttaaagataataatatctttagaatttaaaattgtgatataggagcgtagaaaatgaataaatttgataaagttattaaccaaaagactagtgaattaataacaaagaacttacttgggcaagaagttactgaagaagagtttagaaaatttaaaattattgctagagcaattgttagagaagaaatgaggggagttaagccaaataaaaatcctaagtcattgtacggtaaaacatggaaagctgcaagaaaatatagtgatgttaagaaataaaaagtatgtattagaatttgattcgttaagttatcatgaaatcctaggcattttaattaatgtctaggatttttaatttaaaagtttagtaatttctattatttaggcgataaaaaagattacattatttggaatataatgaataattactgagattttggttcaaaatttaaaatagaaactaaaaaatatataattagataggtgtgtttaaaattaaggaatatgaaattgaagatgtagatttaggaactgctaaaaatttaaaaaaagaaatttgtgagaagtatagagttattccaataaaggaaaaattggacgaggtaatagttttgtcatatggagtaactgaagaagcaaaagaatatctaagatttatatataacaaaaacatagttatcaaagaaatcgaagagagaaattacgaaagtttaaaaaatataatatttggtatagatgataaatcattagaagagatattgataactaatgcaataaaggttaatgccagcgatattcatatagaacctcaaaatggatgtgtttatgtacgatatagaattaacggtagtttagttttggtgcacaaaatagattctgatgaatatataactcttgcatcgaagattaagctgaaagctaatatggacataactgaaaaaagaagacctcaagatggaaaaataatagttaattataataatctaaaatacgatttaagagtatcttcaatacctgtagtatatggagaaaaattagtaattagaatattatattgtgataactttgactataatcttgaggacttaggattttcagaaagtcaaattaaactgattagaaaaataatatctttgaagaacgggcttatattaattagcggcccaaccggttctggtaaaactactacaatctacacaatattgaaggaaatcgattccaaggctttaaatataacgactttggaagatccagttgagatagtcatgcctaatatcaaccaaatgagtctaaataaaaaattggacatagatttttcgaatggccttagaagtatattgagacaggacccagatgtgattatgattggagagataagagatgaagagactgctagcatggcggtaagagcatcgattactgggcataaagtatatagcactattcactgtaaatcagcaagggaagtttatataagattagaaaatatggggatcaaaccatatctattgagtgatgcgctagttggaataatatcacaaagattagttaagattttatgtgatgattgtaagaatatagatgatgaaaattcagtgaatggaaagatattatataaaaaatgtggctgtaaaatgtgtaattattcagggtatgcaggaagacaaataatcagttcggttcacttcttacaggaaaatagtgaaaaaaggatggtggatttatataaggatagcaaatacctatcaaatgaaaatatgaagaaagatttggaagagttattacttcaaggaaagatatctaatagtgattatatagaatttatagaaggggaaagattgaatgaatagtaatgattcggaaagttcaagttatagaggatttaaaaatataacatattttagcttaaaaaaagggattaagattaagcataaagtaaatgaagaacaactggcattaatatcaggaagtttagcacagatttataaagatggaataagaataaccgaagcgttagatttggtggcggatacattacaaagtaagatatataaggaaagtttatatggcgttttagagttaataaaacaaggcagtagtttgtcacaaggattttcggagtttaaagacttatatccagaattcttcataggaattatttcaattggcgagaatacaggaaaactatatgaggtgttaaagggattaagtatctattatgataaatctatatttattaagaaagaaattaaaaatgcatgtatttatccgatgtttgtatttatttcaatgatattacttagtatatttttggtaaatgaagtgattccgaatttcttcgaaatttataaatctatgaatatcaaattaccaaaaggttgccaagtcatatatgatatgagtattgcttttaaggacaatcatctagttactggtgctgcaattttttcttggagtgtaatattaataattttagcaaagtgtttatctaatcaaattagcataaacaagctaacgaaaataagtatagtaagatctttctttgagtatataatggtattgcttttttcaataataacaagtactggaataaatatttcacaggctcttaaatattgtgaaaatagtatgagttttatgtatttacgaaataaaattactgaaataaattcaaatattataagcggggaaactctaactgagtctttagagaaaagtggagttttttcaaaatatgcgttagctattgtaaggattagagaagaaggggggacaatagaagaaggttttaaagaattagccaatactctagaatatagacttaatgagaaaatacaaaaatatttaaaaatgataaacccgattttcataattatgatggcaagcttcatagctttatttttactgatatttgtccttccattgtttaataatcttcagggtggaataagaaaatgagaagagagggattcactttaatagaaactatggtaagtatttttatactaacaattttacttagtgtaggaatatcattaagtaaatttgctcggaatgtatcaaaaaatatagataattcggaatatatttatgagattcaaaatttactttcatatggcaaagcggtttgtagagaaaagaataactatggaaaaataactgtaatggcaagtaaaaatgaaattaaatttatagatggatgggatagtatagagaagactgtatatatttcgaaagaaataaaaatcattagtggagatataaatatattggtaacgccagatggaaaaatatctagggggaatacaataaagataatagataattgcggtgtaaagcaggatataacgataggcgttggagtggatttgattagtataaagaaggtgaagcaatatgaaaaagcagggcagtatattaattgaaacattagcgtctgcaatgattgtaactttgactgctacatttattataagtacgagcatagaaaattctaatatactaagggaaagaattttaaaagaagaagtcgatagggcaataagtaatttggaaaatgaattaaaatacaatacatcaagtgaagagatacatgaaatgttagaaaataaaattggatttaaatataatggtgattttagtagagaattaatatataaaaatttagatgaattagaagatggagaagacattaggctaaacaaaataagtgaggatggcattggcttaaatttagaaatagtagctaatattaaggtcggaaaaaatgaagtgaatgtggaaaaaaagtttactaaaagttggtggatggatgaagtataaaattggatacgtttttaaaaagaagagaggatttactattattgaatcattagcgtatatttttttaacaacaatgattttggcatctggaataagtttgtttacatccatgtatagagcgtatttagaatcaattcagttaagtataaagtataataactatcaaaatttttttatagatttagataatatcgtaagtgaaggtggaattaagcagataacagtcaataataaccaaattaaatttttaaagaatgatgaatttaatagcatggataaaataattaaatcttatgatggaaaagtttttataaaatatacaagaaatgatgttacacaaacaataaatactatgcttgaagatatagacaatcttgaaattaagggaaaaggaaaattaatttattttatactacatgacaaagatgggagggaatttattaagtgcatttgaagaaaaaaggaactgtattaataagtactatgatagtattatccttaatgagcattctagggtgttttatgttcaaaatgatgaaaaacaacaatgaactaagctgtttatacaattttgataaagatagatatgatttgaattcaaatgaggagcaagtgttaaataagtttatgatagagattaatagagagaaagtaaatagtgagaaactgaatgaagatatgttttcagaaaactttaataaaaaaatagatgataatataatcgaatacaataaagataataataaacttctattaacaacttacaaagaagatgatgtaataagaaaaagatcaattgtttacagttttaagggggaaaaaataattttaattccgacatataattttgatgactataacaaatagcatctatgataatgtgaataattataaaagcatttagactaagagtttataaaagaggtgtttaatgagaaaatcaataatatctattaaaaaaaattattgcacatatgatggaaaaaaatatgattttaatgaatttagagaattaagtggtttattaacttcaaatataaaggtggtaatacttcaagaagaattatttgtgagccattttgagaattctgtaagaagatgtaaattatgcggctttgtagattcaaaaattagaaatgatttccctcaaaatggagatatactatatgattttgagaaaaagggaaatgtaatttcaatatactctataaaggggtctaagagagttgaaaaagtagtggagaaggcaataaatatagaaattaagccaattcaatttataataaaagatgctttgatgaaaatagttagagataataatagaaattttaaagcactaataaaatatgatacatgctattattatgtatcatttagggatagattatatcatgatggatttgtttctgaaaataaacatattgttgaagagaaacttttaaagaaaggtgatctcgaaggaatatacgttgatgacaatacggttgatattatttcagacaataataaatctaaggctaaaaaagtgaatataggagaatttataaatgaaaatatatacgaaaaacaaagatttcattccagaaagattttttaacaaggctgaaatgaacacaattagaaaggagaataaagtaataatattatttttaattattaacttaattgcttttccgtttgtagttcaaaatataagtgaaactaaagaaagttctaaattaaatagaaatagtaacctagaagaaggtaagattaagtttgaagatattagcatttgggtaaaaaatttaatgaaagacaatattgaagaggcacacataactaataatggcggggatataatagtaaataatttaagtgatatagatgagttaagttccaatggttttatagaaatacatgatatgaatttaaatgataatgaaaaatataaactaggagtaagcttatatgaatagactactcaatcatataattttaagcataatgataatattagcctttacgcaaatactatgtataaataatataaaaaaagctaataatatcaaagtacacaattatcaaaataaattttacgatcataaaactttaaaacaaattaacagagatttagattgcttaaatgaaaagaatattctttctgctaatgaaaaagacggtaaatggtatgtgaaaataaaaatatccggtagtaaagatgatctattaaatgagttgcctaaattaaaaaattatgatgtgaataactatattatagataaaaataaggacgaaacctctattatattagatataagcactaaggaaagtgtttaaaaggctataaaattataaaattttactggaaaataatcagaaagattgcaattatcattgtcttttgataaaatatgagtgttatgtcaacgattaagtatattagcttaatatttggaaaaagttacgcggtaattaggcatattaaaaaaataacaagtcattatgatagtctgttttgtataatactaaagtaatatatttactgaataatatattactttgatgtaatgttgtttatttagtaacaaaaagaatacagaacatcttagaggtgttatttattatatgtcttattttataaatttggagggatctttaatgataacagcaggagatataagaaaaggaacaacgtttgaattggatggacaagtatttacagtagtagaatttttacatgttaagtcaggtaaaggagcagcattcgtaagaactaaacttagaaatgtaatttcaggtggagttacagatacaacattcaacccaactacaaaattacaagaagcagtaattgaaagaaaagaaatgcaatatctttattcagatggagaattatattacttcatggatcaagaaacatatgagcaaattcctttaaactatgaaaaagttgaagatgcaataagattcttaaaagaaaatatgtttgcaacaataaaattctttaaaggtgatgcattctcagtagaagctccaaactttgttgaattattaataacacaatctgaaccaggtgttaaaggaaacactgctactaatgcaatgaaaccagctacacttgaaacaggtgcgatagttaatgttcctatgtttgttaatgaaggtgatgttataagagtagacactagaactggcgaatacatggaaagagtttaagctatatagttgctaagcgagaagcttagcaactttattttatatttaatctcaacatttttacaaataaagagaaggaagtgaaaagatatggaagagcttagcaaagagattgaagctttaaaaaagaatttatctaaaatagaaaataaggattataaagaatgttttgataatgtatactctattttagaagttatgaatcaaagaatagaagagttgactgtaaatcaagaaacattggaagaaaatattagatttatggatgatgatttatcaaatattcaagatgaactatttgaagagatgtctatagatgaattaaatgatatcgaagatgaatatacggaaataaactgtattcattgtaataaaccaatttttattgaacaatctaccctaagcaataacgaagaaattccatgtccttattgtaaaaagaatataaaaggataattaattattaaatatataaataaaatggctatcttaaagttaaatttaagatagccattttttaatttacatatttttattataattcagtaatattttggggagatattaaatattaattaattaagagaacgatggaggaggcagtggagttttgattggtgaagaagagatagtaggaatttttccaactaaaataggcaatttacttaaggataggcttaataaagaacaggtatatgagcttagaattaaaattgggaaaccaattttagtttactcaaaatatggagaaagtattattaattatatttctacaaaggaagatatgaaaagtattatgcaaaaagtttccaattattcattatatgcctatgaagaagatataaggcaaggatttataacaattaaaggtggacataggatcggcatagctggtgaatgtgtaatggaaaagggtgaagtaaagactatacgaaatatttcatctgtaaatataagaatttgcagagaagtaattggatgttcaaataaggttatgaaatatattacatcagcatataaagtttataatactataataatttctccacctaaatgtggaaagacaacaattttacgagacatagctagaaatatatcaagtggaatgccatctttggggattgctggtaagaaggtggcggtgatagatgaacgaagtgaaataggagcctgctattttggaattcctcaaagcgatttaggaatcagaacagatgtattagataactgtttaaaaagagaagggttaatcatggcaattagaagtctttctccggaagtactaatttgcgatgaaataggcactaagggagatgtagaagcacttattatggcgttcaattctggcgtaaatataataacaacaatccatggttttacaatagaagatctatataagagaagggtccttagtgacttattagataatgagattttggaaagagtaataatattaagtaatagaaatggtattggaacagttgaaaatgtgtatagcataaaaggaggtgagagtatgtgcttaaattaattcttatagtatgcatatttattataagcacatatataggatttgcatatggagaaactttcaagaaaaggcaggagcagcttaaagagatattgaaatctttaacaattctccaaaatgatatagtttatggaacaactcctttgcctgaagctttaggaaatttatcacataaagtgtgcaagcctctgagcaattttattgaattagtggttaatagattactaaaagggaatgtagaaagcgtatatgaagcagcattagaggagtttgaagtgttggaaaatgaattttatcttgaacgtgatgacagaaagataatgtcagatttttttaagtctcttggagaatcaggtgtttatggacaagaaaaaatattcttattggcgattgaaggaataaaaataaatctaagtgatgcagaggaaaatgcaaagaagaatacaaagctttatagatatcttggagtatgtttgggagcaatgataatcatatttatgatatgaggtcattataaataatttataatagctaaaataattatactaaataaggattggaggaagataaatgcatgatataactatactttttaaaattggaggagctgggatacttttagtagtattagataaggttcttactagcagtggaaaaggtgagattgcagctataacaaatattgcaggagttgtaataattctgcttatgatagtttcgatcataggggatttatttagtactgttaaaactatgtttgtaatgtagggatgcagattatgttaatagtaaaaattgtaggcatagcgtttataacattatttattatgctattattcaagcaatctaaaaatgaattaaatacattccttgttctaactgcgggtgcattaattcttcttattatgatagagccacttagacaagtgatagactttgtaaaagaaattgcagataaagccaatattgatatggtctatattggaatagtactcaagattttggctatagcatatatagcatcattttcaagtgcattatgtaaggatgctaatgccgatagccttgcgactcaaatagatttatcaggtaaaataatgattttagtactagcaattccgatacttatggcagtattaaattctatattgcagataatgtaggtgtttatatatgaagatgataaaaagagttacgtttatagtattaatgagccttatgattaacatatttatttcggctgtgacaggtgattcttttattgaatcgagaactatttatgcggcagaagtaaataataaagttgatattgaaacaggtaataacacaaacttttatgataagaataaaagtaaacaatcttctgaaaatgaagttaacatagatgaattagggggaagtgcgaaagaagaaattaattcgctatatgaatatataagcaaaatgaaaacagatgttgagctcatgaataatttaaatccagttgaatatgtcaaaacttatatcaaagaaggtaaagggaatctttcaattgatacacttctaaaagcagcattaagcataatatttaaagaagtgaaaagtgtattatctttagtaatatcaatagttacaatagcaataatatgttcactactaaaaaatctacaagatgcattttcaggtgaaagtatatcccaagtagcattttatgcatgctacgccttaataataatggtgttatcaaagagttttataatttcaatttcagttgctaaagatgtaataaataatatttcagattttatgagtgcgcttctccctattcttgtgactatgatttctcttgctggaggaatagcagcggctactacattagatcctatagtacttggtgcagttgtatttatacctaaagtttattccaatgtgataattccaatgatattaatgggatttgtattagaatttgcgaataacatatcagcagagcataaaataaataatttgtgtaagttgtttaagcaaatcatcatatggtttcagggaatcatagtaacaatttttataggattattaacgattagagggattacatcaactacgattgatgcagtaacactaaagacggcaaaattcgctgtagacaactttattcctattgttggaaaagccttttcggatgcgattacttctgttgctggatattcacttataataaaaaacgctataagttcaatagggttagttgtaattatcttaattctcttacacccccttattaagttagttcttatagagtttatatataaattatcagcggcattaatagaaccaataagcgattctagaataacgaagtcattggaggcagcgggaagttccatgatgcttataatatcatgtgtattaactgtaagctttatgttttttatattaataggtatcatggcatccactggtaggtttatagttggaggataaaataatatgtttatggaagctttaaaaaaatttgtaattacccttgtgactgttcttatatttatgagcgctgtagagatgattgctcctagtaagatgaagaaatatataaaatttgtcttgggattaatactaataacaattatattaaatccaatattgcaaattgtagaaggtggagaaaaaaactttacagatgtaattaataattatgaacaagcattttcaaaagatagagatacagctaattttgaaagtataaatacattaagcaaaagtaatacagatgatgagagaaaaaaagcatttgtagccaactttaataaaaattgtgataacattttaaaaaataatttcaaagagatgaactttaagagcgaagttgattgtgatgtggattttagtaaagtagctataaatgtaaagaaacttaggataggtgtaagtagtaataaaataaataaaataaaaaaaatagtaataagcaaaggtgcagatgaaaataacgaaggaaaaaatgcggaatatagtgaaatagctgattttgcaagcaatgaattaaacattccaaaggagaaaatagaagtatatggattagaggagtaggaggtatatatatggataaagataaatttaaaaaagaatttagcaaaatactagagcagaaaaagatgaaaagtcttatagcagtttgtataatacttgcatttatacttattgctatgaatgtattttcatctggcaacaataattttagcagcaataaactatcatctaccgcagctaaaacaaatgcagaaaatgtagatgatactaaaataaataatgaatcagatgaaaaaaattatgaagaaaaacaaaaaaatgatttaaaaaacatattaaagaaaatgaatggagttggtgatgttgaggtaatgatgtcttttgaaaatgggggagaaaaagttccggcgtatgataataataatcaaaagtcaactacagaggaaaatgataccgagggtggaaaaagagttacaaatcaagacacagatacgtcaaaaactgtaatgacaacatctgatgggaataatgaaccatttattttgaaaacctataagcctaaaattactgggataataatacttgcagaaggtgctgacaatagcaagataaaatatggaatagaacaagctgtgtcaaaactatataacttaagtttagataaggttaatgtatatagcatgaagaagtagcatataattttatagaaaaagaatgggaggaagaatattatgacaaagaaacaatgtgggattatatttacattattagcattaatattatgtgtaggaatgctagcagcaaaacttaataacggagggctaaatgatccaacagatttaagccaggttttatctactgatcaatcaaaaactgaacaagatacacaggctttaagtcaacaaaattatttttatgatgcgcgaagcgaaagagatcaacaggattcaactacaatacaaactttaaattcaataatttcagatgcaaatacatcaaaggagcaaaaggatcaagcaacaaaagagttaacacaaaaaacaatgacaaaagatagtgaaggaagaatagaattaagtatcaaaaataaaggttatgaggatgctttatgtatgttacaatcagataaagcaacagtaattgttaaatcacctaatgaacttcaagaaagtgaaactgtggctatacaagaaatagttcaagagatatcaaaaattaaagacgtaataatacaagtacaaaaatagtataaaaaccataatatatttgtaatgttaaattatatttgatataatgaacacaagattatcatgttttgttatcacaaaacctaggaggttaaagtaacatggaagatttagttagagaagaaaatatcggagtagttaaaatttctgatgaggtagtaagcgttattgcaggaattgctgctcaggagattgatggaatattagatgctcaaatgggtgttgcaaacaacttaacaaacatatttaaaggtaaaaagaacaccgctaaagcaagtaaagttactctagaagaagataaagcaattatagatatgaacgtatcagttgaatatggtaaaaaaataatggaagttgtgcctcaggtgcaagataatgttaagaaaaccgtggaagctatgacgggactatatgttgaagccgttaatatctatgttcagaatatttatatatcaaaaaaggaagaaagtgaatctaactagtttgattttcaccctctgaagctttcagagggtgtttctatgctgaaattaaccaaggtttaaaagaaagcaaaagtgtgtataatgataaatgtacataattaactatgatacatatttaggaggaatatatgaacagaaaattatcaagggaaaaggctatggagttactatttggaatgactttgagcaaagatacaatggaagatgcagtggaagcatttgtagagaattatgaaggggatataaaagagattgacttaacatatgtaaaacaagtgttaattggtgtaagcaataataaagaagcaattgacaaagttatacaagagaatttacataactggaaaattgaaagaatatctaaagttaatttaagcattttaagaattgcaacatacgaattattatatgataaggaagtaccaagaggtgttgcaatcaacgaagctttagaaattacaagaagatattcagatgaaaaaagtgtatcgtttataaacggagtactagataagattaagcaggactaatttttatatactaatacattttaaatatacatgatttataatttaattatgtttagaatatttgcaataaagatacttaaaattatataaaataggattacaaagtgaaagtaggtagaatgataaaatggggcaaattattaatggtaaagaagttgcattaaaagtgaaagaagaaataaaaaattttgttaataatagaaaagaaaaaaatcttcaagttcctaaaattgcatcaatattagttggaaatgatggtggatctatttattatatgggcagtcaagagaaagtagctaattctcttggagttgagtttctaaaattaactttaccagaaacttgcaatgacgaagatgttatagcagaaatacataaattaaatgaagataataatattcatggaattattctacagttgccacttccgaataattttgatgaaaagaaaattatcaagcaaatatctcctaataaggatattgattgtcttacatttgagagtcaaggaaaactatatatgggagagccaaaatttttaccttgtacacctaattcagtaattaccttaattaaaagtctaaacatagatattgtagggaagaatgttgtagtccttggaagaagcaacatagttggaaagccagtagctcagcttttattgaatgaaaatgcaacagttacaatttgtcattcaaaaactaagaatctaagagaagtttgcaagaatgcagatattttggtagtagctataggaagaccaaaattcattgatgatacatacgtaaatgaaaatgcgattgtaatagatgttggaacatcatcttttgagggtaaaataactggagatgtaaattttgataaggtaatagataaatgtagatacttaactccagttccaggtggagttggctcgttaacaactactttattaataaaaaatgcatgtgaggctttacaggaaaatgaatattaagactttaactgtttcagaggtcacaaattatataaaaagaatgttagacaatgattttatcttaagtaatctctctgtaaaaggggagatttctaatttgaagtatcatagtagtggtcatatttactttacacttaaagatagtagtggcaggataaattgcgttatgtttaaaaataatgcagtactattagattttccattagaagaaggaatggaagttattattaaaggtagggcatcaatataccctgccactggaagcttccaactttattgtgatgagataagaaaagaaggcttaggagatttattcattaaatttgagaaacttaaagaaaaactatctaaagaaggatattttgatgaagcatataaaaaggaattaccaaagtatcctcagagaataggaatagttacatcgccaacaggagcggcaataagagatattataaatgtttcaactagaagaagcagtcttgtggatgtagtgctatatccggcaaaagtacaaggtgcaggtgcctacaaggatatcatttctggaattagttattttaatagaaagaaatcagtagatataattatagtaggcagaggcggaggttccatagaggaattatggaattttaatgaagaggagttggctaaggcgattttcaaatctaaaatacccataatttcagcagtagggcatgagatagattttacgatttgtgattttgtagcagatgtcagggcagcaacaccttctcaaggagctgagattgctgttccacttagtgataatataaaagatagattactagatatttcaaagaatttagataagtatataagtgatagattagatacttgtagaaataatttatcaggagctcaaagaattttaaaggttcattctccgatggctaaaatatctaattcatatttagaagtggatagattacaagataggttgaattttgcaatgagaacgaaaattaaaggagaaaagaacaaagtagaaaatttaaataatttgctttttgctcataatccaattaaggtaatttcaaaaggatatgctataataaaagataatgaaaataatattattacatcgaaagaacagctaaatgaagataaaaatatagaagttattcttaaagatggcaatatagaaggaaaattcataccatcaaaatgaggagtttgagatatggctaaaaaagagagttatgaagaaatgttaactaaacttcaagatatattaagcaatttagaaacagatgacttgaatcttgaggaatctatgaaatcttatgaagaaggtgttaaacttgtaaataagatttataagattttagattcctatgaagctaaaatttctataattaaagatgataaagaattggagtttagtgaagattatggagataaataatttaaaaaaagatattaatgaatatttggaaaattacttcagtgaaaaaggaagttttaatagaattatatatgattcatgtagctatagtttgaatataggtggaaaaagaatacgaccaatattgctttcgctaacttattatatatacaaagaagattataggaaagttataccaatggcggctgctatggaaatgattcatacatattcattaattcacgatgaccttccttgtatggataatgacgatttaagaagaggaaaaccaacaaatcatattaaatttcaggaaaatatagcagttcttgcaggagatgctttattaaatgaagctatgataataatgatggattatgcgataaaaagtgaaaacaatgctttaagagcagcacatgagatagcagttgcggcaggcgcagaaggtatgataggcggtcaagtagtagatattatttcagaaggaaagaagatatcaaaagatgagctagaatatatgcatgctaaaaaaacaggtgcacttattagagcggcaatagtttcaggagcaattttagctgaagcgcctgaagatgatttgagattattaagggaatatggtgaaaagctagggcttgtttttcaaataaaagatgatatattagatgttattggagatagtaatatattaggtaaaaatatacatgcagatgaagaacataataaaacaaattttatatcggtctttggattagataagtgcaaagaattatgcgaaactttaactaaagaatgcatatctattcttaacagtttgagtgttaattcagattgcttagttgaacttacatatactcttttaaatagagaaaattaatagagggaatgattgttatgaacttactggataaattaaattttccagaagatttaaaaaagcttaatgaagaagattataaagttttaagtagtgagattagaaaatttttaatagatagtgtctctaaaactggtggccatttagcatctaatttaggggttgttgaattaacattaagtttatttaaagcctttagttttgataaagataaaatagtatgggatgtaggacatcagagttatatttacaaaattttgactggaagaaaagaagggtttaaaaagcttaggaaatacgatggaataagtggatttcctaagagaaatgaaagtaaatatgattattttgacacaggccatagtagtacttcaatatcagcagctcttggaattgcaagggcaagagatttaaagaaagaaaaatataatgttatctctgttataggtgatggtgcgctaacaggtggaatggcaatcgaggctctaaatgatgttgggtttagaaaaacaaaattaataattatattaaatgataaccagatgtcaatttcaacaaatgtcggaggattatcacgatatttaaataaacttagaatagctccagtatacaataagttaaagactgatattcatgcatctttagataactcaaatctaggtaaaaatatagcgggaaaaatatctaaagttaaagatagcataaagcaattaatagttccatctatgttttttgaaaacatgggggtaaaatatattggaccaattgatgggcatgatatcgatgcaatgacagaggtgtttataaaagcaaaagaaataaacgaaccagtaataatacatattttaactcaaaaaggaaaaggttatgcgctagcagaagaaagtccaagtaagtaccatgcggtaggagcatttaatttagaaagcggtgaatcaaatgcatcaccaaagaatagctattcaaaggcatttggaaaggcactagtaaatcttggagctcaagatgaaaaaatagttgcaattacagcagctatgccagaaggtacaggacttaagtgcttttcacagaaatttagagatagattctttgatgtgggaatagcagaagaacatgcagttactcttgcagctgggatggcgagtaacggtttaaaacctgttttcgcagtttattcaacatttctacaaagggcgtttgaccaggtattgcatgatgtttgcattcaaaatcttccagtagtatttgcgatagatagagcgggaatagttggagaagacggtgaaactcatcaaggcattaatgatttatcctatttatctatgatccctaatatacatatagttgtaccaaaatgtctagaagaagttgatgttttattaaagtgggcaattaacaaaaatgcgccagttgcaataagatatccaaagggtggaaacataattgatactctttcaccaattaaagaggtggtagaaggacaatgggaaatagtaaatagaggttctaaggtttgtattattgcaactggcaggatggttcaacatgcaatgcttgcaaaagaattcctatatgagaaaggattaaatccaacggttattaatgcaacatttgttaagccaattgataaaaaattactagaaaatataaaaaaagaaggatataatattttaacaatagaggataacattttaaaaggcgggttaggttcagctgtaaaagattatttaagtgaaatagattataaaggaactattagatcacttggatatgatgatgaatttattcctcagggaaatgtagaaatcttgtacaaaacatataaattagattacgagaatataagcaagattgttatgaagctttatgattaaaaggagaaacaaatggcggaaaaaaaagaaagacttgatttacttttagtagaaaagggcataattaattctagagaaaaagcaaaagcttgtataatggaaggtaaagtttatgttgatggccagaaagtagataaggctggtgagaaagtaagttctaatgctaatattgaatatcgaggagaaacacttaagtatgttagcagaggtggacttaaattagaaaaagcaatgaaaacttatagcatatcattagagaataaagtgtgtatggatataggggcatccacaggcggattcactgattgcatgcttcaaaacggtgcttctaaagtgttttctgtagatgttgggtatggacagtttgcatggaaacttagaactgacgaaagagtagtttgtatggaaagaacaaatataagatatgttactctagaagatataggagaacctttggactttgcatctatagatgtatcttttatatcattaaaaaaaataatgcctgcgacaataaatttgctaaaagatgatggagaagttgttgcacttataaagcctcaatttgaagctggacgcgagaaagtaggaaaaaaaggcgttgtaagagagataagcacacataaagaagtagtgcatgatattgtagactttttattacagcaaaacttaaatgttttaggtgtgagtttttctcctattaaagggccagaaggaaatagagaatatttagtgtattttacaaaggataaaaataaaaagagtgattttggaaaagatgatatagatgaagttgttgaaaattcacacatagaaatttaacttccttggaggggctatgaataatattgggattgcaattaatccatcaaaagatgtagataatagaatattgaatatggttgtaaaaaaatttaaggaaaagtttaacttgaaaaatattgaagtttttaattcattcgatatagaagagcagaatttagcagatattgatttacttatcgtattgggtggagatggtacactccttggaatagctagatctttaaatgatagttttaattcacctatcttagggattaatataggcaatttaggatttttgtcaagtgtagatatatcagatattgatattgctcttgaaaaattaaaagacgggaaatataaatttgttgacagaatgatgttaaattgtaaagttgaatcagatgaaaataaagaagaacttaaggctttaaatgatgtggtactggctagaggaactctttcaagaatggtgaaatttacgatatttgtagatggaaagatatattctacattcaaaggtgatggacttattatagcaacacctactggatctacagcatactcattttcagcaggaggaccatttatatatccggatttagaacttataacaataactcctatatgtcctcatactaaaagtatgcaaactatcgtattaaaaggagacagtgttatagatatatatgcggaccatgaagaagaaaaaatttatttgactgtagatggtcaaaaggctattaaaattaatcatgaaacttcggtaaaggtaagtaaaaataaaaaaagtgtaaaattacttgtatttgatgattatgattattttaaagtcttgagaagtaagattttgaataattctaaagaatgtgatggtgagaaactttgaaatcaaaaaggcatactaaaatattagaaatcataggctcaagagaaatagagacacaagaagagttggcagatgcattaaaaaaagaaggatttgatgtcacacaagcgactgtatctagagatataaagaatttaaagttaataaaaatgcaatcgactaatggtaaatctaaatatgctgtgtctacaggagaacaaaaaaatatcattgatagattaagcaatattttagctaatacagtgctttcagtagaaaatgtagataaaatggttgtaataaaaactataacagggtcggcaccaattacagctgaagctattgataatttggaaagtgcggatattgcaggaacagtagcaggagataatactattttcattttagttagaagtttggaaagtgctgaagatttggttgataaaataagaaaaagaatgtcatcataaatattaagggtgggatgaaatgctaattcaattaaatatcaaaaattttgcgttgatagaagacatgacgataaattttagtgaagggtttaatatactttcaggagaaactggagcaggaaagtccatcatgatagatgcaatcgactttgttcttggtggaaagttctcgaaaaatttaataagaactggtgaagatagaacatatgtagaggcattattttcattagaaaaatcaaaagtttctgaggtattggaagaattagatattgagtatgaagatgtcttaataatttcgagagaaagtcatgcgagtgggaaaaacttgataaaggtaaatgggaaaagcttaattacttcacaacttagaaaaattagagcaaaacttttagatattcatggacaacatgctaatcaagaacttctacaaagaaatactcatatatcatatttagatggatttataggagatgagatgatacatcctataggtagatttagcgatttaagggcagatttaataaaaataagagaagaaattaataggatttgtggcaatcaagatagagaaaaattgctagactatcttaaatttcaaattgaagatattgagaaagctaaattaaaaaaggatgaagaagaaactttaaaagaagaatataatattttagcaaatgctgaaaaaattaataatagtttatctatctcatatggaatgcttagtggaaacgaagagttaaatgtgattgattccatatcaaagataatgcacgaactatctaatgtagaaaatcattttgaaaagattaagaagaataagcaattaattgaagaagcattttatactttagaagaagctagtcgtgagatccgtgacatggcagaagagattgtttttgatcaagatgcgttggagaaagtaaatgctagaatttatgaaataaatatttacaagaagaaatatgcgccaacaattccagagatcttagattattatgaaaaaataaaaaaagaatataatgaaatattaaattctgaacaaataatagaaagtcttaaggaaaaagagaaagaaattctatctaaaatggaaaaagaagcgttaattcttcatgaactaagagtaagaaaaagtaaattcttagaagaaaaaatattaagagaacttacgtttgttggtcttgaaaaatcaagaatggaaataagtatagttcgtcaagaagagtttaatgaaaagggatttgatgatgttagttttttaatatctacaaatccaggagaaccacttatgccgcttgaaaaagtattatcaggtggagaactgtcaagaataatgttagctttaaaatgtgtttttgctgagaaggatgaaataccaacattaatttttgacgaaatagatacaggaataagtggagcagttgcacaaagagttggagaaaagatgtatcaattatcagatacgcatcaagttttatgcataactcatttgccgcagattgctgtattatctgatcatcattattttgttatgaaaaaagttaaagataacaaaacatttacaaagataaaggttttaaaaaaggaagaaaaagaacttgagataagtaaaatgttagcaggagacgatgtaacagaagctacattaaataatgttaaggaaatgataaaattaagtgaactaaaaaagctagaaattcaaaaataaatacatatagaaaataaaattggtaaaaataaaaccatgtaattgcatggttttatttttttatttttataattttggaaatttatatataaagtaaaagaaataaagttatatacttttaaaatttagtataagctaaattttttgactacaataacaaagttcttataggataagacttgagtgcagtgggaaaattaaatttagtaagtaaaggaggagagaaatatgaagagaaaaattttatgtgctactagtttaattatgactccaatccttattctaattttatttaccacgatgagcataaggaaattaccaagtaagatttatacaagagatgaaaagacagtacaatcaattgcacccataggaaacaccataagtaagattggtaataacgataatgagtatgagataaaatttttgggaatgattcctctgaaagctgtcgaagtacaaaaaattaaagatttagagatatgtccaggcggaaatccagtcggagttagagtgaatagtgaaggcgtgattattgttggatattctgaaattgaaatcaataataagaaagaagaaagtcctggtaaggctgctgggcttgaaattggtgatgtaatactaagagtaaatggtgaaaatatggagaattccatggatttgttaaaaacaattaaagaatgtgataatgaaagtataaaggttgatattttaagaaatggtgagaatctcacaaaaacaatacatctaaaaaaagaaaataataaagattataaaataggattatggataagagactcaactgcaggagtgggaacaatgactttttttgatccaactactaaaaagttcggagcattaggacatccgataacagatgcagacacaaatgaaccatttctagtaaagaaaggagacttattagagtcatctataataagtgttagaaaaggagaaaaaggatcaccaggtgaattaaaaggaatttttttaaacgaagagacaccaactggaaacattgaaaaaaatacgcaaagtggaatttttggtgaaatcaaaaatactcaagtattaaataataaaattaaacctcttaaagttgggtttagggatgatatatctgtaggaaaagctaaaataattacaacagtagatgagagtggtccacaagaattcgatattgagattgaaaagactttaaatcaatctattccaggatcgaaaagcatggtaataaaaattactgatccaaggctattacaaaaaacaggtggaattgttcagggaatgagtggaagtcctataattcaaaacgataaaatagttggagcggtcactcatgtactaataaataaacctgataccggatatggtatttatatagagtggatgcttcaagaagcaggaataataaaataaaaacaaatgataggtagcgtatttaaaaatcgctacctatatttgcttttgttttgagtctgatataaagttatttgaatttatggaatataaaataaacatagggaaatatagtattaatttatggtgttatattatataaaagtacataattttaaaataattattaatatataatttcgatatagattgtagaaaaagaaatataattatataataaatatgtattcgcttaataattgagaatttaggaaatatatagttacatttttacttaaaaaaatactttaaaagtattttgtcagaacctatttactttctgagaaaaaaagtgtataatttacaaatagtggaagatgataaagtaatattaatcggacttaagagatatttatgtaaaagggaatatattaatagaaaaattactattgcaaatgtagacgtacataccctattaatgtcaaggatcttacaataatttgtagaagtaatatattgtgttatattgtacaatgatggaactatttaataagatatggttataggggttaaataatatattaaaatacaaacataataaaagaatggacaaaaggagagaaaaaatatggaagattcaaaaatatctgtactaattgctgatgataacaaagaattttgcagtatattaaatgattatctacttaatcaaaaagatatagttgtcacaggaattgcaaaagatggtagagaggctttagagttaatagtagaaagaaagcctgatttagttattcttgatataattatgccacatttagatggattaggtgttttagaaaaattaaatacaatgcaattggaaaaggttccaagaataataatattatcagcagtaggccaagataagattactcaacaggcaataactcttggtgcagattattatactgtaaaaccttttgacatggaagtatttacaaagagaatcagagaaatgtttaatagctctgcagcagttcaagaaacaaatatgagaaattcgtatgcatcatcaatgatatctactccaagtgaaaataaagcaaaggcgcctattgatttagaaacggaaataactaatataatacatgaagttggagtaccagctcatattaaaggttacatgtatttgagagaagctataacaatggtagtaaacgatatggaattattatcagcagtaactaaagagttatatccttcaattgctaaaaagtacaatacaacagcttcaagagttgaaagagcaataagacatgcaatagaagtagcatggggaagaggtcaaatagaagcgattaacaggttatttggatatacagtgcataatgataaaggtaagccaacaaatagtgaatttatagctataatagctgataaattaagacttaaaaataaagttagctaattggcttgaagtaatgtgaaaagctacgttgaaggtaatggaaaatatctttcatctatattttaatagcaactaatagtttttcatatcaattaatactctaaatttatgtaagactaataccttttattagttgggtgtaacaatctaactaataaaaggttatttttatgcaaaaataaaaacaaaagattatagaggaaagcaacataaattaaccatcctttttaagtggaaaatttaaagcggacatgttataattaaagtgttagaatttaagatatagaaagacagaggattaaagtgtatggaaataaaaattaatattccagtattaaaaatattagcgataactatttcgggaatattgggttatataactggaataatagtatataaatagatatgatattttagactaaggagatataattattctttggtcttttttttatgtaaaaaaataaattaattaacaagaaggtcatgatatttcaaaagtagattatagtatgtgaaaatataattctatggtatacaagcgttaataaaaagtgaataagtatatttctattaagaaatatattacgatagtaaattattaacgacacaaaagtttatacaatgttataaatttacaatacatcatgtataaaaaagagaaaaatatgcttttaatgctgaaaaatgtggaaataaaagttaaaataaagattacagaaagaaggtatttgtataagaatgtagaaatatatgattaggtaaaagagattcgatcttgataagtatatcgagtcaatttaactaaaattatattatggaggtattataaaaaagagaatcaacttaagaataatttatgcattaatgaagggtggttttttatggaatttaattgggataagaaatggtcagtgggtattgataaaatagatcatcaacacaaagaattgtttgatagaattaataagttagtaagtgcgatgagagagggaaaaggaaaagatgaggttatagagactttaagctttctagaagagtacgttattaagcattttaatgatgaagaagagatgcaaagaaagagcaattatcctaaatacgatattcaacataagcaacatgaagaattcaaagaggagcttagagaattaagaaaagtttttgaaaaagctggtgtctcagcattgtttgttataaatgtacaacaaaagatgtccagttggtggagaaagcatattagagaattggatagagatctaggaggattcttaatagaaagttctaaatagtactatttactgaaggtatgatggaatcgaattgtactacaagataaaaaatccaatcatttgaatttggtaaattattaagaaaaatcaatgaaaaggatagcttatttagaaatataagctatcttaaaattggttgacgatatttttttgaggtaaaaaaaataatgaaaattgtttatattgatattataacttaagattgctacaggattatgacaaggctagtatataaattaattcttattgaattttaagtttatgaaaaaattgttttatattagaaaatatcgataacacagttttataaataaaaatcttatacagaataacataaatactgcaaattggaaaaagggattttatataatttatagaatatttttagttatagaaaaggggtgagggtatgggagaagtaaaagatgaaaagctaacaaaggatcaacaaaaagaagcattaaaaagcgcaataacaacaatagtagaaaactacaagatgttgctaataagtaataataatatatcaggcctagagaaacaaaaattatacggtgatcttgaacatagtgtggcagcaatagaatttataacgaaatgtaagcttgataaaggcgttttgtgggaaggaatatgaaactaatctaaataattaaaatagatatagtgttattaaagtataattagtgcagcataaaaaatatttcacataacaaaaaagaatagttcactagggtgaaatgaactattcttatatgggtcatagtattttttataggagtaaaataatgttttatcttgtttcaagtaatagtataaatatatattgtggcaatattatgacaacaataaaaaactaatattaaaatttcaacaataatatttaaaaaaattgcacagaattgttgacaaaactcatgaatatatgatatttttgtaaaagcatacttttaatttagttcagagaagctaagaagggggaacatatgatgaataataaatcattaaaaagcgaaaaaaattttatagatgtaaaagagaaagtttctttaaagagagcaattccattaagtatccaacatttgtttgcaatgtttggagcttcagtcttagtaccacttatttttaaaattgatccaacaacagtgctattttttaatggtattggtacattactttatgcctttattaccaaaaaaagtattccagcttatttaggatcaagttttgcctttatatcaccagtattacttttatatagtcaaggatatgattttcagactatacaaggcggttttgtatttgtaggtatatcattttcaataatagcgattattgttggatatacaggtatgggatggataaataaattatttccaccagctgctatgggatcaataataacaattataggtttagaattagccagtaatgcagcagatcaagcaggttttccggttggattaagtaattctccaactttaaacataacatgggtaattgtttcgatggttactttagctacagtgattttatgtaatatcttattaaaaggattcttgaaagttatacctatattaataggggtagtagttggatacattacagcattctttatgggattagtagattttagtactataaataatgcaaattattttgttttacctaatataaaggttgcacatttcagtttaaatgcaattttaactatactacctgcaacatttgtagtaattgcagaacatgttggtcatttaaaagttactagtagcattgttggaagagatttatcaaaagatcctggacttcatagatctttacttggagacgggctatcaactatcatttcgggaatgtttggttctgtaccaacaacaacttatggtgaaaatataggagttttagctctaactaaagtgtatagtgtatatgtaatatgtggggccggcttagtatcaattttgctagggttttctgggaaaatgtcagcacttattagtacaattccaacgcctgttattggaggaataagcttcttattatttgggactattgcaacttcaggattaagaacttttattgaagaaaaagttgatttttctaaatcaagaaatttaatattaacttcggtagtatttatagtaggattaagtggcataaaattaactttagggactattgaacttaaaggaatggggctagcaacattggttgctatggtgttaagtataagttttatgatatttgataaattaggtataatgaacgaagcggaataagataaaagtttataaataatgaaattaattataagaatgctgttagtattaatgaaaatactaatggcattttttattttaaagaaaagaagtataaaattaaagaaagtagatatatttaactatttatatttttatagttaatttatgaatatataagagtattaaaagagaaactatgtatgaagataaatgtataggaggaatacaaatgaaattaaaaaaatacataaaagtattaagttattttattatttttaacgtacttatgagtttggctttcgttggcgctgatgctaatactgtgaaaataactactgataaggaaccattatatacagttgagtacgatggctatgatcttacagcgagaagaataagagttgctggaagcaacaatgttgcatattgcttagagataaatgaaaaatatccatctgggcaaaatttttcgtcaaatagtaatttaagtgaatcagttcgtaatgttattgctgccggatatccaaatagatctgtagctgaattaaatttagacaatgaaaacgaagcgtatttcgctactcagatagcaatatggagttcaatggaaggatatgatgttaataaaataaaaggaaataactctaaaatagtagatgcgataaagagcatatataatgatggggtaaatgggaaatattcaagtaaaataagaagtaaagtatataaaacaagtgatgaatctatacaagaaataatagttgtatatactgatgatttagtatcggaagaaaaaggagaatcaattcaaacagaatatgcaccacaagaaggataaataaaattacagattacatgttaatgctgttacataatgaatgttttatgattagtctaaagaatttaccttgtaacagcattaatagttaattagaaggaaatcttggctatgattgacaccaattctataaaatgataaccttttgttagattattagaagtagtaaggtggtgaagaagattgctgctaaaggattatagtaaggaacaaattaggaatttagttgaaattattaaagattgtgtccgtgaagatatgtatactatatctttagaagaaaataaggcagaaaatattcaatttatagaagaatacaatataaatgaaaagaagagaataagtatactatgcgatatagactacaaagatttttgttatggcctccaaaacgtaaaaaatggagttgagcaaaatgatctttatgtattttgtttacaaaaagaattgtataatgttgaggataagagagaaatagtagatatttatttgaaatttaatgtaatatgtaatgaagtgaatagtagtagagtattagtctctctacataaaagaaacaagcctattacatatctttttagataaaaagaattgtcttcatttctaaaaggagggataaactcatgaagaaatcagcattttgtgaatattgttttagcgaaagagaatatcaagtatataaagtaagaagaacatctatactaaaagaagaagaggtaagctacaaggctaaagaagctgtttgtaacgtttgtggtaatgagatttttgtgtcagacatatgtgagtataatttgatgaacttatataaagaatatagaaggaattataatattattagtacggatgaaatagaaaaagttaaaataaagtattcaattaattcagaagcactttcactaatattaggatggaatagtaagactatagaacgatatttagatggggatatgattggagtctccaatagtgatttattaagaaaagtatatgaaaataccagttattattctatcatattgcaaaataataaggaaagaataaatccagcagattacaataaaagtagacaagctattagatatattttagatcaagatgagacagaagaaaaaatcgacgcagtaataaaatatttgttgataagatgtgaagatttcacagctttatcaatccaaaaacttctatattatgtacaagcatttcattatgtctttactggtaattttatgtttgaagaagattgcgaagcttggaaggatggtccgttttatccaagtttatatgaaagatatgaacaatttggatatgaaaaagttaataaagatataatggctaatgataagttaaggttggagaattttgaacggaatattgtagaaagtataataaaattttatggttgttatagtgggaaaatattaaaggagatgactaaaagcgaagctccttggatattaacaagaactaattctattaatggaaagaatatcaaatatggtgaatttaatactgtgattgaaaaaagtttgatccaagagtattttgatagtattaaggaaaaatataatattagtagtttattagatatacaaaattatagtagagattcattcgataagatatctatttaatatgaagttaggaaagaggtaaattatgaaaactacattattacttattagacatggcgaaacagaatggaatgctttaggaaaatttcaagggtgtacagatatagagttgtcagaggaaggagtaaaacaagcgcaaatattaaaaaatagacttaatgaagaatttgattggatatatgctagtccgttaagtagagcttttaaaacagcaaatatattagcatcaattacgaataaagaagttataatagagcctgagataagagaaattaattttggtgaatgggaaggattaactgttaagcaaattagtgaaaaatatcctgatgtttttaaagcttggagaactgataaaaaagaaagttatatttgcggtggagattctagtatacgtaatgcggtaggtagagctaagaagtgtattctagaaatagtatctaaacataaaggtgagaagatagtaattgttgctcatggaggaataataaaagctggacttataggaatatttgactgggatatgacaatgtatcataaagtagcacttggcaatacttgtattaataaaataactttcaatgatgatttaatgccaatgttagttagtttaaatgatacaactcatttagattaaattacgaaagttatatgaattaattaaaaaaatgcaattctataaaaggtatcaaaatatactaaatgttaaacataaaataattattctaaataaatagataagatttattttaccaatgaagtttataaaattatcgtaaatgtattttacgatgattcataaggagtaaaaaagaatgatatacatgatgataagtattatattgattttatattctggaataaattattacattagcatatggttttggaaaaatttatgcagtatgatccctttttttaatagtgaaatatactttagcttcttttttattatatttataataagcttagttggagttatatggaatcgccatatacctaagtttctccatgatggaatttacttgatagcatcttattggcttgctgttatattatactttgcaatatttattggcatgattgagtgcttttttattttaggcaagactttacagtttatacctagcgatattaaacttaatgcaaatgttttattttatattgctttgataattctttttactgtaatgattataattctatacggaacgataaatgctaaaaacgcaacaattacaccatataatatagatttacctagaaaggcaggaaagataagtaaattgcaaatagcgtttttatcagatattcatcttggtaatttaatggataaaagaatagataaactaatagataaaattaattctatacaaccagatattgttttaattgcaggagatataattgattctaatagagatatgataaattatgatttttctaagatgcaaagtaattttaaaaaaataaaaagtaaatatgggatttatgcatgtttggggaatcatgactatgatcataaaggtgattcatcaaatagaataaataatttcaaaaaagtaggagttaatatattacgagatagttatgtaaaaattgatgatagtttttatgttatagggcgtgaagatatctcttatgaaagaataagcgggataagaagaaaaaaactatcagaaactgtaaatgaaattagtggagaattacctataatagtgcttgatcatcagcccaataacctaaatgaacctgtgagtgaaggaattgatttacaattatctggtcacacacataaaggacagttttttccttttaatttaataacgaaaagagtatttaaaattgattatggatatctaaaaatggataaatttcaaataatagtttcatgtggcacaagaacgtggggaccgcctataaggattgggagtaaatgtgagatagtaaatataaatgtaacatttaagtaaaggattatttttagtgtctacaagcaattaaatagataaactatcatgaatcaaaaatgaacaatatataaacataaaaaaatgaatggaatatatgtcctaaaaatatacagtgtaataaaattgaacattttatttataaattgtatttttttgatacagtaaatttgtgttagaaaaactacattgttaataattagattataaaatttcaataaatggagaaataagtctactaatatattttgaaaaattcacgtagattgatgaattagaaccttgtatttacagggaaatatatccttatttgtattagtatgaaataaaaattatgcgataaattataccagaatattacataaacctatataataaattgataaaataataacatttggcataaatattgctttacataattaatgtggttaaaagcaaataaatatgacagatgaattttaggaggtataaatttatggcacgttttactttacctagggacttatatcatggagaaggggcgcttgaagtacttaaaactttaaaaggcaaaaaagcttttgtagttgttggtggaggatcaatgaaaagatttggttttcttaaacaagttgaagattatttaacagaagcaggaatggaagtagagctatttgaaggagtagaaccagatccatcagtagaaacagtaatgaagggtgccgaagcaatgagaaacttcgaacctgattggatagttgctatgggtggaggatcgccaatagatgctgcaaaagctatgtggatattctatgaatacccagaatttacttttgaacaagcggttgttccatttggtttaccagagcttagacaaaaagctaaatttgtagctattccatcaacaagtggtacagctacagaagttacagcattctcagttataacaaattacacagaaaagattaaatatcctttagctgactttaacataactccagatatagcaatagttgatccagtattagctcaaaccatgccaaaaacattaacagctcatactggaatggatgcactaactcatgctatagaagcatatactgcatcgcttagatcaaacttttctgatcctttagcaattaaagcattgcagatggtacaagaaaatttactcaagtcttttgaaggagacaaggaagctagaaacttaatgcatgaagctcaatgtttagcaggaatggcattttctaatgcattacttggaatagttcattcaatggctcataaggttggtgctgtattccatattcctcatggatgtgcgaatgctatattcttaccatatgtaatacaatataatagaactaaatgcgaagatagatatgctgatattgctagagcattaaaattagaaggaaatacagattcagaattaactgattcattaattggaatgattaataaaatgaatagtgatttaaatattcctcattcaatgaaagaatatggggttacagaggatgattttaaggcaaatctttcatttattgctcataatgcagtgttagatgcatgtacaggatcaaatcctagagaaatagatgatgctacaatggaaaaattatttgaatgcacatattatgggacaaaggttgaactatagtacttagatgtataaatttaataacataagaataaaataatataattgtataaatcaatgtttttgattttcataataaaaagctctcttttgagggcttttttattatgaaaaaattatgggaaaattataatatttattgttattttttatttaaatgataaaattactttaatattaagaaaataataattgctatgagatgaatgaaagtcacataatgtaatttggtgtaataaataaaagagtgtgattaactgtttttagtaaatattatagtagtttgcagttaacattacaaaaggccggttcaaactttacagttttaattggtctattattatatttgggtaggagtaaatattaaataattaaaagattaaacgattaaattaagttttcaatgcttaaagggggataaaatatgattaataatttaaaagttaaacagaagattttcttattttcggggataatgattttactgattatttttatggggggaattggatattattataatttacaatcaaattataatgtaacatctatgtataaagatagattgcttcctgtacagtggttaaatgataatagaaaccaatcaagggcaatagaggcagatacatataatattattttgaatgtaaaagatactgaagaacaaaataagaaattaaatgatattaaagatagagtaaaggcatatgataataactggcaggcttataaagggaatgaggttgatcaattcgaattagaaattatacctttagttgagaatgatcttaaagaatatagagcagcaagagatgaaattataaagttagccatggatgggaagcaagaagaggctttagaaaaatataaatcaataacagggaaagtagatgaatttcaaaaaaacttaaagactttggcgatatataatgctgataaagcacaagaaataaatgttcaaaataacaatagttttagttattctagaaagatttttataatactaggttttttatcagtagtgatagcagctactttatcagttattatatctaaaacaattgctaacccattgaaattatcagtagagtgcattagagttttagctaagagagattttacagtatcagttcctgaactgcttttaaaacgaaaagatgaaattggagatctagctaattcaatatttttaatgaaaaatgatattagtattttagtaaaggagataatggaaaaggttttgtggtagtagcagaagaagttaggaagttagcggaagaggcatctcaggctgttactattataaaagatacaatagtaaaagtacaagctgcgtttagaaatttttctgataataacgtagaagtattagattttataaaagaagatgtaaattctaaatttgaggatatgaagaatatggggaatcaatattatgatgatgcagaatttgtagcaaatatgtcagaggaacttacagcaacaattcatgaaataactaatgcagtacaaaatacagctgaaattgcacagaaatcatctgaaaacgctgaaacaataaaagatagtgtaagcgaaacaacaattgagatagagcagcaggctctgctagcagaaaagttaaatgaagtggtgaacaaatttaagatataagtaattatatataagtagatctctttaaaattatagtatttaaagaaaaaaagatagcattttcaagatgaggtgctatctttttttgtgaattattttttatttaatgagaaatcttcctcgcataaatatattggtataagttcataggtaaatctctaataataatatttatttaaaatgtatataatttgtgattggaatgtaacaaaactgtgacaattattttctagaatgtaaatatagatttaaaagagtttataactcaacatttaatttataaaagatatttgaggtgataaatatgaatgataaaacagtttattctgttatagtacctttatataatgaggaacttgttataaatcaaagttataaaagacttaaagaagttatggattctacaactgaaagttacgaaattgtatttgtgaatgatggaagtaaagatagaacaagagaaataacagaagaaatatgtagcagagatgagaatataaaactcattaatttttcaagaaattttggtcaccaagcggctataactgcaggtatggatctagcattaggagatgcaattattgtaatagatgctgatctccaagatccaccagaagtaatgcttaaaatgattgaaaaatggaaagaaggttatgaagttgtctatggaaagagagtaaagagagaaggtgaaaccttttttaaaaaatttacggcaagagtttattatagattattaagaagtatgacaacagttgacgttccagtagatgcaggagatttcaggcttatagataggaaggtgtgtaatacactaatagctttacctgaaaggaacagatatgtaagagggcttgtaagttgggttggctataagcaaacttatgttgagtttataagacaggaaagatttgcaggagaaactaaatatcctttaaaaaagatgcttaagttggcatgtgatggtataacagcactatcatataaaccacttattattgcgggccattttgggattctagctttgctggttggaatgattttaatgtttgttgatattatgaaagctataattaataaaagcagcttgttgaattttactatgatgataggaattaacatgatgatgtttggagtagttttaggttgtattgggataatgggtcagtatattggaagaatattcgatgaaagcaaaggtagaccaatttatataatttctagtacaacaaattataatagatcaagtaaaaaatataatattattgatctagataaaaagactttatagagggggaacgaatttgaagaaactaaaattaactaaagagaatataagtatatctttaattttaatattatctgcggtattgaattttgctaatataggaattgaaggatatggtaatagctactatgctgctggagtaaagagcatgactatgaatcttaaaaatttcctttttgtatcctttgatccagggagttttgttacaattgataaaccgccaatgggattttggatacaggccttatttgctaagatacttggatttaacggatggagtatattgttaccacaagcattagctggagtaatttcagtttatcttatatattttatagtgaaaagatcttttggaagtgccgctggacttatttcaggattatgtctctcagtaactccagtttttgtagcagcaagtagaaacaatacaatagataacttgcttgttctaacactgctctttgcatgtttagctcttacactagccgctgaaaaaggaaaagctaaatatctttatctaagtttaatacttgtcggaattggttttaatataaaaatgctggaagcatatatgattgggccagcaatttatataacatatcttctttcttcatctataacattaaaaaagagaatagttcatattgttataggcacatttgttcttatgtcagtatcattatcttgggctttaattgtagatttagttccagcacaaaatagaccttatattggtagtagtacagataatagtgttatggaacttatagttggtcacaatggattagaaagacttggaattggcagtaaatcaaataaaggatttaatgctagcaataataaaaaagatgatagacaaattcaaaataatactgaagtaattaatgatcagaatcaacaagtgaataaagaaaattacaatggaagcactaatagaatggtaagtggagcagaaaatagagatggacaaggtgacggaagtatgcagaaagcacctaatgaaggaatgccaggaggcctaggaggacaaggtggacttcaaggtacctttggaggacagacaaaagcaggaatagcaagattattttctaaaaatagtttatctgatcaaataatttggtttttaccacttgcgttgttaggttttgtagctggtgctataaaagaaaaactaagattaaagttagataataaaagaaaaatatcactagcattatggattttatggttggtacctgaattcatatatttcagttacacaacaggtttattccatccatattatttaacaatgatggcacctccggctgcagcattagctggaataggaatagtaacaatgtggaaactatataatgaaaaaaaatgggcgtcatggttattaccaatatcattaattatagaaggtcttgttaatatgatgatgttatcttatttttcaaataatctatcagatagtataagaaaaataattttaatagccttgttattgtgttttttaacttcatcaatattagcaatattaaatttattgagctttattagaagaaaaaataatactaatttaagtgataataaggacatacatttgaaaaaaatattgctaggaatttctatagtcagtattttaactgtaccatttattggatcaagtgcagcaattactcatagtgtaaatagtactattcctactgctggattggaacttctttcaaacagtgaaagaggcggagcaagttttggtaaggaaagaagtgacaatggtaaaaattcgaagttacttgatttcttaaaaagtaatataacaactgaaaaatattcacttgtcgtaccatcatcacaaagcgctgatagtataataatccaaactggtgaatcagtaatggcacttggtggattttcaggatctgataagattctttctttagatgaatttaaagagatggttaagaatggagaagtgagatatgtacttactggtggcatgggcagaggcgaaagtagtgaaattctaaaatgggttgctgaaaatggaacattagttccggaaagtcaatataaggatgttgtatcaggtaatgaaccaaatattaaagacagtaacgatataaaaaataattcaaaagatgacaatcagaatgtaaattcaataagtcagaatatgggaggcctaggaggaaataatcaggaacaattatatgatttaaaggatgaagcaaatattttaaaataagttttttacaataaaaagggcatgtattagtgcaagttattaagatttagctgcataaagactaaagagtttaactatttagtagttttagaactaattcttatagtttaatatttgcaagaacaagcccttttttagtagaataaattcttaaaattttaaagaaaatgattaatatatattccaataataaatctaaaattaaaattctcgcaaagcaaataatcgattaaggctagaatatagaaacttaattgcaacatatatttatatattgtgaaaggaaacaatagtgatgaatgaagtaaactttaagaagtatatatttagaataggtttgatttttatattattagtatcaatgttttctagtatttatgcggtaagaaactataaaagtattaatgttatggaacaaagtggtggattaaaaaaaatattaaatataagagatggcgaaaatttaccagataatataccttcattaaacaatagtggatctaatttagaaaataatgagataaaaagtgataatagccaatatggtccgaatggaataggttcacgaaatgctgattctattgagaaaggaatgaatgataaatcacagcaagatggaaatgtagggataaatgggggtcgtgatactaaatttggatctaatagtaaacaaagaggaaacaataaaaatgctaagcaaggggaggtaaatggcaatattcaaagagggggagtggatgatagatatcttttaagtatcactatatattcagtattatttttaattggatcatgtagcgcttactgtttaattaaacgaaaaaatataaaatttaattataaagatgaaaaattcatgataattatattaatatttacaggaatttttctgagaatctcagcttctacacttgtaaatggacataatgatattaatttatttaaaaattgggcagaaactgcggcaaatggtttttcacaattttatgctaatgctagacaagccgattatccacctgtatatatatacatattaggttgcataggaagaattgcaaatatacaagtgtttaattcgtattatatattattacttaaaattccatctataatagcagatgttgcgacagcttattttatatatagaattgggaaaaggtttttaaatatagtaactagtatttttttagctatattttacatctttaatccagtaatttttatagattccacattttggggacaagttgattctttatttacattacttattgttatttcgatatatctgttatatgaaaaaaaatatgtattttcatcagtactgtttgcattatctgtacttatgaaaccacagggaattatatttcttccagtacttttttttgaattagttagacaaagaaaaattagaaattttatatatgctgcagtttcagcagtagcaactataattgtaattataattcctttttcattaaacgaacaaagtccaatttggatttttaatctttacttaaagacaatatcagaatatccatatgcttctgtaaatgcgttcaatttttttggtttagtgggagcaaattataaaaatggtaatactacattttttatatttagctatcatacaattggaattatgtttataattctaacaactttaattggatggattttatatataaaagggaatgatagaaagtatatttcggcagtgtccttacttcaaattgcaggaatatttacgttttcggttggaatgcacgaaagatatttatttccagcggtagcattatcaattttagcatttatatattcaaaagacaggagattttttataatggctatcgggtttagtattactagctatatcaacatatccacggttttattcaaaacaaacacatcagtttttgaggttttattgaaagtaacttcattatttaatgtaatattagttttatatttagtaaaagttattatagataacactgttaaaaaattttctttaaaaattgataataaggagagtgaattgttatgaacgtaagaaaagctgtaatacctgcagctggccttggaactaggtttttgccagcaactaaagctcaaccaaaagaaatgttacctatagtagataaacctactatccaatatatagtagaagaagccgttgaatctggcattgaggaaatacttataataacagggagaaataaacgggctatagaagatcattttgataaatctgtagagcttgaagatgagcttgagaacagtaaaaaagacgagttgcttaagatggtacaaagtatatctaatatggtagatatttactatacacgtcaaaaagagcccaaaggacttggagatgcaataagtcatgctaaaaattttgttggaaatgaaccttttgcagtaatgcttggtgatgatatagttgataatgaagttccatgcttaaaacaattgataaattgctacgataaatataagacttcagtattaggagttcaagaaatctcagaatgtaatataacgaaatatggaataataaaagggatagagattgatgaaggactttataaggttagtgatatggtggaaaagcctaaaattgaagaggcaccatctaacatagctattttaggtagatatataataacgccagatatatttgatatacttgagagtaccaaaccaggaaaatcaggagaaattcaattgacagatgcgctaaaagaattaacaagacaagaagcagtatatgcttattgttttgaaggaaaaaggtatgatgttggtgataagttaggataccttcaagctaatatagaatttactttaaaacgcgacgatttaagggatgattttataacttacttgtcagatttaagagacagaagtgctaatctagatttgattcattaaaacgtaatacattgtctatatgatgcaaactttatataattttctccgtttgtataaaagcattttataaataaatgaatatatcaatagttaggaaaaacaaatttatagtatgagtatagttaattaatgttgggtatattagtaacgtaagataaaaagtaataaaagtaggagaaatatgagtagttcaactatgactattgcgactaaaaaaaagttagaacataaggatcagaatgctataataacgaattcaacatctgaaactattattgtatatggaccaagaagagaaacagatggaggaaactatgataattcgtggtatgttctccactcaggagaaactattcctagtgattggcaatgtgacggaatttttattcctaaggatagaaaatttatgcaaatgagcgatgaaactatacagggtccagtagctgtaaagtttggaagcttgatgccagttacaataatacaggatggagaagtatatatagaaaaaggtagtcacaatgaaggagtatttcataaatctgaaatagattgggatgtaccagactttgatgcggagtattgccaaaatataagcatggcagcatatcaaatccaacccaataagcggttttaaatctttcttaaaaacaaaaatccatggattactttttagtaatacgtggattttttaaataaacattagataatataaaattaatatttaaagtcttgcaaaaaacaaatatttgcgaatcattaatataaatatataagggcaaaggagtgaaaaaaatgtcaaaagctttatttgtaaatatgttaggtcacggacatgttaatccaactataggaatagttagggagctcataaatagaggagaagatgttacatatatagcaggagaagagtttagagataaaatagaaaaaacaggtgctaagtttattgggcataaaaatttatttgatttatctagtttaattacgagtagtttaaatttagaaactaatgaaaaactattgaatgcccttaatacttttaaagaaataatcgaagagatcttcaaattagataaaaaatttgattatattatttacgattcttcgtttgtattaggtgaagaagtgggaagagtattaaatataccaacaatttcttctagtagcatttttgcaataaatgaaaaaataataaaaagtttgttagatctaccaatctcacaagaatttaagttaaagatggaaggagctaaaccaaagattaaagaaattctaagcagtcataattatgtggactttgtaaatgaattacaagagaagtataatataaagtttcctagtatggtagatagatctggaaagaaaggaatgcttaatattgtatatacatctaagtactttcaaccatatagcgaaagttttgatgaaagttataaatttattgggtcatcagtaatagatagaaaagaaagtatcgactttgatttatcaaataatgaggataagaaggtaatttatatatcgctaggaactatattcaataattctattgaattctatgagtgttgctttaaagctttttgcaatatgaatgtaaaagttattatgtctgtaggcagaaaaattgatataagcatatttaaaaatatcccatcaaactttatagttcgtaactatgtaccacaattagaagtattaaaatatgcagatgtatttatcactcatggtggtatgaatagtacaaatgaaggtttatactttaacataccgttaattttaatacctcaatcggttgatcaaccttttgtggctaatagggtggctgaacttggcgcaggaattgtcatagaaaaaaatagagttacaccggaagtactaaataaatgtgtagctgaaatactatcagatgataactttaagattaacagtgagaagataggtgaatccttaagggaatcaggaggatataaagttggagttgatgaaataataaagctaaaagattctatgaaatagtatttagctattgataagccaaatttaattagcttagatttattgtatataaacataaggtgctagaatatcgcaaattcatttgaattatgcgatatttattttaaaaatttataatttatatggaagaaattcgcatcaaatgaaatataatattataatttatgatagtatatttattataatatttcaaaaagaaataaagctatatataattgattatcaactttatattaattaaataggagatgcaatatggaattaagagatatatacaataataaaggatataaaactggagtaagaaaagaacggtccgaaaagttagaagatggtgaatattatttagcaactgaagtgtggataattaataacagcagcaaaatattaattcaacaaaggtcaagtaacaaggatgtacttcctaatatgtgggggctaactacaggatgtatggttagtggagagaacacagcggaaggggctttaagagaagttaaggaagagattggattatctattgaaaaagatgaattaaattttattcgtagaatatttcgcgaaaattctatttgggatatatattttgtatataagaatgttgaattatcgaaattaatccttcaaaaggaagaggttagtaacgtgaaatttgtatctatagaagaatttaataatatgcttttatctggagaattatttgaatatccagaaatttatgatatgctatcgctagttaaggataaagttagtgaatattagagacagttagttatattaaataagacaagaaaatttataatgcatatcttaatatttgtttattttaagatataagaatgatctgtgacatgtttgtaacaaaaattagctacaataagaatgattgatatttttgtggagggatataatgaaggggaaaaggatattagttgttgatgatgaaccattaataagaaaactcgtaacagattttttaaaaaaacaaggatatgtaacaattgaggctgatgatggaaagaaagctatgaatttgttttctagtgaggaaaatatagatttaataattcttgatgtaatgctgccagaatatgatgggtttactgtatgcagagagataagaaagaaatctaaagttccgattattatgctaactgcaagaggtgaggaatttgatgaagtttttggattagatattggagctgatgaatatatatcaaaaccttttagtcctaatatactaatcgcgagagttaatgctgttctgagaagggcaaattcagaagataaaggtaaagaactcaaagattttaatggattgacaatagaccatagtgctcatcaagtagttatagatggagaagttgttgatttaagtcctaaggaatatgaactattgatttatctttctgaaaattatggaaaagcattaagtagagaacaaatattagataaggtatggggatacgattattatggagatttaaggacagtggatacacatataaatagattaagaataaagttagatagaaaaagtgattatatacaaacagtacgtggttacggctatagatttgaggaataggtatgagtaagtcagtaagatcaaaactttttttatctataactttattgctagttttttttatctctgctttatgggtattaaataacttatatcttcagcaatactatattaagaataaagaaaatatgcttgaaaataatgcaaagcatttagttgatatgtacaccggagatccaaatgacattcaagatgaattggataggaccgctaatatagtaggtggtagtattgatattagagataaagatggtaagctaatatataaatcttcaagacgactgccaaatgaaaaaaatatagttgataatatgggaaataaatttaaacctaatatggagccaccaccagattctgatgttcaaaatgataagattaacaatacatatagtgagggcaagtatacatttgaaaatagaagagatgttcaacttaaaatagactttctaactcttgtaaccaaaataagtaatggtgacatccttgctataagagttccattagtctcaataagtgaaagtgttgatattgcaaatagatttatattaattattggaggagtaattatacttttagggagcttatgggcattttggttttcaaaaagatttacaaaaccaatactagaattaaacagcatagcgcagaatatgtctaaattcaattttagtaaaaaatgcagcataaatggaaaagatgaaatcgggcagcttggacaaagcgttaattatctatctggagagctaagtcgggcaattacggaattgaatataaagaataagaaattagaagaagatatagagaaggaaagaaaaatagatgaaatgagaaaagaatttatctcaagtgtttctcatgagttaagaactccgctatcagtaatacaaggctatgcggaaggtcttgtaagcaatgttacagaaagcgatgaagataggaaattttactgtgatgttattatgaatgaaactgataaaatgaacaaattagtaagagatttattaaacttatcacaaattgaatctggttattttcatatagaaaaaacagaatttaatttagtatcactaatagaatatgtacttaatagatataaatcaactttcgaagaaaaaagcatagaaatcagatttgaacccggagaaagcgtgattgtatatggagatatgactcgtatagagcaaatacttacaaactacattaataatgcaattaatcatgtagacaataataagattattgggataactaagattagtgttaaagataaaataagaataaatgtatttaatacaggaaagcatataccagatgaatatttggataagatatggaatagtttttataaagtagataaagctaggacaagatcttatgggggttatggcttaggcttatctatagtaaaggcaatagcagatcttcatagtaatgcttatggagtggaaaacactgaaggtggagttaacttttggtttgaaattgataagatagatttaaattcggcagaaaattaaaaataaaaatacaaagggagttgtggatatcagattaaaatctgttagcggcagctccctaatttatatataagttttcaataagataatttattcattataaaattatttagtttatatagattaatagcctaagataagtttcaatgaactaaattttttagaaaatacatattataaactatttttaatttttattttgttcgaaataccaatgcttgtaccagttaaaacaccacataacatagagtaaacaattgtaggaatttcaatcacataaataccaatagcggcaataaataataaagaaatcgctaaaaagagtatacaaatagattgtttccatttttgttgaactttaatttttgaatttattatatctgtaaatttgtatttttcatcgaactttaaatagatagcttgactcagtattagtaagaataccataggcaataatttataaagtaaatctatcatattattttatcatcctccacgaaaataatttagttatttaggtatttaagctctaataatagatatttttatacctaattataatatgggagaaataaatagacaaatagttctttattacattagagtaattatattc

SEQ ID NO: 18 - DNA, 83260 bp, Clostridium beijerinckii
cagcagaaaacaaattaaatagagaattttatgcaaagaaaccaaatgaaaaatggctaacagctgttactgaatttaaactacttaatggtaaaaaggcttatcttagcgcaatatttgatttagctgataagatcattgtttcttatgttgttggtcactcaaataacaatcagcttgtttttgatacatttgatttagcagtaagtgctaatccgactgcaaagccactgtttcatagtgacagaggatttcagtatactaataggactttcaaagctaaacttgataaaatcaaagcaactcaaagcatgtcacgtgtcagcagatgtatcgacaacggaccaatggaaggtttttggggaactctaaaatgtgagatgtactatttgcaaaaattttatacatatgaagaattgagacaagcaattgatgaatacatagttttctataatacaaaaagactacagaaaaacttaaaaggtctgactccaattgaatatcgaaatcagaccttggtttcataattttttgttttttcatctgtctacttgacagggggcagttcaattttagattctcgtgtttttttatgatatagttaataatattacctttaaaataatcttttgctactaattaaattgattcttttctctatttacatctcttaataaaattacttttacttaatattattggagttacaggttcaccataaaaatcttctgcctctccaattactttgcattcaaatttcattaacatatttagagttgcatctcttgcttcaatgtaaatttcgtcagtataagaattaaaaatttcttttaatgaaactatagcaagcttctgaccaagtcccatgcctctcaatcttttatcaacagcaaatcttccccaatgccatttatctttttctttccatgctgatactactccaataatatcttctcctactcttgcgcaccaccaaattggttttaaattttcactcactggaaccaattcttctggaatgctttgctcattagtaaatacttctgttgctaattcaattgcttcttttatataattttcagaaattctttctattaatattctagaatcattcttcttgagattgttttttaatgcaagaacgcgaaataatctaaatgctcccacaatattttctgtatcttcactatcccctaaatttaaaatttcattaataaatttatttgcttcatggtctccactatttatagccttaatacctaatggaagaatacaaatatctttcattcttttatcagcttctgatttcttcagctccaaataatttttagcctccaaattattaagtatcctgcttaacgaagccttatcaatacctaaatttattagcaattcattaaaaggagtttttccattttgttttatgtaatttaatatatgagcttgagccagtgttaattcagaatttaggcaattgtgattaagcagccctaattctctcacaattaatcttacctcttttctaattatctcttcgtttctcatattcgcctccaaattaattgacattatcaacaattataactcactttcgtttttattacaagttgacttcataaatcaatttataatttacagagcttttatgactattacaggaaagaaataacgtgctacattattctgaattcttatgctaaaaatatggcataattatgattccattaagagcaataagcttaatgatgaatattatttattctaagataagctgctttaatttattctttgtttcatcatctataggcatttgaatggtgatacttgctccctctatttctgtggacctaaatgaaatataacttaggtataaatcccctactaaaggatgatgtaaaagtttttgaccttctggtgttcccataataccttgattattccaccatttattaaatagaggatctttttcatttaattcatttataattgcatttattgtattatcattctcataataaccgtaatttgctctcaattgttcaacacgtaatttagaatgcccttcccaattatctaacagttcttttagataatcatcattaaaagctctccaaactgagtttctttctttttcatccatttcttcataattaccataaacttttagtgccgccatattccatccaatcattgttaatttactatcagtaacataagctatgcttggattttgattgtctaagaatttttgtaatgtattagaaatagtaacagctgcaaagtcttctacaggtaatttcttatctgataaattaaataaatatcttttttcttcattatttaattgcaaaaccctactcaaggaaagcaacacatctattgatggattaacatcttgtccttgttcaatacgcacataccagtcaatacttactccggctaaatcagcgacttcctctctctttaatcctttcacccttcttcttttatcaaatttgagtccaaattgttctggtcttaatgtggatcttttcttttttaaaaataatccaagttctttgtttttagatatcattattacctccccatctctattcatataaactttattattatatatgttgtaattcacaatgcacatttcacaatcgcagctaaaattcttgcaatacttttagaattatgattaaggtctgctaaacatagtattattaatcatatgataacttagcttctatttaaaataatactttcattatacactatcttcataagctatagagaggaagatgtgaaaatgaatagagctttagaaaacaaaagtttttcaaacaaattattatttattttatcaattatttgtgcaattatggtagctaatttgtactacgatcaagttttattaaccaatatttccaatgatttttttatacctgcttcagcatctggtaagcttgtaacagctatacagataggctatacaatgggattgttgttcattgttccactaggagacaggtatagtagaaaactattaatcattttaagtattatttgttcagctatattattatatttaatgactttagtctctacctttaatttaatagtaattataggcttttttatggggatttcaagtgtttcagcacagcttataatcccatttgtttcttcaaatatttcgtcagaaaaacgtggtataattgttggtcacttattaaccggagtatttcttggagttttactcggtagagttctaggtggagttctaggccaactaattggctggagaggagttcatgaatttgcagcaatagttttattaatttttgcagtatacttattttattctctcccaaatgataatgtaaaaaaggaaagttcatataaaaatatcatactatctttacctccattattaaaaaaagaaaaagtattaagagaaacaatagtttttggtgctgctgccttttgtgcctttaatattttttgggtttcattatcctttattttagaaggttctccttatagttatggaagtgcaatagttggactctttggctttttaggtatagcaggtgcgttagccgctggattttcgggaaaacttacaaatagtaaaaaagtaagcttatggaacctttttgctttagctataatgtttgtttcttttttaatcttaggtgtaggctggtccaaacttataattataattctcgtaacctttactttagatgttggttcaagaatgaatatgtctctaaatcaaggaaggatttataagcttagtctccaaaatcatagcagattaaattcactttacatggttgggtattacttaggtgggtcccttggatcatggataagtacatctgtataccactcatttggtattattggaattacaattgcaagctgcagcgtacttttactagcgtgtgtttattatttaatcactaatgatcttttgaatagagaaaataatactaaatcctcaagtgcatttacctctaaaaatcaaccaactcatcagtaatttgtgaagtactttaagacataatcaaaaaaataacaaactcatattcctaaaaaattatttactgctaataatgataatactgctgtgattatttatcctatgataatttatcatctatttaaaagaattctttaattgtataatggattaaaaagaatttactttcattaattttatattgttaagcatattatagatatccaactttaaatttagacttgtgtgatgcttaccgaaatcataaatattttgattccgaaaagctatgaaaatatcgctgaaggttctaagcagcaggttgtatccactttagcatgctccaactttcagtttgacaagctaaagtggaacaacctacagctaagaacctttaacagctcattttcaaatgttttctccacaaatatatttatgatttctagtgaagatataaacttaaaattttagaagctttataaatatgttcatctaataaattgaattcttaaattggaaatctatatatatctttaatacgataatactattaaataaatcttattacttaaaggaatatgtttaaagtaaaggagaagataaaaatgaatttgataactgtaaatcaagataaatgtattaaatgtggtttgtgcgtaaatgagtgcccagaacgtgtattagaacttagtgaaaatggacctaaagaaatttgcggtgatgactgtatttcctgtggtcattgtgtagctatatgcccaatgaaagcaattgataatataaaaacaccattagccaatcaaatcagttcaaaaagatttccaaaactaagtcctgaggaggctgaaaactttcttcgttcaaggcgctcaatccgctcatataaagaaactcctgtgccaagagaaaaattaatagatcttgtgaatattgcacattttgctcctagtggacataatcttcaaggaatatcttatactatcattgatgatagaaagatacttgataaagctgttaaaattgtcatcgaagaatttgaaaaggataatgtatcgagtgaattcacaaagccataccgtgaaaaaggaattgatacaattttgcgtggagcatccagccttatcctagcaactgctaattcaaactttccacgaggaagagaaaattcaattctttcattaacatatttggagctatatgcgccaacactaggcttaggatcatgttgggctgggatgcttgaaagaattgctatgaaagataattctccattacttaaattatttaacatccctgaagataagaaaatcactggtgctattatggtgggatatcctaaatatacttatccaagattagttgataaagatccattagagtttacttttgtaaattagcattgctctataaaatcaagataaatatttgaatattttacattaaaacaacccactaaaatctactatctattttagtgggtttcatggtagaaagaaaaatgcaagacaaaatactctttgttgcataagttcaactaaattcaactgtgaatataaagctctatctgaaaagttttactttataaacatgatgacttctttagtcgatcagctcttcttcttaaatgtagatttcagtgctcttttcactacatcaacaaaacttaatgaataaaccatatgatttggatcaacataatttcgaacagtacgaagcactttctttgcttctttagaagaaaaagtatatgttccatttttcttcgttcgaattgcatatcgtggaatccattttcctttaaataatacagatgcaatcacatagtcaacttcttcccaaggaatttgaataaatttacgataatcacgagaattatagaactcaaaacctttgtcacctatcataatcttgccgtaatctgcaacgccagcaaaagatgttccatcaattgctagatcaacctttgtattgagtgactcaaccatcctatctacctcttttctacttatatacacatttatttttattatatattctttacatgtttttatcaattattccaaagtctattaaaagtaacacgattaatattgttaacaaaagcccaggctaaaaagcctaggctaagtaaaaaagtactacattaaaccgatcaagtggaaaacaataccaattatgaacaatccaagaattataagaattggagataccttcctcttaagtaaccacatacaaagaagtgtaattaataatcctacaaatccagggattaatgaatctaagttattttgtaatgttgtaatcttagtatcagttaatgacatacctgatgcttgttgtaatagagcttgcttaacaccttctgctccagcaggaagtttgctccaatcaataaatgcaccatcacttaatttaacagatgatactactggtgcaaatttaacagatacccatctgttaactaacgatcctaagatgaacataccaaggatagatgctccttttgtaatatcttgtagcatattacctgataaatcttcactaatacgagatcctgctttgtaaccaaactcttgtgtataccacataaatgccatacggatgatattccaagcgaagaagaagataattggtccaaggatgttaccacctagagcaagtgaagcagctaatgctcctaaaattggtcttacagtgaaccagaaaactggatctccgatacctgctaaaggtcccatcataccaatcttaacaccttgaatagttacatcgtcgattggtgcaccatttgcacgttcttcttctaaagctaatgttacaccaacaactggtgaagctacatatgggtgagtgttaaagaactctaagtgacgttctaatgctgcagctctctcttctttagtcttatataattttctgattgctggaatcattgcaaatgcccaaccaccattttgcattctttcatagttccaagaaccttgaaggaaaaatgaacggaaccaaacagaaatacggtctctttttgttaattttaattcttttgacattttcgtttcctctcccttcttagtatctatctattagatcccctaaaggatcaccagtatttgaacttccaccattacctgagccaccttgtttgctaagtgctaagtaaagaagtgctaaagctacacctattgcaccaagtccgataagtgtaatttgtgaaacagttgctaatacaaaaccaattgcaaagaatggccatacttcttttgtagccatcatgttgattaccattgcataaccaacagctacaaccattccaccaccaattgctaaaccgcctgttaaccaagtaggcatagcagcaagtaatgaactaataggaccagcaccgattgctaatactagtgcagctggaatcgcaatacgtataccttgtaaacaaatagcagcgatttgccacatatcaatagctctaagatttccttctttagcagcagcatccataaaatgtacgaacgctgtagcaagtgtacgacaaataattgttaataataatcctgcaactgctagaggaacagcaatagcaatcgctgaagcaactcctgcttcaccttgacctccaagaactaaaataattgcagatgcaacagcggctaatgctgcatcaggtgctacagcagcaccaatatttgcccaacctaaggctatcatttgaagagtaccacctaagattaagcatggtagtaaattacctgtaaccaagccaattaatgtacaagcaattatcggttggtgaaattggaattcatctaagataccttctacaccagctaaaaatgctattaaaatgactaatataatttgaactatatttaaagtcatggttattaatcctcctttttctctaaataattagattattttaatttttttaattcttcttgtgcttttttaagtatttcgtccatatttgcttttgaatcatttggtactttacgcacatcaaaagtaagtccagcttgtttaagcttattgaatatatcgatatcttcttgattgaaagctaaaactttgcttggttgaaccttacctggagaatgagccattgaaccaacattgaccgtctttagcggtattccgccttctacagctctaagcacatcttttggattttcaaaaagaagcattgcacgttggcctccaaaatgcttatcatcttttgcaagtttaatcatatgatcaactggaacaacatgagccttaacccccggaggagaagcttgcgtaatcaaattcttacgaagagtatctctagctacatcatctgacacgacaataattcgtgtgggatttacagtttttgtccaagcagttgctacttgaccatgaagtaaacgagagtcgatacgagctaaaacgtattcaaacgatccaggtgcacctgcattagattgccctgctcccgctcctgaagcattaccagtatctgctggttctaactcctcgggtttaactttaactccttctttacctgcatttaagatataagctgcaatttcatgagcagattccattgaaagacgtgcaccataagtttcaatcaacattggcaaattcaaaccagctacgattgcccatttgtctttatgttcttcaaatagcatattcgcttggttgaatggtgtaccaccccaaagatcaactaagaataaaacctcatcttggttgtcaaaggatgcgattgcatctttcatttttgctctaagatcatcaggtccttcgctaggcataagcgtaacagcttttacgttttcttgttctccgaaaatcatcgcaccagattgcatgatgcctttagcaaattctccatgactagcaagaataattcctaccatttttatacctcctattttttatttgttacaaaaacaaaaggcataagcatttggaaataaaacaatagtatatattcgtatattgccacaatatttgtacaccaaaattaaatcataaaaaaatatgataataccctataaaaactgtacaaaatatgtgtttttaacgaataaatattacttcattttacttctctatgcttatgcctgatcgaatcagtaacatgctagatattatttattattatttcattatagtctaccaaaagtccctctctaagaacctctctctaaactacgttttcatattaacacttttcttttagttatgcaatacattttttaatatttttaactaactttcataaaataatttttatactataaatttcccacttttataaaaaacatattctattcaaactcgctttatattagaaattccttaaccattttaaaaacatcaaaagaacaaaatgaaataatatattcaaattaacatacacactattcataaaggatgagagaagtccagataataattatttatttatattcaaactgtttatattattttttatgccaaatagaaacctaattctaggaattctataaactacttcagatataataattgttaccacaaaaggcaatatcaatacaaatatatagttgaaaattattggaagtttaataataataaatttatttcccacaaaataaaaacctacgaaaatccgaattccagattttcgtaggtttcatgttgatatggaagaactgcctttataatttccatcttaaacacacataaaattgcctaactaattagtgaatatactctagaccactcttacttttcttcgcatcctattgtacagtttatgtagaaacttttatattttttaatattttataaatgctctatttatagttattgctatacttagtaataacttctttaagtttcataacttcaattggtttactaatatagtcatccatgcctgtattaatacatatatctctatctcctcccattgcatatgctgtcattgcgattatagtaatatgtttaccagttaacttttctttttcccgaattatttttgtaagttcaattccgctcatatctggcatctgaatatccataagaattatatcaaaatcctcattttcaagtatattcaatgcctctaatccatttgaagctatttttattttccaccctgcaatattacataattgattcataaatcgctggctgatagtatcatcttcaacttgtaatatcctagtttctaaataagtcttgttatctatacatattttttgaatatttgatgattccctactatcaatagcaatatcaaacaaacaagtaaagtagaatgtacttcctttaccataatgactttcaacagatatttctccccccataagcttaacgatatttttagaaatggcaagccccagaccagtcccttggaatttttttgaagccgatatatctaactgcgtaaaataattaaataatctcggaatgtcttcttccttaattccaatccctgtatcttttacagaaaacattagcttcactttattctctttatcctcaactttatctacggatacttgaattttacctttttcagtaaacttaattgcatttcctattaaattgcttaaaacttgcattaatctacccttatctaatatgatttcattcggtaaattattgtcaacaataatctcaagcttcagtcctttattctccgctaaatatgtaaataaatttctactttcattcattaaattaaatatgtttatacgttctggctttagttcaatcttgcctacatccattactgagagatcaagtatatcattaataatctgaagaagatgttttgaagaagtttcaatcatttttactatgtcaatttgctcatctgtcaactttgaaaattccaataagctagtcattcccataatcccattcataggtgtccttatttcatgactcatatttgccaagaactgacttttagctgagtttgctctttctgcttcctcttttgcagctttaagcttagtctcagttaacttatgctcttcgatttcttcttctaacatacagtttgttttttcaaggtttccattaacctccaacagttgagaagtacgtttatcaacaagaacctcaagctcattattcaatgaaagaagttcttcatttgtatcaattaatttctcataaatctttgaattaaaaagcattattcctagaattataatgattgtttttgataaatctaagtagctttccatataattaggaaacataatatcttccacttccatataacccattaattcattatcaaaagttatcttaaaaataaatcctgctcctgaggaagtaagaaaataattttgcctaaattctgagttgtggatatcatatagttcacttttatacaacttctcttgatggaaaattatttctccttttttatgttcaattacaggaagaaatgcgagatgcttagcaccggtcaacatttcaaataaagtaaaaatattcttaatcaggtcttcacgttttaaaagtgttgcttttttttcaaggaaatcaaatacgagagcataatcagtgacctgcttgttttttaaatttaaaatatattctagtctattaactttccaatttttatatgaattatttatagtgcttgaaaagcaatccaaacctacatctataatttcatatttcattcctatatattctgaaaactctattaaataaggtaggatattgctatatacgccactgtcaataagaaccacctttttacagtattccgaaaaaaattcacgtgcagtttcttgattaaatccgtatatgtccataataatatgcttccatctttttagccaacctggtgtagtcaaataataccccattgaagaaaggtaatttattagatcacctccagccaataatgaaagacatgaattgaaaatactttcaccagcaagattctcatctcttccagaacccttctgagttggcagcaaaataactgagtcactgcaataacctgattcaataaggccatcatataatttctgtctttgacgcttgcaatttatacaatccattgaatagtatttaaattcaacatctccatttttcaaagcgcctcgcatactctccacttcagctttgaaactttcacaaattaagatacatagttcatcgttcatataatcacctccaatttaacggatatcttccccacttatttacactctctgatatttcatgaagaatatcctcactaacctgataaggaatgtctcctaaactgtcgcacaagatgaaaccaccaccaactccagctttttttatcgcttccttaacattatattcagcatcagatctagtccatctgcacatttcaataccatttagatttccaagcaatgtagctctttgaccaacttttttctttatttcagctagatcatcactatggcttaccagaatggctttaattccagattcaaggatttcctcgagtattgaggccgagcttgccgaggacgtagcaatggctacatcacttttaatagtgggtattgttctctttgcagaaagaaatccagtctttaaatatatgcttttaggaataattgaagacacagacatagaatctatagtcgttataaaggatgcacctgccgccaattgcatattagcccattcagtgcaaaacctttcattgatttttataagatgctctaacaactctggtttttcataaataagttcaatatatttatcaaaacccatttgaagaataggaagtgaaaaaggtgataacacacccccagcaatagggacggacatccccacttcctccttcagtatggatattgtttcaagacaatttctaagaatttttgaatttttaacatctggtggttgtaattttaaaatatcgtcaaagttttttattattggttcaccagcattaggaggtcctgcttcattgaaaataacttcacttccaaaagctgcatactcatgagcagcagaataaaatggattcaaacaatcattgttgaattttttgagaagcatcatttgtccccttgctacattttcaggtttactaaaatagtttttaatagatacatctaaaaattttgcgcagtaatgtgtacacattaaaaacaatggaaccttgtctggttcatgcttactcatagttgtcaacactctttccatagaagtataccttttttccattaagaatcctccttcatccattgttctataataggaatattatcggctgcactttttcccattttatctgcacccacctcttcccaaagagtgctgtccattaaaaaaggtgcccccccaactaatattttaattgaaggatccttttcatgaagcatttgagatattttcttaatttttaaagcagatggatacattaatactgatatcataagtatttttatcctatcttcagtaactttctttattatctcctccagtcgacttatagaaccatagtctataaggtcaaaaccgcttgacctcacaacggcacttacgattttctttccgagagtgtgatagtcctcaagagtaactattgcgatcggctttgcattcttaattatgaagtttttttcctccaaaatagaacttgcaatttcctcacaaagcctgctgctcatatatatctgtgataaagctacttctcctctttcccacttttccccaatggaagtcaaggacttaactatatactcatcaataaaatcaatcccatttttttcagctaaaaaatgttgaagaattttattaacttctaacttatcgtaattaatcaaagccttttcaaacgcctcccaattcatcatttagctcccttctttattaagtaaactttttaatttcacttaatattttcttgttactttacaccatagttttatgttaagaaatatttatgtctaaataatttaaaatttttatatgaattttagtggattctccactcaattatgtaaagagtaattgaattattaataaaactattatactctttattattatattttaacattatttgcatataaattcctattaattacaacttaaattccttatccccactttttggtactatttaaatatcaacttaaatctcattagttatgagtaaaaattttattgaattcatcaatcaaattagttgcacaagaaactaatttatgttattgttatattagttgcaaaggaaactaatattcaaaggagagaacatttatggaaaaagatatacaaaaagataaggttctttggacaaaaaacttcgttattataaacataataaacctattaatattttttggatttcaaatgttattacctacacttccgctctatgctaaaaaactcggagggacaaactctatcattggattagtaactggagcatttgtagtatcttcagtaataattaggccaatctctggattacttcttgataagttaggccgacaaaaggtgtttttagttggattatttatttttattatatcagtattttcttattcaatagttccatttattagtgcaattattatgatacggtttatccatggctttggctggggggcagtaagtacagcttctaatacaattgcttcggataatatcccaaatgatcgttttggagaaggaatgggatattttagtctgacaagtagtttagctatggcagtagctcctacaattggactatttgtgatatcaaaatatagctttcaagctctatttttaacatctactatactagccgtgcttggaggtattattgcttttaaattagaatataaaaaaattgaaaataaagagcaaactaaaataaaagcttcattgtatgaaaaaatatctataaatccttctattatagtattttttgtaacaataacttatggtgcattaaccagtttcttacctctttatgcttcacaaaaaggcatagagaacattggaattttctttacagtctatgcaatatccttatttatatctagaccaatattcggtaaaataatagataaattaggttttgactatgcaattattccaggttttatatgtgtaattatatctatgttgctgttatctgagtcttcaaatattagcatgtttttaatcgccgcatttatttacggaataggctttggtgcaactcaatctactttacagacaatggccatggttggagttccaccttcacgtctaggtgctgccaatgctacatttttcactgcatttgattgtggtataggattaggcgcagtaattttaggagtagtttcatcaaacgttggatatgctcaaatgtatctgtgggcaagtggggctgctattatagcatttattctttatttcattattggcagaaagagaaaacctcaattacaagtaaaaaagtagtattttaccttaggattagtacgtaacacaaattctcaaaacgtatattaatcacatacaaagttagctctgcgttttatcaatggcagagttttctttttccaaataatataatctatattttaaaataccaattcataatttcaaaaaatatatatcctagtaaatcattgaaactataattatttatatatataatttaagatggttttatccgatagctagcatccgtagcactcccttttctttaagcgggagataacggctgcacgcttctggacaatgtgccccttgagggtacattgtgacccttgaggttataggttcaactaaattcagctggagttaaaactccacctgaaaagtttcactttataggaaactaatctaaaggagataagtaactatggaaaacattagtaaacttaatgcagcaatttatagaaatgctcaaagcataataaattcaaagcttatagatttaaatattagaagtggccaacatgattttttatatgtgatttcaaaaaatgaaggtataagtcagaaagagttaagtgagtttctgtatgtaggtaaatcaaccactgcaaaagcagtaaaaaatctagtagaaaatgattatgtaaaaagaattcaagatgaaaatgataagcgtatttataggttatatttaacggatgcaggaaaaaaagttatacctaaaatagatgcaacctttttagaattagttgctattttttctaaaaacttatctaagaaagaagaagaacaaacagtgattattctaaaaagaatcctacatacgatttctgaagaaaaaaataaaattaattctgatattgattaatttatagattgtttcatcttttacaaaatatataagattaagccgccagtatcaaaaaaacacgaccacctgcaaccagctatttaagccacatgcaaatggtcgtgggtttcataaataatatcgatgaacatttcacttggggagaattattttactataaaacttgttctgttctttcaattatatcatcttgagtttgtttcgataatacattaaagaaagcactatatcctgctactctaacaattaggtctctatgatcttctggatgtttttgcgcatcaagtaaagtatctcttgatactacattgtattgtacatgaaaaccttctaaacgattaaagaaagttctaattaataaaattaacttttctctatcactttccttagataacatttgtggtgttaccttttgatttaataatactccaccagtaatatcgtgtgttggtaattttgaaactgatttaaatactgctgtaggaccatttttatccattgcatgagatggtgaacacccttcagctaaaggctctccagcctttcttccatctggagttgccaaagttcctgctccttgtggtacattagctgaaattgaagaagttccagcataatagcatcctccaattggtcctctaccatatctagtatttttgtatttctttatctcatcaatatagatttcataagcttctcttaataataaatctatataatcatcgtcatttccatacttaggagcatcattaagtaatatatcttgaattcttttaccatcttctccttcaaaattattaagcaatgcatcccaaacttgtgctggtgtaaaactcttatcttcaaatacacattttttaattgctgcaagagaatctccaaggttagcgatacctacttgaagatcactaataaagtcatatacggctccaccttcttttaagtttaaacctctttcaatgcaatcatcagttaaagctgagcataatacatctgctgtaacttcttctattgctaagtctgcacaactatctattattacactatgtcttgtaaattcacgaattatcttatcccaggctttcataacctcatcaaaggttgtcatatccttaaagtgacctacaccctcgcaaagcttagttcctgactcgggatcaattccatcatttaaagctattaataatgatttagggaaatttaaaaagctcattccagtacatctataaccccatttacccggaaccgctacttcaacacatccaattgcactatagttataggcatctttttcatctacacctttttctatgaatgatggaataataacttcatcactattaaaggctggcattccgaatcctaatcttactacttctatgcattctttcataaaatcattagataaccctctataataacgtactgttaagttaggttgtggtaattttgtctgagcaacactctttagaattaagtagcttaatggatttactgcatcttttttatctacagtctggccaccaaccgtaacattttgatatagtggactacctgcgctaaaacgtgtatgtgaccagcttcttattttatttattgtaaatgtcttaagccataaatttgttaataattcagtagcactatcttcagtaatcttcccaagttttaaatctttttcatagaaaggatttaagtattgatccattcttccatatgaaagtgaatgtccgtttgattcaatttgcaaaactaagtgaattatccacaaagattgaactgcttcatggaaagtttctgctggataatatggaactttatttaatattcttgacatttcaagtaattcttcttttctatttacatcagattctttttcagctaattctaatgctaaatctgcataacgttttgcaaaagctgctactgcatcaagtacaattaaaattgctctataaaaataagacttatttagattcctatggtctgtaaggtctagttcctttaatttcttttctgttcgctctttataattaattaacccaagttttaatacagtttcataatttaccgctatatgagcatccccagaagtaatattaccctctgcttttataatccctagatcataaaaaattctactttcagcaggcatccctgcaagacctctgtcttttaaagttttatgctcccaaaaaggtgctatttctcttaaaacatccttactttcttcagtaatataaaatatatcacctgcacgtttttcaaattcatcaagttcatctataacccaatccattgcatattcaggaaaaataggagctgagcgatttgattccgcttgatttcctgcaattattgagttatcttcaataaatatagtcatatttttcagtatattttctaaacataacgctctacgtaataccattggcttatcagcgtgttctttgtaactttccgtagtaagtctagctctttctacactaaccatagattttgcatttaataattcttctctaaaattatgcattctatcagttaattctccaaaatgattcataaatattctcccctcattatcaatttcatattataataaactttttcactttcatttgaaactatttttattttctttcataattaaattatatacttcgattgcattttgtcaacgataatatttcattcgaaagtatctattttatacttgaatctttatataaataataatcttattaaatactttctcttagatgctctctaactaagtgttttgagtttaagtcgttacataaacaactatgatattctaagtaaatctagcacacaattcattatttataattcaaaccagatgtatagttcacttgacatttgatgtaaagcgtactatactttaattgtaaagcatactatactatttgaaaggtagtgataagttgcagactagaatacaagagttacgaaaagaaaagaagataactcaaggtgagcttgcagatgcagtaaatgtaacaagacagacaattatatcacttgaaaacggaagatataatgcttccttaatactggcacacaaaattgcacaattttttgagatttctattgaagagatatttatttttgataaggaggatgagaatttatgaaaggaattttagctggtaatacagccaaaactaatgaagaatataaaaatgttataaaatatcgcatgaagattattgttgtacttttgattatcggaatcattacagtagcagttggttttggtgcagaactttatatgaaaacctctgctagtgaaaatatccatgaagtattctctgctgcaggtatagaccttattataataagctcaatcctatggattaaaaataggcttttgctcaatgatgaaataaagctgaagaaaagccgtctaaataatacagatgaaagaattcatgaaattggaaataaatcatttaaattagcagccattgtaatgcttatagtgtcatacgcaactgcattaatcggaggtctttttgatccactactagctcaagttcttttatttataccttgcatttttttaattgcttatgtaatagcatttaaatactacaataataaaatgtgataactaaaacttacatggtgacttaccgaaatcacaaatattttgtaggtcatttatgtctaaaaatagttacaagccttattaaaaagccttttgatgtctgacttatttttccaaattatttataattttaaatatatgccatacaagaaagagaaggtgctcttttgcgtagcgttgcatcgaaaaaatgattgtaggcatttcttcagtaaaagttgttccaaccttgcctgtcacgagctggctcgggatcatgcagggatgggtgcaacctttactggtagaaatccacaattacttttttagcaaccgagtaacagagctccttctctttcggcaagttatcgcatagctttaaatctcaattggtttatcttattctacacttaccatttgaacatccactttttctttctttaaactttctaaaacatcttcaggaatattagtatctgtaaataaatagcttatctcttctgctttaaattgagataccactccacgctcagaaaactttgatgattctgttaatattataattttattagaactttcagccatggcttttaccgtttctgtacgcattaagttttttcctgtaaaccctattttagaattataaccatcagttccgataaacaatttatctacaaaaaaatctttaacgcactttcttgttagagggcccactgatacctgagattccggctgataatctcctccaagcaacactactttcgcatttccttctctaatatagtttgcaataaatgtagaattagttattactgttatatcctttttattatatgcgagttcttctgcaagtaaggcacaagatgagcccgattcaatcataactgtttcaccatcatttacaagtttacttgccaattgtgctatttttctttttatatcataattaaaagctaatctgctattgatatcatcacttgaagtcataacagcatacccatgttcacgcttcaataatcctttttcttctaatgcaccaagatctttacgtatagtcacttgagatacatttaaaagctctgataatttactgacttctatacgcttgttttcatttacaatttcaagaagctttgtatacctatttatcatagaaactcctccttctcttaggtagattcgaaaactaactagtcggcatacctaaatccaatggtaattatatcataaactacttacaaaatgaactatttatatttcgaataaaagcaattctgcttattattgattatatactacttcaaataatattaaacatcaaattattattcttatgaaattcacttttattttaaatgaaacttttttatttacacttatattttttcatgttaacattgaatcatcaattgaaatttaaattattacggttcaatcataatactaatcttgcttttattatatgggggtgtttttatgaacgatataaaagcttgcattttcaatattcaaaaatacagcatacacgatggtcctggaatcagaactgtagtttttttcaagggctgtcccttaagttgcctatggtgttcaaatccagaatctcaagatagtaagatacaaatcatatgtgataaaactaagtgcacacaatgtcttcattgtatagacgtttgtcaaaataatgctatttccttaaatgataatcatataaaaattgattctaacaactgtatttcttgttttgcttgtaaaaattcctgtcctcataaagctctttcagcagaaggtgaatttttaaccctttctcatgttatgaatgaagttatgaaagatgaaatgttttatgaagaatcaaatggtggcgttactttatctggtggtgaagtattaatgcagcatgagtttgcatcagaattattaaaactattgaagaatagaaacatacacacaaccattgaaaccactggatatgcttcaaataaaacattctcaaagtttatacaagatgtagatttattattatttgatataaaacactatgatagagaaaagcattttaaagtaacaaatgtttataatgatttaattatcaaaaatttgaaaattgctatagataacggtaaagatgtcattattcgtattcctgtcattccgagcataaactctagtttagaagatgctaaagaattttgtaaattacttgagtccgttaatgctaagaaagtaaacttacttccatttcatcaatttgggcagaaaaaatacgaacttctgaacaaaccatatactttccaaaatacgcaacaacttcatgaagaagatttattagattataaaaatatatttcttaaaaacggatttgattgttacttttaagatataaaattaaaaatgatatcaatatttttaataaaagcctgtgtcatttagatataatttacctttactaattctaaaatacttttctattgctactttttaatatgttttttatagtgatgtcattctcttaatatctataaactaaaataacccaagacaatactaataaatattgtcttgggctttatagttacagtgcagcgtaaactttaaatttcttatattaaacattcaccgtttgtttctattacttttttataccaataaaatgatttttttctttttctctctaaagttccagttccatcatcttgtttatctacatatacaaatccatatcttttactcatctctccagtggatgctgaaactaaatctatacatccccaagatgtatatcctaatagttcaactccatcttccatggcttctttcatttccatgatatgctgtctaagataatcaatcctgtaatcatcatttattgagccatcctcttctattgtatctttagcacctagtccattttctactataaataaaggcttttcgtacctatcatatagcgtattcatagttattctaagtcctaacggatcaattgcccatccccattcactaacttctaaatgaggattttttatggatttaacaacattagcttcggtttgattttccatatccttagatgcacatctagaagaataataactaaaagatataaagtctactgtattttttaatatatctaaatcattttcttccattacaatactaacttctttttccgcaaataccctctttgaatatgatggatacttacctctagcctgtacatctatgaaaaataaattttctctatcctttgtatgagccatccatacatctcttggatcacatgaatacggataaaaatctcctcctgcaagcatacatccaactttattttctggattttgttcatgggctattttagttactaaagcacttgctactaacatatgatgagctgcctgatacttaacctgctctttgttttcaccttctttgaaatatatacctgctcccgaaaaaggactgtgtatcaatatatttatttcattaaatgtcagccagtatttaaccaagccatcaaattctttaaagcagcatcttgcatacttttcaaaaaatgatatcatttttctgctcttccatgatccatatttattaaccagttccattggaacatcaaagtgacataatgtcactaatggttccatattatattttttacattctaaaaataaatctttgtaaaatttaattcctgcttcattaggtttgctatcatctccattaggaaagattcttgtccatgcgattgaagttctaaaaactttgaatcccatttctgccatcaaagcaatatcttctttataattatgatagaaatcaattgcctcatgacttggataaaattcattatccttcaaagtcaaatcttcttctaaccctaatttcactttcattctgtttattccatgtggtataacatctacagtacttaaaccttttccatcttctctataagcaccttcagcctgatttgctgcaatagctcccccccacagaaattcctctgggaaactgtatttactcattgtctgcccccattatttcgatattttcttctgctggaatatcttcaaatccaaatattagagttaatacgaaagataatacgactgccagtatcattattccaactatccaaataaggcttgatggattttgtggatcaaaaaactgaacacttgtgaataaacctggtgcagccatagatctacttgcgagtcctgctatccctgctacggcaccacatacaccacctgaaattaatgatgctatcaaaggccttttaaatcttaatgctactccatacagtgatggttctgtgattcctgcaatgattgcagaagaagcagctgcaattgcagtttgtcttaactctttatttttagttttaaaagcaacagctaaagctgctcctcctaatgaaaggttagcacctatttctgaaggcattaccattccttccattcctgtttctgctatagttgttaatatggttggagtaaatactctatgcatgccagtcataacaagtagtggccataaagctcccattattgctactgatacccatcctaatttgctgtgaacaaaataaactaaacctgatattgctgtaccaatccatatacctaaaggtcctataagtccaattgctattggagctgcaatcaatactataatcgctggttttaagaaatttttagttacttctggtgttatcttatctacaaatctttcaatatatgataatatccaagtcatacaaagtgctggtattaccgtatacgtatacttaacagatgcaataggaataaacgctaaagttacttccttaccttctgatgcgcttaccattagtttcataaaatctggatgtaccataagtcctgctattgcaatagctaaataagtattagttttaaatttcttagatgctgatactgccaccataattggaaggaaataaaacgctgcatctcccatagcatttagtaatgtatatgtagtactgtctgctggtagtacttttaacatagataacatcattactactaactttaccattgaaccaccaataattgctggtatcaatggtgacattgtacttactaatgcatccaatatattagttccaacttttttgatagttagcttttctttttttatcccttttgcaatgtcactttgatctccaaagtttcctaattttaaaacttccttataaacataagatacattatttccaataataacttgatgttgcccaccttggttcacatatcccattactccattaatttttttaatctcatctacatttacttttgagtcgtcctttaaacaaactcttaaacgagtcatacaatgagttacactttcaatatttgagataccgcctaaatttttcgcaatcgttttcgcaattaatgcataatcctttgccattttattacctcacttatatttattattttcgaatagctattgaatgtatcttaatattaattgaaaaagcttattctgtcactatgtaaaccattataaaaaacatgtctgttttttaataatttgttattgcaaaaaaacaaaatgtttttttgcaattaaaatcgaaatgtattcttgacatttcatatatttaaaaactgtgattaacaaacaaaaaagtaattaaaataagctttatcaacttgagttaaaaacttcaaatcaataaagccctatgtaaaatactcttattttttgcgcatagctatttactcatcttgtatagattcttctcgacgattttgtagtttccttccaattctttctattatactgattattggaatttgagttgtaatatcatatattcctactttaacatatggcacataatatgggatattataatcagacatttttgctatagtgcaattttcagtgttagtaatactaacaatacagcaattatcttttttaaatctatttatatggcctataatatcttttgattcaccagacacagaacatactatcacaactgaattttcataaaacttacctgtagtcgggtaatacggatcatcaatgcataaactaaattgcccaacacttgatagatatcttgctccatatcttgctacaattcctgacatgctacttcctataaaaatagttctctttgcctttaatatagcttttacaatttcctctatcttctcatcatattcttcagtatttgttttcttaaaaaaatcaattatctctgtattatcttcacttacttttttaatttctttttcttctataaataatttaaattttagtttaaactctgaataaccactacaacctacttttttgcagaaatttaatatggttgttgttgatacatgagattcaactgctaattcccttattttcatatatcggaccttgtctttattatccataatataattataaacagaaatttctaaatcattaagacttttgatttgactataactgaacatataatacttccttccattggactattgcctacattatatcaattgataacgtttttttcaatcaagatagatataagtttgagtcaattaaaagttggaaataatttttatcttaagttttcctccagtaaatttttcagcttcattaaaaatttctaatgtattttcagcataatcacctaataagtctttacttttttgaaagtcaacccattcaattgtaactggcaattgaacatcagcagttagacaatcccatagtgcatctaagttttcaccgtaatgagcaggaagctttaattcctgttttaaaatttggtgtaacatatttctatccgtaagcttactgccttgtattactactttattcaagctattcacatccttaaaaaactactttcctttatataataatttgaatgttttataatgatctgaggtagagtaaattaatccatcatttgaataaagaatcctatcatccccacgatgtcctccattataattaatatcgcattcatgccaaattctattaggcgcatctggtagagatttttcagcattcttaaaaatatctccccctatgcttttaccaggggctactttgctaagatcgtctcctggcttccatccaagtttattagcctgcgcttttgttataaaattttcaggcaaagttccatttttatgtatataatctgcaacgccttgaaaatcattaataatttttttattctttgaatccccatcttggctagaatctatctttttatcttctgattttgtagcttccacattgttatcctgctgcttatttgcagcagttttatttgttgctgcacatccaaataaacctatgaacataagtaaaagtataaaaacagcagaaatcttctgtataaatatttttttcatttttataaccattcctttcgcgcttcgctcaatgcacaaaatgcaatgaaattttattgattcttggctttgagcgaatttattttatattctttattcgtagggataacagctaactacaaatcatgtgaaggcgagtggactacacctatttagaggaatgagcactttatcaaacccatttgtatcagccgtaaaagggagtaattctgaatattctttttccatgtgtatctccatcccataaattcttttgtatcattctactctttttattatatctaatacttcttgttttttctataattttacacatgaataatagaatctactattcatctatgcattctgtaaatcatagcatttatatataaatcctcccaaaataaaataccccctttatagaaacagttttattattttaactgtctactataaagggagcatatcataatccggacgccttttttattttatattcaatatactgaaactgttatataaatttaagaaagaaagaggttttaaaatatggtaagaaattatcctaaattcaaagtggctgcgcagttcaagcagcaccagtttatcttgatttagatgctacaattgaaaaaacttgttcaataattactgaggctgcagaaaatggagctaaattaattggatttcctgaagcttttatacctggatacccttggtgggtatggctaagtgatccaggtactggatcatctttatatgcagaactttacaaaaactccgttgaaattcctagcatagctgtacaaaaattgagcgaaacagctagaaaaaataatatttatgtttgtgtttccgttaatgaattagatggtggttccttatatctcacacaactttggtttaatccacaaggggatttaattggaaaacatcgtaagatgagaccatccggaggagagagacttatttggggcgaaggtgacggaagtatgatgccttgcttcaaaacagagattggaaatttaggtggattacaatgttgggaacattgggtaccactaaacattatggcaatgaattcacaaaatgagcaagttcatgttggttcttggccagcatttttccctggagatgaagctttggtttcaacacctccaaatttagcatcaagtcaatatcatgcattagctacacaatcatttgttattatgagtactcagattcatactaaggaaatccttgaaaaaatctgtactgttgatgcacaaagggaagcctatggtagtttagttgctactggcggcggaaatgcatgtattataggacctaacggaaagattataagtaatcaacttccagcagatcaagaaggtattgtttatgccgatatagacttggagaagatcatagaatgtaaatatcaaattgatccagcaggacattactctaacaaaagtcttagcatgaattttaatcaaaatccacaacctcctgttaaaaaattaggatccagcaccgacgaaattataacttatgaagaacttaaaaagatttaactacactacttaatttttaagccaagtatggacaaaccatcaatttttatcacattaaatcttgatacatatagagtggataagtccatagtaacaaatcaactatttagttgaacctcattaacttttttctgtttggttttttcttatatatattttataatttaatcaaataaaagcgtttggcaataatccgaatgccttttattttatgataaacactatatagaaacgaatatttatgcacaaaatttagaaaggaaagactttaattatgattatttcccaaatgatattgttatttggactcatggcagtaggctatttagcaaagatcacaaaaattatggataatataagtgataaatatttttcaaagtttattacaaatattgcaattccagctacaatcctcagttctgctattggacaaaatatcggagacaaaatgagtacttttaaagtactattagttgctatatcaatatttctagcaactccatttataagtattcttatagtaaaaattttaaagttagaaagaacttatgaattaatgttaaattacagtaatctaggtttcatgggaattcctattatctcaagtatatatggcaataagtatgtattgtatgtatcaattttcatgatggtatttaatattagtttattttcacatggagtttctattttacaaaaggagaataactcaagtaaagttcaattaaaaaatctacttaatccaggtattatttcagctctggccacattattaatttttatatttgaaatacctatgaatgaatttattaccattatattgaaaaatataggatctattactactccattagctatgataataataggttctatcttagctagtgtaaaaattactagcattttcacagataaaaagatttatatttatactattctaaaaattttagtgtatcctttattaacatggataatattacataatttcgtaaatgacccagtaataataggtgttacagtaattttatgtggactacctactgccggaaatgtatcaatgctttgttcagactataatggtaacgttgaattggtaactaaaggaatgtttctctccacaatattctcttttgtaaccattccattattaatgctcattttttaaaaatataaaataaatacaattgattcttctaacaatgctataagatgtctatatttttaaacattatatagatgtaatcttcttgttaactacttctttactaaacttttatcagctaataaactacagcttcgctatgaattacacaaattaaaataacccacgacaaattgtcgtgggtttcatggtggaggcgaagcgtgacctttgaaatccaccaaaaaccgtatcatattttaattcaaaatagattacacatcaacaacgcttgtgctcattacctataatccatagaaataattaaaaattatcttgatctatgctttaattcttcatactgttgcttagttaaaccaaattgaccaaattcaataaaattaggatcatgaaaatcactgccaccacttttaactaaattatgtttagttgctaagtctaatgttttttgataatcaatcatcttcatctttgaatggttaatttcaattccttgtaatccatattcaacatatttttcaatctcagcataattattatattcgcaaggatgagcaattattgcaattccaccatcttgttttattgctttaataccttccataactgaaatatagcccatctttgaatcagtttctttggatgtctttgaggcaaaaagctcacgatatctttccttagtcatctcatggggatatttctcttttaaagcttgaaaaatattcattttaaagacaatactatatttagaatattttttagcatcttcataggtaatcttatatcccttttgtattagttcattaattaaatctcgatgacaattatctcggcatcgtaaagtttcatcacatagttttttaatatgtggtgtatcttcgttaagccataaaccaataatatggactttttttaatacttcataatcatagcagctcatttcaactcccttaattacatctatatttaatctatttccacacttcttgatttcatcaaattgatcaactgtatcatgatccgtaatcgccaatgcttgaattcctttctcttttgccattgcaatgacctgagcaatttcgcaaataccatcactatgatttgtgtgtacatgtaaatcagcatatatcattttggacctccctaaataactgtcaatatgacatcttctttgtcaactatacttttatcagtttgtactacttccatatagtcattactattagtgacaattatcattgttgttaaatcatagccagcctcgtgtattttatcaatatcaaattccaataacaaatcacctttcttaactgtttgaccttgagaaatcattaatttgaagtattttccttctaaagatacagtatctatacctacatgaattaataattcaatatcatttattgttattccaatagcatgaccagtatgaaaacaagcactaattattccatcacctggagaatatactttaccttcactaggaataatagcaattccagcacccattataccactagaaaaagtttcatcggcaacattttctaaagaaacaattttcccttttactggtgctaatatattttcataattacttttatttagaatttctttatgttccacttctttaatatctttaactggatcatcaaatccaataatcaatgtagcaataaatgttactactgtagagattatcatggtaataatagcatatactagatccttgctaccttcagatacccacattggtaagcttaataaccctggtgttacataaatataagcttttaattgaactattccagcaaataatcctccagcagcaccaccgatcatacatgcatacattggctttttaagcttaagagtaacaccgtacattgctggttcagtaattcctcccaaaaatgctgtaacacttgatgaaaaagctatctgcttaagttctctatcttttgtttttagcgatactgctagtgatgctgaagcctgagaaatattagaacataatgcaataacacgtgtaacaggatcaaaaccattttgttcaattaacataacacaaattggacttaaagctttatgcatgcctattgatactagccatggatatacagctgctaaaattggaattgcaacaaatccaaaatgttgttggacaaataatataatatctgcaacccattgtgcaacaaaattacctactggtccaattacaataaatgctaatggtgcagtaattaacataactaataatggtgccataaaaactttaatcatatctggaacatatttataaacatatttttcaacataagacattatccacactgttaaaatagcagttaccaattgtgaagaatacttgaccaacgctaacggtattcctaaaaaatatactgcttttcctgctgatactaatgaaatccattctggatgaagcattgataaacagataaatcctgctaaatattgattacaattgaacattcttgctgcagaaaaacctacaaatgctggcataaaataaaaaccagtatcaaaaataaaattcaacacatagtacgtttgacttgatttacttaagattcccaacatacttaaaattaaaagtaatacttttcccattccagctcctgctagtaatggaatcattggtgcaattgaacccgtaattattgctaacattctattaacaatattttctttattattattatctttacacttttcatttgatgaatcaaatttagtaaatttcataatttccttataaactttatcaacatcatttcctattactagctggtattgaccgcccttttttactaaagacaacacacctttaatatccttaactttttcgtcatcagcctttgactgatcattaagcgtaaatctcaatcttgttgagcaatggactacagatgcaatattattttccccaccaatcgcttttagaatttcactagacatcttttcataattcattttaatttcctccatttcatattttataaaatgaaagtttagccaacttaatgttactatctaacacaaaaaatttatattattataatcacctcctttaataactaacaaattacttaccctttattaattttgcaatatgaattgtaagatataaaatttcatcatcatccagataataataatatttgtcttctataaactgctttatcttcaagctacataaatattgttccacgtatttttccttcaaaagctctagtatattattattaagattatctttattattaagtttttttgaaaaaactcgatgtccaaaaaatttcaaatgagtgacaaatcgataataatcaagtgattcggtatcaaaatcatatttgaaataatactttacaatattcactatattttgaataaatccagttatttcatatatatcttgaatatcattgctaatttcagcactgacaatatgtaatgcaataaaccctgcctcgtcttcctccatctttaaattataatttttttcaattagggtaatcccgtataagccaatctcatattcatttttatagaaatgtttaatttcccataatagtttattatttattataattccttctttataacgttcaatactagtattaatatgatccaacaaagagatgtacaaagaatcatctaacttagtagataatttttgtttagcatgttcaacaattccatcgcaaatttcaatgtattctacaggaatactgcttaatgcctcaaccaaacgattgggatactctattgaactcaaaataaactttttagtaattttctttggatcaacaatatcaccatttttcctaccataggcaattcctttccccataacaattacttctttcccattaacatcattcgttatcacagcattattattcaaaactttatttattaacactaaaatacccccttgaaaataaataaaacctatttgcagatataacaaaatatctgtaaataggttttgtgtagcaagctaagtgctattacaatccatctcttacatgtacattttataacattctgttgatgtttgtcaacgcttacagaaattattttataatcatttttgtataataaattctaatctatacttataaaataaataatccacgacatttgtcgtggattttatggtggaggcgaaccgtacacaatatcgctcacaacaaatatatcaagccataggcataatattcattaatatataaaaaatgtggcaaacagttatattaaaaattgccacgtcttttatttttaattttctaaattatttatagcatattgtgcttcttcttcagtaaatttttctcctgcatctgacaccaattggtgatttatagaactcttagacatattcatttcactttgatatattttagcttttgctaatgcattctttttccaatccgcttttacattgtctatagcatattgtgcctcttcttcagtaaatttttccccagcatctgatgttaattgatgatataagccttttttagaaaaattcattgtattagcgtaattatccgctttttttaatgcattctttttccaatctgcttttacattgtctatagcatattgtgcagcttcttcagtaaatttttccccagcatctgatgttaattggtgatacaaggcttttttagaaaaatgcattgtgttagcgtaactatctgctttttttaatgctgcttgatattccttaggtatattctcatctgtagtatctttcccattttcttgtttaagtccatctttgtttgcattagtagttgatgtgttagtagttttttgagattcatctgttatattcttatctttgtttcctcctgatgccaaagcacctattataactaccagaacaattaatataaaccaccatcttttaaaaataggctttttattttttgctccgcaacttggacatatctttgcattttttgctatttccttgccacatgttttacagtttataattttcgccatcattattcccccctaaatatttttatatattaattgtatataacatggagattttgtcaaacaaatttaatatagttaaaaatagtaatttctatatacatattagtgaaccaatctcttatactcatttttaaggttttcttgagaaagttgagcatacctttgagtagtctctggacttgtatgacctaatattttttgtaccccttgaattgtcattcctgaatttaaaagataagttgcttgagttcttctaaatttatgacaatgtacacgctctgctatacctgttctttttttaatccttaataaaataagttgcaatgctctaaccttaatatgttgatatggagctttatctgaaataaataaatatccatttgatctgttttgaatataggcttgtatatgtaattttgctttagtagaaaaataaacaattctttccttgcttcctttaccagtaacaattatactttgttcttgccaattaatgtcttctattttcacctcgtctatttctcctattctgcaagctgtactatccagcaactcgaataaacatttttctttttccgttacacaagcttctcttagtttttctaagttatctgctttatacccttgtaaaattattttaggcacttttgtttgctttaattgaaaggctggatttttaagaatatattcttctgcctgtagccatccaaagaaacctttaagcattgttatatatccatttgtggtaccagctgctttatctttactatatgcagctaaaaacattcttaaatccatagttcctatagtagagcatggtttattaaaaaacatatctaatttttctaaaaacaatacataattatataatgtcttattacttaatccttctaattttttgcaagcaatatatagctttgcttttccttttatatcacttgtggttaattctgtacatttacttgttatttcataatcatatagtatttcatccaattccttcttcaattctagctgctttgatagatttatttctaactctgtgaaaagcaatgttattctcccgagaatttttattgctaactcttcatttaacacttaatcactccttgtatttaaggaagcaataagctatactaatacttgcagatattggtggtaacttttgttgctgccttatttttttataaaaaagtgtatagttaataaaatacatggatataatactatatgtaagaagggattatccccttttacatatagtaaaaccaggcatttatattatctcgacaataatagatttccctggttttatttttttatgcactattccccttttatttcatagaaccaacttccaagaatttttttaagctcattacatttatctaatcttagatattctgtttctatccaaatacctttttcattgcctcttacataacatttaatatcattaaaataactcaatatataattaatatctactccatcatatcctgtataagctacaggcaaataattggttacgacataatattttctattattttcactactagaaacttccttaggtatattagaatctattgcgttgcaaaacacatatgctaattgctcccatgagtatttattatatatatcaatgtcttcctgagaatcgcaaaaacagatttctgaaataatatttggtgctaatatatgattcatttcaaaaagcttttgaaatttaacacctctattataaaaacctaactcagtaaaattatctacaagtctttgcgctactggatatgctttactagattcactagaaactaatacttctgtcccttttgcctgaccattaaaagaattcatatgcagactagcaaaaaagtctacattactgttattagctttatttgctccctcacttaactctccatcctctgtattagcatttgaattgcaatctataacagtatggccgtacttttcaaataccgacttaactactgcataatactttttcatttgctcatgttcatcaacaattcctattgctcctgtacaattttcactatgtcctgctcttagtccaattttcattaaaatcaattcccttcttcaataaaatataataaggtgttcttggcgaacacctttaattaattactttctgtttttgttgtgcctactaaagtttgaactttatttaattgctctttaagagatttattctctgattgtaataaggtattagtatgttgcaattgctttattgcatcttctttagttaatatagcttgctttccaacgttaacttgtcctgctatagcttgtcttaaatcattgagattttcttgagatagtcctggtattcttttaagtaataatttatcgaactcatttgatttagatcctaaaacttgatttgcattttctgtaattctatatttttcttctataataccccatacttcttttgctgtttttaattcttcttcatgtcctgttgctttgattttttgctcaatttcttctttctttttggctaatacttctattgttgcacctccaacagctttaataagtgctactaaaattgctactaccgcagtagccgccactggtgcaacttgactaatcaatacttctttcattttacatttctcctttttctatattatctaatctgtgatgagctgattttgttgattcctcaaccctagcaactctttcatttatttgacttaattttccttcttgagcttccattttaacttgaatattatttacgccctgagatataaaatcaagtttggctgccattatggcaccttctttagtttctgctcgtattgagttacctttatttaattgaaaagtcgcatagcttatagtaactcctaatagcgtgcatattaatgcaatgcttattgtctccattattaaccttctttctgtaaatttaagcaacaaaaaagaactcctaagagcccttaatattgctttatttttatttaattttctacgcccctttttcctatgatgcagaaacacttgcaattatttgtgttttttcttctcctgtaatccattttaaagtaactgctttttctaatcctgtttctgtaacagctccatctttatataatcttaacaaagtattgtacataatttacacctccaaagttgttgcaactaaagcatctactgtttgttgcaattctgctatcttaatttgtgtatcatctaatttagttaaatttatggtaactgaattatctgttagttttttggttatacttgtacactctaaattattgtaaattccataaacttcaccagttgaatttgctacttgtaattttgtcaaattatcttttgtcattaatgtttctaattctgtaatcgacttatttgtaaagttaattataagtccaacttctccactattataaattgagttgaattctaagcttatattattatttaaaattattttatccatttatatcatcctcccttatttaagttttattatagtgatagtgctaagatgaacagatttggttgctgatgaattattacttgtccatatggatgttgttgtacctgctgttgtaatattataaagtttttgtatatctaatttactatacaatgacgcaaaatcgattggtgttgcaagtatatgtcgtgtgctaccatcttctccaaaattaaatgttactacatttccagctaacatgttccaaaccgacattttagccaatattagataaattcctgtctgtttaaatgttatgttaccagtactatttgaaatatcaacaaagctgtttgtagctgaatcaaattttacttgtactgttgtacctgttgctacatctattgctgtattttgaatagacgtagttaaataattataattttgcaaggtacttatttcatcttgcaaaacctttccttgagttgcatctaatacaaaaccagctatagttgcagttaagttgtttactatagatgacttatcaatttttttattcgccaaatctgacaagtgcgtatctattacatctaaagcgctttgtaatccatctacattagctataatgtgattatgactatcatctgctacagtagttgttatcgatatatttcctgatccatcgaagttggctgaaccagtaacatctccagctaatgctatatttctcggtgtctgtagcttagttgctgttcctgcatttccacttacacttgttttgttcgctatcgctatagttacaaaagcagtattagcaattttggtactattatctcctggagtttgagttggtgctgttggtgctcctgttaaccctggagaatctagtggagctttaagaggtaatgctgagttaatttcttttagctttgtatctataatatcagcattaccattaaaatcatctatatttacaacatcggttccttctggctttttcaatccataatttgttgttgttaacatttaatcaaccctttctattcataaacttttaactcatcccatgtcttcaattttgcattgttacatgttaatttattttcttttaatacattccaaacagtataagtgtatttaatcgtgtatcctagatgtgcaggtttaatattttccagcatatctttaaataactgcatgttttttggtatccccttaactccaacaaattgaactacaaaagcatagttaggattatcttgtattatgtttacttctcccccagaaaaagtttcagctacatttttaatcatctgtttagttgttgtgccttgccctcttttcttagccttaagtacttctcgcctttgttcataccctaataataaattagtttcaattccatattccttttcccagtagctaagaccccatgttgcagtatctatccaaagctgattctttatatctctaattttataatttaatcttccaagctccagcgaattagaattttctaattccttcataactttagatgtaatataatagtcgggcatatatttcatgagatcaggtgatattagttttatctcatctatgttatcttcttcattaattccatattgggttgtaccataattcatgctataccccctttaaatcattccatgttaatgttttttttacatctgaactgatagtagttgctgttggagcattagtttctttagtattattgtctgaaaaaattagtgcccatgcttgttgtttgttacctatactagaacttgataatatttcaaaagctaatctaccatattgaccaaaatctctataaacatatagtgtccaagtcattccgtttattacaattataaaatgattaatattaaaaccatatttactaagccatgttagtgcccggcaactaatacttgtgttatctgttctcatctgtaattctaatattcctgcataataattgccataagtagaacatactgcaaacataatattagtatttccgtaaccactcatagtttgtgaagctaccttataccatccattagatgaagctgcatctgaaccgataaatgctatttgtctactagatgttgtaatagatgcatcctcacttccatcaaaaatcacagtgcctgtaacatccccatttaaatttatcttccttgtagtagctaatttttctgccctatctacaactccattattattagtatcataaatagatttaagcatatcaccatagcctgcctgtgatatctcactcttagtagcaaatttactatctgcctctgtttcagtatagtatctatcgtcatgagtatgagagctatttgctttaccattcaaagcactttgaaccgccgttgaaataggtttacttaaatcactagtattctctacatttcctaatccaatatcagctggggttggtttattactttcatgatacactttgttacctttatatcttaaataatctgattttatagttagtaattcagttgttgtacttccattaacactatcaaatttgaaatactcatttccgttgtcacctattaaaaattgcatatatgaatcagaatcgccatcactcgtattcttaaatgagattcttgcataatcagtatttctagtccattctaatttagaatcgtttggaaatttaacatttccagtaatatccccaccactactattaaatttattgcttactgtattccataaagttctttcatcacttgttatgtgctttacggtatcactaatatgagaatatgcagcgttccatttatcaattaatgcttgagtaatagtatcaattaaagatttattactatgatcatgctctttactataagcttcattccaatttgttctttcagtgcttgttatatgttttacagcatcactaatatgagtgtatgcactgttccagttgctgatcaatgcagatgtaattccatctaatacactcttattattgtgtgtatgattatttgtatacgcagtattccagttagtcctttcagttgatgttatatgctttacaacatcagaaacatgagtataagcagcattccaattatcaattaatgtttgattaattatatccaaaatacttctgttagagtgagtatgctttttactattcatatcatcatgatctatcttatcttgcttagacatttttccatcaacacttgatgacgctaaaggaattgagttagcactaataggaatccatgaagtaccactatacctatatgttatatctgtatctttaacatttactgtccaaccatcttggggatttggataagttgttgctatatcagcataagttgcaacagattctttccaatccatattactaacaacctggcttattttattatcaacttcattttttgtatacttgtcattccaaattggagtatttgcattgattgtgcttgttaaagtattctctgctgacttagcacgagtactttctgaagtaagattattaatcaaagtattttctgcattagtagctctggttacttctgcgcttagatttttagttaatacatcttctgcaccttttgctctattagtttctgcgataagattattattcaaagtgttctctgctgcttttgctctattaacttcattttctaaatcaacatttatagcactttcagaattttttgctctattagattcattacttaagtttttatttaaagtatcttcagaaccttttgccctatttatttctgtatttaaattatcagttagaactttttcagccccagtagctctataaatttcactattaagattttcctgagtttcaacaactgcatcttgaagattattaatatctcctgcttcaacttgatctcctgatgtttcatagcttatataaatcggacttacattagaataaattttaattattgttttccatggagctaatgatggagttgatgtaaaatatgcttcaatcttatttcctgtaagtttacttcctgtataaacattcaatgtctttagatttacattatcatgttgtagctctgattcataaacgccatttaatacttcaacaacttcctcaattacatatatgttattttcaagtttattgagtttctcatagaatttagttacattcaactcacatcacccccaaatttacatttcccattactgcaatttcttcatcagctaaattaatgtttgatgttgtaccattaatttttaaatcagaatagtccatgactccttcagtacttaataatatttttcctatctttgctatacttatatatgaagcattaaatgaaatactttgcaaatgctctattaccaatgtcttaaaagttgtttgtattactccaagattaactccattagttatgctcacatttgcagttatatttattgccttttcaatcgctgaaacaaccgttactgttgctccaattggtgcttgtccttcgcccattccatcaactggatcgatataatttttaacactatctactaatgttctatcagctccagtcttattagaatttataataacaacttttacagttccgttcccattccataaaggtaatactcttgcatctccaacacctgttacctctaatgcccaatttctatagtgatatttattcccagacgttgcaggagtccggattttagcataatacctttttcttaactcttcatcagtctcctcattatatccatttgaaatagcttctttattaattactttttgaagtcctgaaagtgtctttggaaaatatttaatagccccaactggtatattaccgacctcaccgtatttcacacattttaccgaaacatctatactcccactttcaggtataaccaatgtttctgtgaattcaaagttaacattatcactagctactaattcacctttatttataggagcaccgaccactccagtaattgtaactttcccaatagattgagttgttaatttacgcgttaatccaacatcttttactactttatcaagatcttttccagtagctgtttctgcaaatctcttatctaatacgccttcaatttccgtatatgcgccctcaagttcaattgcaactggcatctccgcatcatacataaattcaccctcagacttattgtacgaatcatttatattggttaatagcctagcttgtataacatctctgctatcgctcattttctatctcaccacactttctgtgcttgtgccataaatactaataacatcaaaagtgcaattaagtaaccttttatcctttttaaacacaaaattatttacagcttttatatcagaatttcttaataatgcttctgtaattataatttgaatttgcgcttccttataagctaaaggataatcgcttgttattaaatccaaaagcgaatcaacaccatatttttcagtattgtttgtattatatattttgtatttgtttttatctgttctaatagttttttgaatccattgctttaaagcctcgtgcttacttattgtttctactcttccatctttaacataaaaatctcctgtttcaaaattgaaacatggagatttacctttactacttattgaatttgtatcatctaatttgtctattgtgttaactacttcttgattcggaaacaaaactatatcacctcttttacactttctttactgcaacataagcatgaccatttaaaatgggaatacataaaacactatccccattatttaattctcttgttataataaaatttttagattcattgccttcaatttctatagttccagttatttttcttagatcctcacatacatagagaggagtatgatcatcattttctataaatatagctgctcctccaaataaggataccttcataggatttaatgaaattattttgcctattttagcttcatctggatctttattatctctttccctaaaaaatttcataattccaacatcatatctatccatttttcacctaccaaacaactgtaatacttgccttatgcaatccattttgtaatttatgatttgcattttttattttataatagccattcaatctacttcctgcttgcaaataaatcattctattaggctttattaaatctccatctttaagtgctatcatatcatttaaagtagctgaatattctattttattgctatttgctaaagcattattagcaatattttgagcttgtgcaatatttttatcgtctacattgaaattatcacttaaaactccatagaatccttgttgacttgtatcttctgctgtagcttctacttttgcattatcatcatttccgcttgttacagttatcctatttttcattttctccattgacatatctatatctatttgcttaggcaaaattattttaggattaattttcatttctgaaagctttctaatatataaaatattaccttctatttctttaaaatatgttgctccctggtcatttttagcttgttctaaaatgtcgtctattattttatccatagtagtattcgaataagttttgcttataggagttggcatgtctactattatacagattaaatacgcttcattagctaaggatcttatagcatcatctgccctcatattataaaattgtttgaccgagattttattattcttaagataataactatagtcctgacatgtataactccatatccatctttttttaattggatgaaatgcaattcctctaaaaatttctaaggagtcattaaatagctgcacaactgttcctgtaggaatttcttttatactatcaaaagttaattgactccccaagttatctgtatctccaccccacgaaacagtattgccatcattaaaaatatcttgattattaacaataagcttatacacattatcacctaactttcaattaaagctccatcatcatcaaatgtatatttaactccatctattgtcgcagatccactaaaatacattgctccatcagaaccaaaataataccatttatttttatattgaatccattcatttctagccatagcgcaactatctttaaaataataccaataagcaccatcttgaagccaactattttgttgtgcatagccatctgttctaaaattataccattcattgtttataagctgccaattccccatataataacttccatttgcatcatatacgtaccaccatccagtattatcttgttgccatcctactgtgctagtttgcgtaataatagtattataatctcgccattgcttaagatctaagctatattcataatcgccatttttcattattgaatgctcaaatttttcaacgctaaaagaatcatttacataatatccatcaggagtacttattaccactcgaataggttcagcattagttttagcattttcaattaaatcgattatttcctttgcattaactttacttttagagaaataatacttacttgcatatcttggaagccaatcactccaggaacttttaattaatccttttttctcaataaagttatatggtatatcccaataagtttcaaactcctcattcttgctatcactagaaaaggaaggtaacttaggtggaatcgttggaaattgtaatacttttgttctattataatcactaacataaatattataattactcatttattaccttcctttctatgaattaaccatttgataataaagtttattgtaaatatgctgacctaatatatctgcatattcctcatttcctattaaattaccttgaacaattaattgtacaataaatggttgactactattattcaatatcttatctgtttgacctgccggaataactttcgatccacttggcagtattgccatttctccatttccaaactcattcattctagtagggccaccaggccaataatgtgttcctgttgcattcataggcgttcttgtatacactggatctccgcttccatttgttacggatgtaactgtttctgttgctgttacattaactttagagccatctaatccaagaaacttcttaagttttccccatgcattttctgcccattcacaaatatctttaaagtgttttacaacttcatatattgcaaatcctaaaccagctattgcaatggttacaactccaattggatttgcatccattgccacatttaacagccattgtgctgcttcccaggcacttgtagcattttgtatcccccaaatcataagttctattgttccccatgcactagttgcaaatgttgtaattccaatccaagtattaactccaacgatagctaactgccatgcagcgattgctccaactatactatatacaactggttcaattgttggccaattgtcatttacaaaattaactactcctgtagctccatcaattattccagaaatagcatcacttacagaatcccaattatcaggtgttatagctgaaaatgatggtacaacactattataaatggtgcttaccaaattagatgcagaacctattaaattaccaagcgaaggcacaattttgtctataattgaacctccaacacttaaaaaagtattagttactccacctatatcttcttttatttcaggaatattacttctaaaccaatttgcaaaatcatttaaacgcggtagtacagcatccgagattggaattaatacgcttgtttgaatattgcgtttaattccctcaaatgcactacctacatcgctatattttattttgtttatttgtgccaaagcatcatatgtgttgcttatttctccatcaacatttcctaagctttcaattacgtttatacctaaatcttcaaattgcgttccaaacagttcgacgcctatttggctttgttttaaagggtctttcatatttgataaagctgcaataacatcctcaaaagtatcttttgcgctatctccgccttgagcaaatttagctgctaaatcatcagcattaaatccaagctgagtgaatccatcttctgttgttttacttccatcaacagctcttatagaaaattctttaactgcatctccaactttgtctaaattaaaagcaccttcttgtgatcctgctgagaatacattaaacatatcttcagcatttaatccaagttttttgaattgcacactatattcattgatagaatctaacatttctccactaaaatctaatccgccttgtttcccttgtgcaattaaattaaatgcttcatcaccatctactccaaattgtttcattaaagttgatgctgatctaacagattcatttacctcatatccaaaagtatcttttaatgctattgcattttcagttagtccttttaaatcatcaccagtatatccagtttgctctcctactgcttttaatgcttcgcctatctcttcgaaattctctccaaaattatcattgtatatatctagcatgacatttttcattctatccatgccagtttcagcaagtccactagatgtcataactccatttagagatttttgaagctcatttccgaaagtaacagtttcaactataccatctttcatgctctcccatatatccataccagcaccaaagccgattcccctaagcatagagtctttaacaatactaaaagcttcactaactgtttttttcattttaacagcctgatcttctgtatccttcataccagacttaaatccttgagtatttttagcaacattctgaatagtgtcactaaaattatctttcaaatttaatatggtattaattactttagatgccaaattatcacctccacattaatttttgggtggtttagcattcgttaattcatttttataaataacatattccattaaaagctctttttgagttttaggtaaactccataaatattcgagggaatgaccacattcaaagaaataacctaaccaaaataatggtcctatctctcctttgccattcccccttattagttttttaatttttctttagtctttttaccatctccaaaagtttcctttatctttttagctattccagctaaattttcaactccaaaagcctttactggtgcatctaaaggatcttttattccccaagctttatgcaattctggattttgtaaaaatggacaagaaaaataaatgaattctttagacgcattgatcaataatttataatctgtaccgattatctcttcatttttattcatcttaattgcatttgcctgagcatctaaatactctaaaagattatcttctgtaggtcttataaagcttataggtccatatccttctatctctatatccgcttctttccttattccttcacttttctctaatccctttttaataaaatcctctaatgacattttgttcataatattcctccaaaattttattttaaaattgaaaagatgcttaattataagcatcttaatattaaatagtttcaatagcatcgaagtctccaaagttaaacggaaactcttcttcaattatttttttagattcaaacccagcaagtaagaattcagttattactactccctctatactcgctttttcactttttcctgttgctttatcagttaaacttgatattaattttatatctggcataactccacttttatatgcatcagcacaaatcttccatattgtactatcaactttttttactgtaagagtaccttctcctgaccacccattatatctgctatatgttgcattatctccacaaaactcaaccgtttcaaaattaccttttactttagcttcaatcttacttaaattagctaaaagctgtccattaaaccacagattaccactgctgcctgtcaaaaccttattcgctaatgcttgatttcccatgtttatttcctcctctctaagctaaattaattgcaaagtctaaatcgaccatgctttgtaatattttcacattagcattaataaataaacttctcttaaatgtattttttctaacttggatatctgtccaatctttagcctcgtttgtgcctgcttctatccatgcttctctttgtttttcaacatttatatcacttttattttcgtattcttcatctaatacgtctgttccattagctgataattttttaaaatatccattaactgctgaaataaataaaatttgattatcatatttattcttatatccaccaccaagataatcctctttaaatgtagttgaaatatcatcttgcataagatccattgcttcaaccacttctatttctttcatatcttctgtagctgatttcccatttgtagtagttaaactgttaattccacgtgcaattctaacatctgcaccatcattaattaaaataaacttccctgcacctagagcctcatttctatcatcaacctctgaaaccttactaagatttgtacatctaaagttattgcatccttgtgtaatattacattttgctaaaattccaataagacttggacaatatttttctcctgttcgttcacccctgctatcactaaaagttatctttgtattaacaaaattaactatatgcttttcatctggtgaagttacattgtatactaccgctttataagttcttttattagcaacttgcgattttatccaacttgataaggttgtaaaatcttctgttctaccatctgccattgttatccatcctgtttttacattctcgataacaatttttaatgcatcagaaatagttgctgtattcccaattttcactacacaagccttatatggggcaaatgtaaatatatcttttaaatattgtaaattatcttccgtatataattctttatcagtgtctacctcagttatatcggaatattctttataattaaacattgcgcttgtatcatctttaactattaatattgcataacctctttcacttctctcaggaagcgaagctgctttttgactgaatgatacatcaatatttggcattgtaactgtcatatcatcactcctattcttctaaatttaaattgaaatttaattcttcgattggttctaaatttaaatcatcatatatttcctcaagagaatataaatcaaaactgcattgaagtactgtatcaactacctcacattcaacttctccatcttcaacaagtggcatatagaaagtatcagtgacttttacatcctctaaaaatgtattttccaatatatcttgcatttctatattgtcatttctgtatctatccttattttcagcataaaaataaaccctaacagttagggttctttctttcaaattactattcgactttccagttctagaattgtcaaagattagtcttatagatggccttggtattccatctgtaaaatctattgctgtaggtttaactccttcaaatttagtaccttttagtgcattaataatagtattattaattgctgttcttatttcattcaactttaccatatacacttaacctttcaacttatttactaataaagtctttactatttcttctacaaattcttcattatctttaaaatattgttcttcaaattctttctgagtatcttcgaaaatatgttttccatctacccaaccaacttctttcccatctttagttacttgcctatgacctttctctattaaatgtgcatgtggagctgtagaataagttcttatagataggttaccattataataataaacttttcctcgtttaatagatttaaagtatttacctgtttccttctttaccttttgtcttgcctttttagatgtattttttcttaacttagtaccttcttttctaataaatttcttagattctttaggcattgtatcattagcaacctctaacatttgcttttgaaatgaatctaactctttaaaattaaagccatcatccatcttcttgcacccccaagtcctttgggttttgtataactaacgtacacataatctctatagcatctttatatttgtaatttggctgaaagaaattaatatcataccttaatcctttatacataaaatacatatcattagataaattacgtatagatttatctctaacagtaattttatgagttatttttgcataaatagtatcaccttggccagttgccaaacttccacctgtaggaattatttcactccaaacagattttatcttatcaaaatgataatcttcttcatgaaattcattttcgaatttaacttttccataaacatctattctattatttaatctatcagctagcttatccatctaagccccctaagttttcttgaagttttatactcaaataaacactatcattattatcatctctactatcatataaagttttaatagcctttaataataacaacttatgtgatgggttttcatcgctatattctgcaaatccatctgtaatatacttctttccaacttcaatgaatagtttaattaattcatcgtcatcatcaaaatctactcttaaaaaactctttattgttgataaatccatattacctccacctcctgaaggaagggcattaagccctaaaattaagctgctggttcaactgctatttctccatatatataacacttatcagagttatcacattgtactatatctatgaactctataagccttgcaatagtagtattactcataaatccagcttcacttgaagttgcaaatgctatttgaccatttaaatctacaaaacatactgcacaacttaagtttccataaataataggggctttaccatttgttgttggtagcatagtattcgaataaactgcaattggataacctttgaataaagattgtgttggatttgctggatttggttgcaatattggtcttccgaaagaatctaaagcagcatcaagaacgtcaaatccatcttgattagtaactataacagttccaaataatactcctggatctaaatctttatttatagatgattttaatgccttccaatcagcaatagtttttactgttttattagactttaatgctgctaatcccataatattttctgttactacagcctttcttgcaaatacatcaactacataattaattaaagcattatctgttaacgataataatgtatttgataattttatgaatgccgccttttcttgtaatgagaattttacatttttaaatttaatttcttcttcatcttctccatctgtaccatcagcaaaatctactaatcctgatacagtctcaaagttttcaactggaaaagatcctgtcaatgctccagcaggcatgtaccccaatacatctcttaaagacttatattgtcttatcttcttttgaattaaagttcttatatcttgtggtaatatataaccttctccatttgttccttctggagctgttgtagtaggtaatatcaatgcattttcagcttcagttagctttttacctgtaaccttctttaacattgctcttatcatattggcattttcttttgttttatttttagaatcttttgttgatccttcttctagctctttttccgcttctgcttgtgcagctaatattgcttcttcttcttgttcaagttcttcttgaacttcaatagctgcctttaatgttctaacctcttccatcttattcttagcatcttcaactttgttattatctaataaaacttgagcctcattctttaatttttctaagctatttttcattgctatactttttttcatttaatacacttccttatctgaaatttttagtacaaaaaaactacatatcaagcaactcaagctcaatttgtagtttattttttaactcactatctagttttaggtgttcgtcacgatcacctttttgaattttatctttaaattcctctggtatatttctataatttttaaaattattaaaatccacttttgcaactgctttgttctcttcaattaccttgacattaaaatatttctcagcttcatttgctggtaaccaagtctctttatccattaaatcttttatagtttctatatcaatgccatcttttagcttggttttatatacattttcaattcctatttgaatagtgtccaaatcatcagccatttttctcatatctgttgcatttccccataccatgttacttggtttatgaatcatcagatatgaattgtttggcattattatttcatcagctgccatgcaaataacactagctattgatgctgccattccatctatatgacattttttctttccagttgctctatttaacatattatatatagcaagtccagcaaatacagaacctccaccactatttatataaatatttaaatcttttccttgtgcttcattaagtgcttcaaccacatcttgtgggcaagtatctgtatcacaccacttttcccactcatcgccaactatatctccataaaaatatatatctgcactagtatctgttgaatttttaacttttagataacttaacctactcactattaccaccacctttgtcgtattgttttcctaaatcttttaagaaaatacttgcgccattacctacaattaactgatctgttccctctatataagataaattttctttttttcttacttcagctatagtcatataagaattatttatgcctgcaacataagatgctgtcctactagctaaatcgcttcttaaaatgctatcaacattaaactgccagtaataaccttccttatcttgctcatcctcagtaagtaatttataatccatttcctgctcataagtagtcaaagtattttgcaacgtatcactatagaatgctttattctgctgctctatgttgttgtaagtgcttttctccatatcattaagctgaaatcccttgactccaaatgcattagcaatatgtcttgttgttagcccttgtaattgaaagaactgactattgactagtttagtttctaattgttcaaccttaaaatcggttggaataggtacaaccttaccagcatttttagctccacccatatcagcgaatttctttttgattttctgctgttttgcatcattcaaatcaccaatatattgaacaattatagggtccattaatccatttttatatctgtcttttaagattttattggaatattgctcatttgctattacatcagaaatatattttttaatgcttgtgcctttcaacccatccatgctaaagtttttaaaatgcactatattatcacttgtatatagtaattctccttttttactatctgaatataaataataaactgcatttttcttatctaatattcctgtattatctactataatttgaactcttgtactgtctaacaaatataaagcagttatattccccttaatatcattccccattacccaaaatgaattaccatgctctaatctttggaattctgttgcccataaaaaatcatgcgcgttagtaaatggatttggtcttttctttaaaagcttatataagttgtggtcaactgccttatttgcacctttttcagtttcttgcattaacttaattggtaattttgcaattgcattgcatcttatttgcatacatgcataatacgatgcacttgttaatttagagttagaaatttcttctatacttgtatgaaaaaagctttctaactgttctagcgttggattagttcctattgtttcaacttcggatgttgattgatttttaaaagtattctttattttacttataactcccatttgctttatcacctccttaccattcatctttctctagccactcatctgtatcagttatgtctataaattcatgatatagtgctaatttaaaggcacataatagagcatcaactgggtcaattctttttgttgtagcatctttatcaatttttataagaccattattagtttttattactgcattactcattgcgtaatttaataatggattattagtatagataacattcccacaataaatctgctctctaaatccttgtgtagattcattcaaagatttatgactttggaatacttcttcaactacatacccctcattgcttaaatcaatcatcattttgcttgcatttgctggatcaaaacataatgtttctattctccagttatttttcttacaagtttctaatacataatccataacttgttgctgatctactatttcagtattagttatagttaaataaccagacctttcccatgaatcataaggaactttatctactgccatcctttcccttagttttgttcgattaggtataaaagaatgactaaaacaaacgtattttactattttcttaccactagaatctaactcatcacttaaaataggtataataaaagccaccgaagttaaatctatcttcgctgacatatcaaatccaacatatactaccctatttcttagatcataaggtatctcttttacttcgcatttcttccatttagccatattcatatagccattttccttggcttgcacccatttattaaggcattttgttagaaatgcaatcatcttttcaggaatttctttggcgattttatactctccacgtatttttttaatacctgcatcatatgtcattctaattggattcgcttttttccaactttcctcatcctcaatgtcatcatcttcatctatttcacatatatcaataaaatattcttcattatcaatatcgacattcggatctagtatcttcgagcaataagtatactcttgagtaaaacatgggtaagttaaatcaactccagcagtagtaataatcattaataaactttctttagtattaccacctaaccctaggtcataaaactcagttgtcttgtgctgatgatattcatctaataccagtaaagctggattgctcccatccccttctttaccgtcttgtttgttaagcggttttaagctgctagtagtttttacatgctgtatactgttctttgttattttaaatttgcctcttagtggagacccctttaacatattcttgcactcattgaatataacttctgattgttctctttttactccagcacaataacactcataaatttccttattcttagtagccctcgtagacatttcatagagtgttactccagcttccatttgtgacttagcattttttctagccacttctataaaagattttgtaaatctccttaaaaatgtttctttattctcccatccataaatctgacataagcaaaacttttgccacgtatttaaagttataaattggcctgctaatacacctttgctatgctttaaatatccaaaccatttaacaatcttattagcttcttcttcattccagtaatactcaaatggtgtacttaatatatttaattcagaattttttatatcatttaaaaatcttaggcatgcccatttatgtttttggccacttgggattacatcatttaaacaatcattagaatatttaattagctcttctttaatagtcactaaatatcaccgaactcgtctgtaatatcttcttgctgcttactagttttaactgtagcaacttttaatctactatcaatagtcatcccacaaagtgaagcaaactttctcatttcttctgcataatttttttgaatttttattaatggattttcaactgttataatacctgactttgtcattttctttgatattaggggcttattctgcaattcagctgttgcctttaaatacaacgaatatgaattacaatatccacctaaattattcaaatctagatttccaagtatatcaattttatcaatctccttaacaactcttctaaattctttttttgcaatatcatctataagccaagaaggtgcttttttcaattgctctttccctaataccagcatttcttcttgctgttccttctggactttttcctcattagttaaatgcttcttttgcatttctaatgacttccttccccttggcatttttacaccttctttcatttgaaatttactatttaaattttttattgggatttttgagaaatgaaagctgggggtgcggtctagaaatttatcttaaaaacattttcggcatccccctatgctattattcctctatatcaaattcttttttgaatctagctactaactcatttaattcattaataacctcattatattcaccattctccatcctattatgaataactctatgattactttccgtcagatatataagattatctagagcaaatctcttttcccattctcttttaataggtacaatatgatggactgtttgaccatactctaatttatttgagacataataactataaatatcaatatattcatataactcttttgctttatctttgatcttattccactgatcacttgagtagaatttcttttctttgctattaattttgtctttatcatattctttatatctcttttgagagcagttacatttagatcctgtttgtattctcttaccacacctactgcatcttttacatatcatcactcattccattctttcataagtttttttctctcatctgcttcctctttcttaatctccaacaatgctttatctatctcagctcttgtagggttatccttccatcgcccttgctttctattgattagccagaacttaattgcctgaacatctgctggtatctcttttgttacttcaactgtacctaagttttctttctgacatttgttgcctctatcgtcataataaatatcttttaatttaactgctacagtctctttgatttcatatccagtagcctttttatataatgcattttcaactttgaaatcagcctgatttttgcccctttttaaactttctaaaatgtctaaatgatctcttttatagttctctaaggtcgctctacttatgcctaaattataagcgatttgtgtttcagataatcccatagatgcccataattcaacatctgccagtttttctttaacttcattccatttgctttttgccatatgaaaacacctcctttctatttagacaatcgtaattttaaatgccttgattttcggtgtatttcccaacttttaaaacctcacatttttttatatattttatgactttatgcaaatgttcctaagatattgaaatgactagctttatccccattttagtatttgttagataataggtaataacatggaggattactgatatcttttttaaggcacatatattagtaataattttttaaaactatataaaataagtaccagtttattttttacgcattatatatcttcatcagcaattttagctgcatcctctttcatcttttctttaatgcctaggtaccgttttgtttcttctattgattgatgatttaatgcaattctaactttttctaaatctccaccagatctttcatatattcttgtagcataagtttttctaggactatgaccacttatatgttttagtccaataacttttccaacctcagtaagtattaagctatatgatttttgttctattggttcaatgccacttttagatttatttgaaggaaaagcatattctgctcttttcttacctttgatatagtctcttaaatatttctctaagttgctgccaatatatacttttcgcttttcaggcttctttcggttaggatatctatttaaattagcgatccattgattgtattgttttgattcctgaattaaaaaatatccattttctaacgcatcttttatttctcctattgtaagttgaactagatcttgcattctatagcctgtagctctagccaatataaataatattaaatttctttcagaataccttttactatattcaattaacgcttccttaaatctctcatacttattttgtggtattggtgctgctgtacctttttcccaatctcttactcgttccatcttatttcacctgctttatcgctcctttgtgtcttgtatatgaactatgagacatcagttctcttatatcacgttcacttaatttctcgcttttctttttattattcatttccataagctttttataatttacaatatcggtttctctcaaaacatcttttaccctcataaactccctcctaaaatccaattaaaaagagctgctatattattttctaatataacaactctttaatttctatatcattttattttcattaaccaaccttttaggtgtatcccatgtaacaattggagcgacttctctgttaattaccaaatctccatcaggtttagttttatatattgatctattcttttttataaatgtactatcacccatgtatttattagcttcataattcgtagcctttatactttcacgtctttgaataactgctatatcatgtttatgtttcaaatgactaaagtttctttggatgtactttctaactgcttcaacttttttccctaacttcttagcgatttgatttgcatcatatccatctaaatataattcttctatttgatttttatcagtttttgcctccaaaagttccaccaccttaaaaatgaatatagttcacccaaaccataagactggacattccttatttttataaaagtaaaatgagaaatatgaacttgtattttgtgtttattacttatttatgtacctatattatcatgattcagattacaaatgtgagaaattttcgagaaatttttgctacaaaaaaagaacaaacttaagacaaaaatgcaacaaaaaagtgccaaaaatatgacacttttattctataaacccttttgaaattgttcttaacgctttgtttatactgtaatctatttgtctctttgatctatctaattcccttgcaacttttttcttttctttaccctgtatataaataagactaataactttataatctttttctggaagtagccttaatatattatctattttcttattctctagctctaatttttttatatctaattttagttttttgattctttcatcatcttcttctattccatttataattaaattttctatctcaatattcttattatctatcttacaaattctttctctatataattcaaattgattttttatttctcccatttatatcacctatcctttatttatgttataatttagataggttagttagagaatatagtcgattgcaattaacgatattctctagagcaaggtgttcgtaatgaacacctttttattatttctttttctcagtatattagtattgcgcagtactagactacctttttaatttctttatcattacataattctggtaaatttgctctaactaacgcttctgcaaatggtggaggcactgcgtttccacatcttgcaacttgtgctgtctttggataaggcttacctgtataatcatgatctataatataattatcaggaaatccttgagccttaaataactcgtgtggttgcaacattctcattccaatatcgactatttgataatcttgacctttaatagttactaatccaaatctgtctttagttgtgattgtatggagtggattatcaatatcctgacctatatcagaaccatagtatttaagtaaaaatgctgtgactaaacttgctttattcactgtagttattgcccctaaaggttgttgtacagtatgtccaattgaacttttatattgctgtgatacaaatgcggttacaagtgcatgtctttcttttgttgttatagttgctaccggattatctaaatcactaccagctcctttataaaatccaccataatactcgcttataaatgctgtaactaatccaaacctatttgatgtatcaagtgtgtgtataggattatcaagactcaatcctctaacttctccaggttgagtttctgaatgataacttgttaagaatggagtaacgagtaaatgttctgctttggtggttattgttgtaagtggtttattaagttcatattgaagtttatctccaccaaatccagtttgaccaatcctaactatataaggattagcactatcgacaacaaatttttgtaatcctctagcaattctttttaatgtattttctgaaaggtctttttttctatcgaagatactagggcaaggaatgctccaatctattatttcagcagctgttttccaaggttttaatttacctgactttacttctaaacttttaggatcaccatgagttactttgggccatactataggttttccatcacttctggcaattaagaagaatctttttcttatagttggtgctccatagtcacatgcttttaactctctatgttcaacttcatatcctaatttcttaagggcatttgtaaaactattaaatgtctgaccttttttctttggattcggatacaatttaccatctttatctttcatcaaaggcccccaagtcttaaactcttctacattctccaacataattactctcggcttaactttagctgcccattttacagcaacccaagctaatccacgaatattattacttactggagttttaccctttgccttgctaaaatgtttgcaatctggtgaaaaccaacataatgctacttttctacctcttactgccttaatgggatcaacttcccatacagattcaaggtaatgctctgttgatggatgatttactttgtgcattgcaatagctgctggatcatgattgatcgctatttctacactatgccctgtcgctaattcaattccagttgatgcaccccctccacctgcaaagttatcaactataatttcatctaataaactaacttgattcatttcttcctccacgtctggagatatggccatacattttatctagaattactccaatttaattttatttactatacactttctatttgtaatatgtctgcaacatcttttaatgttattcccttttcgaatctatcaatttgcataaattcttcatatagatcctctgcatattcttttaaaatttcctcttttatatcttctggaacatcaccacatgatatctttttaccttccattaacccaagaactgttatcattgcatttatagctgtttcaaagtgttctccaagttcttttgcatcttccttaccttttccatctaaattgaccgctaggcattgattttgcaaaactggctttatttgtgataaaccagctattgaattttccaaactttctttatctaactttaatactttatatttttccatcctgcttcaccctttctacattaaaataatatttctatcgtacagaacacttgcaacacctttaataacttcttcttcatatgatgatgagttttcctcgatatttctcaataaagctaataaattttccgtacttaagttttttacacgttctgctttagaatttgcctttaatcccacatagctttttaaaaatatatttaattctgctgaatatctcacaagtttcacattccttcctacacaatatctacactttacgcactattacaatcaatttttatatttataccaattatgatttttctttaatatctctaaatttttattatgaattaatacgtcttttttagtggcttgtcttaattcctctatattttccttagtgattgttaatagaatatcgtcacaatcttcactgactgcataacatacgaaataatcataatcttcatagaattcgtttttaccaaaagtttcatgcattactttaaagaatttctccatttgatctaattgaataggtcttaataccaaaaattcatttgaattttcttgtagctcaataactgctatctctaatccagctactaagttccaatcatctgtagcattttctttaactttagcaattaattgttttatcatgatctccctccatatatatattttttgcttatagctctttataaaatttatcacttactgatcttccaagaattaattctaatccttgcttgcttaaccaaaagtaaatacattcatcattatttggatgattagtgcctttttcagctaagcctttttgaactaattcattccaatctttatctgtttcctgagtaaaaaaataatttctatatggtttattttttcttcctataccaacacaatgtctcattatatctaattgatattgagttacatattctaataaatttttgacttccgtattttctctgttatataaagagcaatatcccttttggcacctataaaatgcaacaggttcttcatcttccttaactggttgacttattcttttacaccttgacgctgataaccatttatcagcatattttttataacttccaccatctaacataggcaggccagtttctctacatgatgctgctgtataaaatccatatccgtttgctactagtaaatcttttatattattactcataattgttactccttccccctatactgcggtcacataccacacatcaaatatctcttccggcaacacataagtacatgactgccaattagctattactggattataaaactttaatttattctgcttttctgatatatcaattctgtagctttcgccactttttttgctagtaattatcacatttttatcatctattcctttttcccatgcttctaggaatttatattcaattgttttatctatcttaatatccatacttacaccttatttactacaagaggattgctccccttgcatatttttttattgcagtaaccttaacattaacaattcgtaacccctgccaacgctcctagtcctgcaagtacttcaatttactatttcttttatttttttatagaaagatcttcttttatcatccgaaaagccttttgtatattccttaaaaatttcttctaaagttttatcaggcttttcaaaatatgctttaacaaccttatctataatttcattcttattctccattcgctctacctccttataacatctagagacccaaatctctgaaattgccctaaccatgcaagtttagtagtagttgtttgaccattacgattcttagctgtaataacttccgcaatatttttatcttccgtttctttgttgtaatactcatctctatagagaaaatgaattacgtctgcatcttgttctatagatcctgattctcttaagtcagataaaatcggtctatgatctgctctttgttctggagctcttgataactgagataaagcaatcatagtaatatctaattccttagctagtgacttaagctctcttgaaatatgcgatacctcttgctctctacttgatgttttcattgttgttcttattagctgcaaataatctattattacaacatctaagcctttttgaatttttagcttcctgcatttagcttttatgtcgcttaaaagagttgttgtatcatctagaactaatttccttgccattaactcattagccccaatagaaatgtcctcgaactccttgtcatttagttgaccagttttaatcttcaaatattcaattaaacatttagctgatagtaatctatctgttaactgatcattagacatttctaatgaaaatatagccacacttgcatctttggatgctgcttgtcctatatttagtgctagagctgttttccccattgatggccttgctgctattattacaaaatctttttttatcaaaccgcatgtaattttatctaaatctgaaaatccacttgatagtccaattaaatctccaccattactgaatcttttctctaaatttatgaatgctttttctacagctttatcgattggaacaaaatcatttgtattttgattacttgatattttatataagtcattttcggttctatcgattacgcttttaatatcttcctcataagcaccctctaacatagctttgctcgctctaatcaattttcgcctatttgctttttctttaactatgtttgcataacttgaaacattaatactttcaaaatatgcagttgataattcagatacatatgtgacgcctccacatgcatcaagtaaatctttctttcttatttcctctaacactgtaactagatccgctccaattcctcgattgaataaagatattactatttcatatattttcttatgcttatcaatataaaaatcatctggtaataacatcaactcaacttccagtaatttatctgtattattcattatgcatccaagaattgcttgctccgcgtcaatattattaggcatcatcttatctagaatttccatattacaacgctcctaactttgatttatctattttaactggttctttggtcttggattgaattggaattacatttgactgattcagttcttttaatgggaatattccacgccaaccattcattatgctattttctaaaatagtaattttagtagtatcatctgatgctatggaattaagtttatttaatactttctttagtgctaaagttgttaatgatgctttgatagtttttctatgttttataaattcatagattgtacttcttaaattttcattttttgtgtactcattaactaaaatatcaaactccgttttatctctttttcttttttcttttttatttataatactgttacttatagtacccacttttggacagggttcattttggacatgtccattttgactaggttcaaaagattggcttatttcctcactttcttgaacgtggtcattttggacaggttcatttttacttggttcattttggatacgtccattttgactaggttcaattgttttttgcttactaggattagtcaccaatgtataaatattattagaatatttgcttcctattctctttttttggacagtaattaaccccttatctataagttcatttctacatttgtacatctttttttcagatatacataattcggagcatattaaatcaagagatgggaaggcgtttccacctgctccagcaaaactacatatgtatgcatatactaattttgctccagtagatatactagaatctcgcattacttgtttagggataactccatatccatcttcatatattccagtacaaaaaagttcgtcattcattcaatatccctccatttttaaaccaaaggtaagtacattcgtttattttatatccatgttctaatgcaactcgtctattctcttctatcagtatttcttgaactttatcaaatgttttaaattcaattctaaatgaattaattgggtcttcaccagttaattcaacacttaatgtcccatttactattcttactttctgtgtatttaaaacagctttagctgctgataatattattaattttggtattggatcatatttaatcatgttttcaaattcttcaaatataacttccttagatctagattttgggtacatttcttctaaaaatttcttatctttcttattaacaggctgcttaattccttcaacaagtgtctctatctcttccttcgactctttagcattcaagtccttaatttcttcatgtataatctcttgttcatctttagttaaactgctaagtgtatgagcttgagtgagcgttatttcctccttatcaagcttttctttaagatctggtattaaatccttatctactttcttataacgtccaacttggacgcctgaaagtcctaaatcttttcctataagatctcttgtctttcctcgaagtttttctccattatttctcttttgcttataaatagcttcaagcctctttattccttccattttttcagttggagttaattccctctgctctgcatttgcttgtattagtataagctctgcatccaaatcacttatttctttaacttggcaaggtaatttttcatatcctaaactttttgctgctctatatcttctttctcccgaaagaatttcatactttgtaggggaattagaaatttttcttacaaccaaattatgcataagtccattttctttaatagattctgcaagctcttctatttctctaataccataaaaatttctttgcgatggaactagactatttatatctagttcctgtgtaaatcctttattatctactccatttatcctatctgctatcccctttaaataagacattgttgcatttcctccacaaaacttttatagtccttagatgcatttgctctgctattaaaatagaccactggagtagaattaaaagtactcttaattacatcaacattatctcttatagtttgtttaaatagaatgtttcctaattcatctttaagttcttgtttaatttccctattgattgttgtagctctatccattgttatcaaaatgcctaacagttttaatttatcattaaattcttcgttaattccttgaatgctgcccattagatactcaaacccatctagtgcaaatttatctattttcaaaggaacaataacataatcactagcagctaatgcattaatagacaacattcctaaactaggaggacaatctattaagatataatcaaatgaatcttccttcttactgttaagccatttcttaagccttgtttctctagctttcttagtatccgcaagtatttcaccttcactcataatgagatttatgttagctggaacaatccaaagatttttatatatagttccttgtattggaacatcttcaccagcaagcaattcatatgttcccttagtgctaggattgtacacatttaagtactttgtagcattgctttgaggatcaagatctataatcaagaccttttccccttgtcttcccaactctgctgctacatttacacatgaagttgttttagcaactccaccttttacatttagaaaacttataactttcatatctttacattccctccatttttatatataatggagatacggagtagtgatccgtatctcagacatttgttgaacctttatgtaaggttctttttttattaataccattgttttccctcatgtgttacatgaagccaaactttgctcttaccttccaagaacgcgaatcttaaatattcttttctatattgctctgtaggctttaaatgcttatactcactatctgaatatttgtgtaactgctttttacttccatctgcttttaatacaattattttagtatctacactaacataacaatccttataatcttcatctgtttctgaatctggatgtggtgctatataatctatttcctcaacataatttatggcttttggtactgtaatcattcttgcatctatacctctagcattaaaataattaatgatgaaatctttaaaaattgctttattctcttctgttaaatcctcataacctttaacttgtaaagcatcaacaccatgacaattttttaagtcctctaagcaagtaagcttataatcatttaatccattttctttatatattttttcaatttcgtttctcttcatttctaacactccttacacaatttgcatttagaataattaccacaacaaaatttaatcaaatgaacttttctactctttttatccacaattttgctacgcaatttatggctattgtggataaagtgaggacatttaattttgcacatttttctctttcctttcttttgctaatttttccataatgcattttgcttcaatttcaactattggtgcgtaaaattctttatcagtcatgtctaaaacttcaattatttctcgacttaagcatttgcctgtttttctatcataagtacttcttaaaactcctaccatatttcatcccccacatctattcaatttctaatttttctagagctattactaattcgtttgttaatccagaaagtttttttaaatttcctactatataatccacctgtggcttttcgtcttctgttattttcccatcctcaacaacatcaagtaaggttgtactcatttcattacctgcaccaagcaaattaaaaatacttattgaaagcttataaatattttcaacattttcttgattaattggtatcgcaatatgctgtcctattgggcattcatggcaacaataatgatttaaaagctctggagcattgtatgtatccgaaattaaaagtacttcctctggataaggatttagacttccaagttctatacgagctaatctggttctatctatgccaattttctcagatgcaccttctctactatttagtgaatcattgaactttgctgcttccattcgtgctttatagaatatattatcaacggcttttgtggcttttttggacatgtacttctccttctttcaaagttataatttatttagttgatttgaaatcacatttttaattaaagaaaatttgtacaaactctaaatcacctatattaaaaatttttttaatttcctttaattcatcaacattgaatggattaataccattttctttttttgtataactgtttgttgctattcccagtttatcagcaacatctttctgagttaatttttctttaattctaagtatttttaagtattctgataacaatttaaagttcacctccatgtgatttaaaatcactttatttatctttattatagtgactcaaaatcacaaagtcaaggctttttttaaaaaataatgattataaatcacatttattgattatgaatcacattagagttaatatttagataaggaggattgatttatggtcacatttgctgaacgcttaagaaacgaaagactaaataaaaatttaaaacaaagtgaattagctgactctttatttctagataggagctctatctcaaaatatgaaactggtaaacaaattcctgaaactcctactttagaaaaattagctcatttttttggagtttctattgattaccttcttggaaaaagtaatataaggaattatgagtcgacaagcttaaattctgatatagaaataaagattccagaagaatactccgataaatacaaggttagttcgagagataaaaaacaatatatagaagaaatgaaaaaagctaacgaagctttctttatgaatgatgattttaatgaggaagcaaaaaaagaaatgcttgacttaatgtcagagttattttgggatgctaaagttaaaaataaaagaaaaaagtaataggtggcgggttaatatggttgattatagaaagaaggttcaaagcctcgtaaaaaaatacaaaactagagacccatatactatagctacgggagaaaggatcgaaattaaatataaatacttatcccctagctctcctgaaggtatatttaaaaaggtattgaggcaaaaatacattgttataaatatgactaggataattagtgcatcacatcttaatatggttctagctcacgaattaggacatgcaaaaatgcatgctagtaataaaacgttttttttgcatgatcatactttttatgacaggggccgatttgaaatagaagcgaataagtttgctgctgaattgctaatagatgaaaataaagttgataaactatatttacaaaacttatcaatagaacaactagcttgtagctatggagtttctattgaattaattaaatataaatttacatttaattaaatgtgttcttcatgaacacattaaataatacttttcataactaattcttagtaatccagttatacaatatagctggttaattttatagacttaaaaagaacatacattctgttttataactaatttaaaaggagaaatgagatatgaaagcagctatatatgcgcgttactcatcagataaccaaagagaagaaagtatagatgctcaaattagagccataaaagactttgcaagtcataataatattcaaatagtaaaaatatatactgatgaagcacgttctgctacaacagacgatagacctcaatttttacaaatgataaaagattcagaattcaatatctttaataccgtcatagttcataaattagatagattttcccgtaacaggtatgatagcgctttttataaaaagaaacttaaggataatcatgtaaaattaatttccgtattagaacatttagatgattcacctgaaagtataatactcgaatcagttcttgaaggtatggctgaatactattcaattaatcttagtcgtgaagtcatgaaagggatgaaggagactgctctacaatgtaaacatactggtggaactccgcccttaggttatgatgttaatccagataaaacttattgtataaatgagaaagaagctaatgctataagactaatattccaaatgtatgcatctggcactggatatactcctattattgataaattaaatgatttaggctataagtctaaaacaggtaaaagctttggcaaaaatagcttatatggaatattgactaatgaaaaatatagaggagtttatatttttaataaatcatcaaaaaaaattaatggcaagagaaattcacataaaattaaatcggaagatgaaataataaaaatagaaggtggtatgcctgaaattatatcagaagatctatggaaaagagtgaagattaaaatggacagtaataaaattaataagggtgctaatactgcaaaagctatttatcttttaagcggtcttatttattgtggaaaatgtggttcagccatgactggtaatagaagatatgctggaagaaataagagcctatatgaaacttatgaatgttctaatagaaaaagaacaaaacaatgtgatatgaaagctataaataaagattatgttgaacaagtggttattgatgacctatataataatatattttcagattcagctatagaaaatatagtgcctgatatttttgcatttataagcgaacaaaataaaataattaacgaagatattaaaatttataaaaaagaattagctgatattcaaactaaaattgataatatgctagacgctattgcaaatggtttttataattcatcaatgaaagaaaaatcagatcagttagaaactagaaaaacaacactacttataagaataaatgaagctgaaagggaagcaaaattaaattcaccaacggaagatatgataaaaaaatatttaaaaaaagattctgatataaagcaaaaaagtttggaaaacaaaaagaaagtaatccaaactcatgttcaaaaaatcactgtctatgaagacagaatcacaaccgacacgattgtgagccttattggtggaggcgacgggtgtcgaacccgtgtccgaaagtagattgatttatctttctccgagtgcagtctaagttttaagattccctcaaagtatcgcccttagacaggctatacttctcagtagcttcatgaatacccctctagctcaaagctttgctaggcttcgtttcccactttaatgacaccagtgatccaagccgtaggcaacctgggctgatgaacagctattaaactaagctgctattgcaaaattatcttctgcgtttacatttagtgcatactttattaacgaggctccatgcgtccctcgactcgcttaacaaacccttcttacccccgtcgaagccaaaacgcccccaagttaaagatggtttaataacatattttgttttcaaagaaatgttcatcttgtataacctattctaacttaatagatgctaagtgtcaactggtacattgttacttagttagaatcaacaatcaataaatcctgtattatagcttaaaatcattaaatacttttattaaaagattttacaaattttaagttttaaattaacaatcaaaggataatatttattataaattttatcctttgatataaatcaacaaatcttaatttactttatttctattgcaaccattgtgcaatcatcttttaattttccaatttctaaaatactatcacttaagaaatcatctaagtaattcttaaattcaaatatgcttgcatctctcatatattcttgtataactttatcctcttctagaataaaatctaatccatcagtaaaaaagaaaattttatctcctgattcaaaaaagatcgtttgctcacagaattcactattatcaaacatacctagaaaagatccttctacaatcttctcttctaaactttctccttttttttgaaaaagaaattgattaattccggctccaactactttaagctcattactattaaaatccatgctaaaacaacatacagcaacataattttcttcataatattttactaacttcttatttaaattttttactatctccattggatcatggtgacccttattaacttcttgaaaacacaaaatatcaaatgcagaaatatttagagctgccgatattcccttacctctaacatcaattatcattccaataataaaatcttcgtttatttcataaattctatagaaatctccactaattgtatgggctggcatatacacactcatagtatcaataaatttttgagcaggaaattctttttgaagcgtactcctttgtaactcagcagctttctttatatctcgcttcatttcagtaatatcccttattgctgccaatatggcttggttaccttcgtataatatgtagctatatgaaacttgaacatttattaacttattatttggaacgtagaagtcataatcataaatttctttcatttttcgttcagatattatatttctaaatactttatgcaaagcctttttatatttgtcttcaaaatgtctatatacattactcccaatcaaatcatcataaagcgttgcaaacaaattacaggcttcattattagctaaagcaattttattatctactataataattacagcatcgggtgaattatcaattatttgtttatatcgttccctgctatctttagttatgttatcaagcatttttttctctgttatgtctctaagcctctcaacaataaataataattctccatttttatctaacaccggattatagcatacatccataaatttatttaattctggaatatatctttcacgcgatagcattttcttagtcgccactacttcttcaaatgagcaatctaagcatttttcgtttctagatagcacctcataacacatttttccctttatttcttctgatgttttattataaaactcataccctgcttcattaaaaaaagatatagtataatctgtattgtatacttttattacatcaggtattccatttaatattcctttaagctcttcttctaatattttgtattcagtaatatcagttgcaattactaaagcaaaatctttttcttcatgactaaatatagatatattagatttagcgtaaatacgtttttcatcctttgcttttaatgtaagctctattttatcgcatactctcttattacttaaattttcaaatacactaatcttatcttctatattagttaagttcaaaacatttgaaggtaaaattttaataagttcctctctagaataacccaatttactacaaactttattattaaaatctataaagttctttggaacaaattccttgctaatctcaattacaaacactaactcatttaccttgtcccaaatttctttgtaattactttgacttatttctacgctttcatctaatgtttttatactttctttaccctcacgcatacaatcgaaagtcctttctatctgaatttcacttcataaaaactccagatatttttacggacaaatttcaaataccttatctaaccttgttaatttaaataacttctcaacttctggctttagtccttttaattttatacttccattcttttcagcgcattttttataaacagctactaatgcaccaagtccggtactatctataaaattacaatcattaaaattgaatataaaattcttttgtccttcatctattaatttatttacttttactctaaaatttgcgacttcatcaacaacaaagtcttttggtatacttatttccatcaattatcacctcatattttaaatctttctacaagcttagttaattcttctgccatagcgcttgtttcctgtgctgtagctgttaaattattaattgcactagcttgttcttctgctgccgaagatacattttcactatttgacgcattgctttctgttactgttgctatatcatttataagcccaattaccttatcagacgatgctacttcatcaccagtaatatcaagtatctcagtgacatgtttaactatattttctattgcattaatgatatctacaaatgctttgtctgtttctgatactatttttactccattgtttacttctgacttagatctttccattgctattaccgcattctgtgtttgctttaccatttcactaactagtacagcaatctctcttgccctatcatttgattcttcggataatttacgaacctcatctgcaactacactaaatccctttccatgctcccctgctctagcagcctctatagctgcattcaatgctaaaagattagtctgctctgcaatagaatttattatgtttataataccatctactttactcgataatccacttaaagattctaatgcctgcgaagtttcttcactgcctttacttataatatccattgcctttacagtttcctcaactttttctcttccaagatcagctgctgacattgtattagctgcatttgaacttgtagctttagctctactttgagctaattgaacaagacttgaaagctgaaccaacacttttgaaacatcaactatggattcattttgtttttctgcatcttgcgccacttgattaactgtagcacttatttcttcagttgcggcacttatttcttctgaagaagctgccatttcttctgatgctgcattcaactgttctgctgcgttagttacatttcttactattcgatcttgatgctttatcatttcattgaatgattttccaagttcctcaatttcatctttgctttgtatatcaatcttaacagttaaatctccttctcctgcagatctcattaatctctctagtttcttaattggattaattattcctattgttgaatatgtataagcacatatcattgctataatgattgatattaaagaaataattattgtatagttccttatacttaaagctgctgacatatattcgtcatattgcgctgtgactgcaatcacccaattaccaacaggttggaaaacaacatatttatatatattcccatatgtatagaagccttctgaagattttccttctttcatttcctgaactaaaacttttaaatcttctcctgcattatcatttgcattttcttttaggattttacttgaatctggatgataaacaattaacccagttttatcaatcatatatgcatatccacttttaccaacttttatttgagatgcataacttgatatactatcaaactttatactccctacaagtgtaccaatcaatttaccattttccttcaatggataagctataaaaatagctggattaccagtaaatctagaagttaatacttcactaacaacttccttaccgctactaagtacttgtttcatataatctctatcacttaaatctatatcattctcttttgactgagtatttacaattaccttgccataagcatctgtaataattaatacttccataaaatctttatttttctcttggaccgctcttatatattcagaagctgtatctagattgcttgtatttgaattttcaaccgcttttataatatcgccattcaaacttgcaacttccaaagaatgttttgttgaatctatcgttttatttattaaattagatgtattgtaagtctgttcctttaattgttcttgaacagccgtttgtatagatgcgctggacattctatacgaaatatacccaagtaaccccattggtaaagaaatgagtataaaaaaagtaatcataagttttatctttaaagaaattttcatctaattgcctccctagcatgtacaatattcattaggtatcaattactaaccatatatcaatctatatgtcacataaaagactcttacgcataattatagaacttccgtctaaaattagttcatcagtataacaacttataatatacaagcctctacctgattcatctaatatattctcttcgtctattttcttatgcaaatttatattctcaaatccttgcccacaatcttttactataacacttagtaaattatctttcaattcccaatcaacataaattggtttgctgctatcactactatttccatgaatatacgcattattaacggcttcaaatattataagtttcacttcaaaagattgtttttttaaatccaaaacctcaatgatatcattaaccttcttatcaagaccatctagtccataaaatatcactgatccttttgttactgacatattaactccccctcttttacatagttaaagtattttttcataattaactaaaaattctacttatcttatcatttttcattagtattaactaatttttccaatcaattaaagataaaatatccccattacattattacacttatttcatctgctttcaacatattacatcatatccattggtttttttaatatgctatattgtatgaaatataacatcttcaaaaaataattttcacaatatattttcatatgaacttcttttaatcaaaaaaacataaagtgataatttattttcaatatcactttatgttttatatgattcaccttctattgtcctagttttattttataactaatcatatcattagtttgtatttttcatttaactcctaaagtctatatcttcttaaagttaataagtattactatatcttaaatttttgtaccatttcattaagtttttgagcaagctctgcttgactttgagctgttaacgctacttgttcaatagcttttgttgtttcattcatactatcttttatcatttcagctccttcacttgatttttgcgatgtttgtgccatattttgaattgcttcactaacttgtccaactgtagctgttatttcttctgacatagcagcaatttcttctgacatgttacttacaaagtttgaatcattatagtacttgttacctacttcactataatcattaaattgttcttctacatttttgcttataaactccaatatatcactacctgtgttgatgctactattaaatgctaattgaactttattaattgtgtcttgaatatttattactgcatcagatgattgctctgcaagttttcttacctcttctgctactacagcaaatccttttccttgttctccagctcttgcagcttcaattgccgcatttaatgcaagtaaatttgtttgttctgctattcctccaattgtttctgccataacttttatactctctactacttttccatcttctatggctttttgcattttttcttgcttttcaatgtataatttcctagtttcattaatagctttttgactattatttttaacttccatagattttttcttagactgacttgcattattgcttccctccatagccttagaagaaagtacattaacgcttgaatctacttcttcaatagatgcacttatttcctcagtagtcgcgctagattcttgcattgcagaggcaatattatctactgcttgatctatggtattggcctttgaagatatttcttcaactgttgctgaaagttcttctgagcttgcacttaaatcctgcgagttttccataattactttaaccagtctacttacattttcttgcgcagtgtttaaagctacgcctgtttgtccaaactcatctccccttgtaatcgtaatcgcattagcgaaatcataggttgataatctttttgcaaagtcctttatctctcttaatggattcaatatattcttgcttaacatatatgccataaaaaggattattaaaaatgctcctgttgtaaaaattaatatagtatatcgaacactcttaaattgagatatattatttaaattagcttgctccgcagcctttgcatttgcatcaatatttttttgaatgttttcaagtaaagaatttttaattgtggttaaatcggaattgctaattttaattgcttcatcataatccccggttttcgcaaattcgattgctttatttcttacttctatatattttgctaaatcatttttcaaattattataagtttgtttttcgtctgacactgtaattaaattttcatattctttcatactcttgtcattttttatgtctaaatcatttataacctttagataatcatctagttttgttttatctctttcgaaaactaatctattatatgtagctctcatgtcatgaatatttccctttatttctcctaagtctttaatagatattaaattatttctatacaagacatctgcattatcatttatttttgcagagcttaatattccttctgttcctattgcggctataaaaatacaaatcacaaagaacactgaaacaagtttcttcttaacacttaaattaataagaattttcattataacacttcctttttttaataatatatccccaatttttcgtacagaaattaatttaaataaaataatcctgcaattataaatacatagttattttccattataaactctagtcattttttatcgacttatttcattatttgtaataattttacaccatttcaaaatatatttcaatattcgctatataattactacaattaaaaacagggtttgctaagcaaaccctgtttctaaataaaatttgtattcttttagactaaactaatcaataaataatatcataactttattcttatttttataaattaactatgcagtagctgtaacactttcttctacatctacatctttttcatttactaataagtttacaaacttttctccataagggaggcagaattgtataaatggtccagttgttatcattgctatcacagtaccaagaccaacttttcctcctaatataaatcctattattaaaaatccagcatctagtgttattctaatccaacggtattgtaccttagtcttatcttgtattataaatggaacaatatcatttggggctactcctacgtttgttgctgataaaactgcaaaccctattgcaattattaaacatccaaatacaaccaataatgcctttataaaatagttataagattcaactgggaaatatgaaacaaccttcactccaagatctataattggtcctactcctacaacacaaattaaagttcctatctttatacgcgatctctcaactaagagtataacagcaaatagtacaatcaatataatcatatttgctacccctggcgttacctgatctgctccacttatcatcttaactacagaaaaattctttaatcctgttttatctaatgcaaacgctaaaccttgcgtaaatacagtaaatggatcagagccaatattagtcttcaaaaataatgctacaccaaactgaattatactcattccaacaaaaaataaaataattctttttaataagttcattgctttattcatattatttcttccttttttattataatttattgctacatataaactgaataaacataaaatagatataattatgtatcactttttattatataattttctatatataatcttaaataatatgcacatgtacaaacataaaaccattttactatctaccatccattttgtcaaaagaaaaattcattttcattcattttccaccatattaattcattgtatataaaacaatttaatttacatttgagtataaaaaaggatatttgttctaatggcttttatttttagccattggaacaaatatcctcttattttatataaaatattagcttaagtatatatcatattagttactgaaacctaatgaaaatcttattttccttgtaaatagtcatctatagcttttgctgcttttttaccagcacccatagcaagtattactgttgctgctcctgtaactgcatctccaccagcataaactgcttctttagtagtaagacctgtttcttcttcagctacgatacatcttctcttatttatttctaatccttgagttgttgatgagattaatggatttggtgatgttccaagtgacattattacagtgtctacatccataacaaattctgaacctggaacttcaactggacttcttcttcctgatgcatctggttctccaagttccattcttacacatttcattcctttaacccatccattttcatctactaagatttctgttggattagttaatacatcaaagattactccttcttccttagcatgatgtacttcttctactcttgctggaagttctgattcacctcttctataaacaatatgactttcagatccaagtcttaaggcagttcttgctgcatccatagcaacatttcctccacctactactgcaacttttttaccagatctaactggagtgtcatatccttctaccgctgccttcattaagtttactcttgttaaaaattcatttgctgagcatactccatttgcattttctcctggtattcccatgaatcttggaagtcctgcacctgaacctataaatacagctttgaatccttcatcttcaaacaattgatctatagttatagttctgccaactataacattagtttctattttaacaccaagtttcttaatgttttcaacttcatttttaactactttttcttttggaagtctgaattctggaattccatattctaaaactccgcctgctttatgaagtgcctcaaaaatagttacttcatatccttttttagctaaatctccagcacaagtaagtcctgcaggtccacttcctataactgcaactttcattccatttttaggttctgttgcacttaagtcaacattatgtgacgctgcccagtctgctgtaaatctttcaagcttaccaattgatactgagtcaccttttattcctaaaacacatcttccttcacattgcttttcttgtggacatactcttccacaaactgctggaagtgagctgtattttgaaatttcttttgcagcttcttcaaatttttcatctttaacataagaaatgaatcctggtatattgattgatactggacatccttctacacacttaggattcttacagtttaaacatctagaagcttctttagttgcttcttcttcgttatatccaatacaaacttcttcaaagtttgctgctctaacctttggatcttgttctcttactggtattctaactaatctctcattcatgtccattatttatcacctctgcaaccacagccaccgtgactatgagtatttccttcttcaacttctaactgtgcttttccttcttctgttttatacatagcttgtcttctcattgattcatcgtaatttactaaatgtccatcaaattctggtccgtcaacacaagcaaacttaacttctcctccaacag

SEQ ID NO: 19 - DNA, 80820 bp, Clostridium beijerinckii
ttacatatagattaagcatttgaattctaagtagataaaataaaatttttataaattaaatgttgtgtatattgtatagacaagcaatacagtatatatttttctagataagattatggaaatttagactttgtataaggtaattgaggtataagaaccatactaatgatataaaaaagaatactaaaataagtattacgtttggataagcaatttataagcagattatattacaaatgccatataaaagtatttgaatagaatataagaacaagaaagtagttatgacaacatatataatagtgtgctaagattgaataataagatagtaatgtattacaataatgttattgcaactattgaaatcgtataataattagaggatgattaaaaatgaaagttgatctaagcaaaattgttaataataaaaaaatcacaccgatagaagaacaagtattagaatatataatcaataatattgatagtgtaatggatcttggcgttagaggggttgctgctgaaaactacacatctacatcaactattatgagactttcaaaaaaattaggttttacaggatttatagatatgatttataatataacaccactaatagatggtggtggcacgggaattatagaagagtcagaagcattaataggtactgatattaagtttttatctaaatatacagatgaggaaaatgtaaaaaggtttatagaaatattagcaagtggaaccaaaaagtatatttttatttatgcaagaggctactctgaaatcactggagaatactttaacaaaaagctgcttggggtagggataaagagcatattaatagattctaaggggagttttgaaaataatctagaagacatggaaacattaatagtaatatcaaagtctggagagactaaagaagtattagataaggttcaagtggcgaagaagaaaaataaagtagtaatttccttcacaaaggaagtagaaaacagtatttcagctctttcggatatttcatttaagatatttgatatgcataaattagatgacagtaatgtgctgcctaactcgttttttgcaaatatgcttatgtttatggaatacttaatctacagatattatcaagaaacaagaaaagaaaataaatagtcaaattaagaaacctgttatcttttaagctaacaggtttcttaatgcttgcaatctatttcaattaaatgaaaacgtatatataatgagcctatggatgacacaataattgataagaggtggaatatatgaaggataaaattatgaatgctatgcaaagattttctaaggctatgtttattccagtattaatacttccgattgtaggtatattaatagcttttggaaatattctcacaaataccaaattagcagaatatgcaccgttcttaaagaatagtgtgatatttggatttggaaaaatattatcaggatccttggttcctatactatcaaaccttggaataatattctgtgttggtttagctgtaggacttgcgaaagagaaaaaagcagaatcaggtttcacatcagtattagtatatttaatatttaataatgccatgaatattttcttgagtttatcagggaagttagtaaatccagataatttaagaggttctggtcaggcgattgtactagggactcaagttttggatatgggagtttttttaggaataattttaggtatagtggtagcgtattttcataataaatattgcaagaaagaatttaatggagcatttcaaatatatgggggttcaagattagtattcttaatattaattccagtagttgttgtattagctgttatactttcttatgtttggccatcagtacagtggggaatatcaagtttaggatattacatacaaaagagtggtaattttggagtatttatgtatggaacactagaaagacttttaataccaacaggattgcatcacttggtatatactccattcttatatagtcagcttggaggaatagagactatagggggaaaggcgatagaaggagcaagaaacatttattttgcacaaattgcagatccttcaattaaagttttatccagtacagttatatgggatgctagaggattatcaaagatgtttggattagtaggagcgtgtttagcactttatcacacagctgatgctgataagaaaaagaaggctagagcgattcttataccagcagcagtaacttcaataatagcaggtgttacagaacctatagaattttcattcttatttacagcaccaatattatttggggtacatgcagttttaagcggtcttggaatggtaactttaaatatattaaacgtaagggctatagcacctaatggatttatagatttcttactttataatttaccattaggtatagagaaaacaggttggccaatgtttattttagtaggtgtagtgcaattcacagtttactatgtaatatttagatttctaatagttaagcttaacttaaagactactggaagagaagaaagtaatgaagaagttaaactttatactaagcaagattataaggataaagtaacaggaggccaagggtctggagataaagaatcaacatcaggaaatgaagcacttgtaataatagaggccctaggaggaaaggaaaatattaaaaaagtagataactgtttcacaagactaagattaatccttgatgacacatcaaaagttgatgaagctacattaaagggaacaggagctacaggagtagttaaaaaaggagaaaatgttcaagtaatttatggattacatgtaactagaataagatctatagtagatgaagcactaggaattgtaggagaataataatataaattgtagaaatatttgaagaataatataaattaaaggaaagaggtaatatatatgaaaaaacattctattgttattgcaggaggcggaagcacattcactccaggaatagttatgatgctattagataatctacaccgttttccaattagaaaattaaaattatatgataatgatgctgagcgtcaaggtgtcattggtgaagctttagaaattgtattaaaagaaaatgcactagatatcgaattttcttatacaacagatcctaaagaagcatttacagatgttgatttctgtatggcccatatacgtgttggaaaatatgaaatgcgtgagaaggatgaaaagattcctttaaaatatggagtgattggtcaagaaacttgtggagcaggaggaattgcttatggaatgagaagtataggaggtatgttagagttaatagatttgatggaaaaatattcaccagactgttggatgttaaattactctaacccagcatcaattgttgctgaagcctgccgtagattaaaaccaaattcgaaggtattaaacatttgcgacatgccggttggaacacttcgtcgtatggctggtattgtggacttagaaccaagtgatttggaagttaaatactttggattaaaccactttggatggtggactagcgttaaagataaacaaggtaatgatttaacagacagaattaaagcttatgttgcagaaaatggctacttaacagtaaaagaagtagaaacacaacatacagatccaagctggcaggaaactcataaaaaagcaaaagatttattagcagtagatccaagatttttacctaatacttatttaaaatactatctatatcctgattatgttgtagaacattctaatgcagaatattctagggcaaacgaagtaatggatggaagagaaaaagatgtatttaatgcagcacgtgctatcacaaaggcaggaacagcaaaaggcggagaattccatattgatgctcatgcaacttttatagtagatttagctagagcaattgcctataacacacatgaaagaatgctatgtatagtagagaataaaggtgctatttctaattttgattctacagctatggttgaagttccatgcattgttggaagtgatgggccagaacctttagcacaaggagaaattccacaattccaaaagggattaatggagcaacaagtatcagtagaaaaattagttgttgaggcatggattgaaaatagctatttgaaattatggcaggcacttactttatctaagactgtaccaagtgctagagttgctaaattattattagatgatcttattgaagttaataagggctattggccggaattaaagtaggagtatgtatgtttaagaatttgtttaataaaaataagaataaagtattttatgcttttgctaatggtgtaagtgttgacctaagtgaggttaatgatgaagtgttctcacaaaaaatgatgggggaaggagttgcgattaaaccaagtgaaggaaaaatatattcaccttgtgatggaacgatagcggcagttatgaaggaaagtaagcatgctgttggaataaggaccaaagatggagtagaatttctaattcacgtgggaattgatactgtagctctaaacggagaaggttttgaactatattgcgaagaaggaaacgcagtaaaaaaaggtgatcttcttttaagctttgacagaaaatttattaaggaaaagggcttagacgatattactatgctggtaatatcagaacttaataatcataaaattgtggatattcatattgatttggatatgaaggtaaatgagataatcctactagagtacaactagtttgttaaagatacaataaattaaaatgataaattatgaaggttgatttaaatgatctagagtataatatgcgaatatatgctctagattattttttattctctaagattatagttgttaaataatcctttgtataaatcaatatactggcaagagagtcaagtctatatactggagtgacttacgaaagtgataatgtttatataatataaaaaacaaaatacgaaagaagtcgagagattttataatttttatgctatatttttacaaaaaatgtaaaacaagtgtgatattgtatgtaatgtataaatcgtaattacattatatacattacgtagaatggggggatacgatgaaagatgctaccataatgctcagagttacaacagaacagaagctagctataaaaagaatggctagaaagcaaggaatgactattacagaatttatgctatttaatatgatgaaatcgattagtgaatctgaattatctgaaataaatggagatattaatttgaatttagaatccaaaaaatagtaagttgatcttgagttttacctgcttgtatataaagtatagacaagcaatacattgtacaaatactgtttaatggcctaaggtactagcagtatgatagctatataaactacatacaaaggaatattaatggagaaacatttcataaggataaataatttttaggtgaacggtggtataaacgccataaaaagatattcaaatagaatgtaaaagtaaaaaagggggattaaaaaatgagaatcagtgcagacataggctacaatacaacaaattttattggacataacatagaaggctccttttcatcgacagtaaaagaaaagatgcacgagttagagacggctaaatatactgttgagtacaacaataaaacatatttaattggtaatgatgatggatttaccagcatagaacattcaagagataaggatattatatttcatatttgcctatatacagctatagcagctacaatgagttcaacaatagataacaatgtaagggttataacaggacttcctgctcaattttttgcagaacaaaagaattctctgataaaagctcttgaaaatagacgagtctttatgaaacttaatggagaaaatagaagttttacaattaccaaagtaattgtatttcctcagtcggcaggattatttttatatgataaatcattagtagaaaaggatacgctagtagtagatataggtggtggtacactagatatagcatatatgagcaatggccaatttaaagaaggtagaacgtatccattgggagtgaatccgacatatgatgtacttctacaagagttaaccaaatatggagtcaactactctaatcgtatgaaagcagaacaaataattgcagataaagctatatttgtagaaggaaaggaaatagacgtaagcaaggatattgataatgtattaagtttgagagcaggagaaataataaatgccataaaacaggcatttccagagcaatcgaaatattcgagatttgttttcataggtgggggagccttattgcttaaaaattatttaaaagactatagagtattagatgatgcacagatgattaatgtaaaaacttatgacataataggtaagagtaagaatgtgtaaaaagttaaaaactacaattactttagctccccatattaaggaatttgcatctaaagaagctaaatctctgggtttagatttttctgcatatataactgtactaataggtgaaaaaatgagaggtactatgataccttcaacgattaaaaaagttagtgatgataaaattgatgaggcagctatatccatagacgaaaaagaatctataaaaatagatagtgagcaggaaaatgagatagatagattgcttcagtggtaaagaacagatgaaaattttcatctgttcttatgcatctcattattaataaaaggatatgaatttatagttgctggattatagaaatttatatgaaatctatgtaatatttcacaaaaagtaaaagaactaatataatttattgctcttagtatgtataatagtaattaagtaatgataaaatgaaattttcattgaaataaattttgattttatgcttactacatgatataaattaatttaaaatatttactatagatataactgtttaaagggggagtgagaatatggaagttgttttagaacagtttattccatcagataagcctaagagaattagtaacatactccaaaagatttcaattgtttttttagtagttggattaatgattgtttttgcatcaccaataatcggaatagcgctaataatagtagcattaatattttttgtgggaagttactttatgtatattgattatgagtatgagttatataatggtgatataacaataactaaggtctacaatgcaagtagaagaaagattgcccaaaagattagtagagatgatgtgagaaaagtatatcttacagaacggaaagatgctcttaagagcggggtggcagcgtattataatactaatataaatggactaaagatttatacttttgaattaaacaacaataaaataatacaattagccttaaatgaagaacttgaaaaaatagtcaagataatttatgttcaaaaaattacattttaaaaatacagtatagttaataagtgtattccttaaactacaaaaaggagtacactttttttatgttctaagaactaattgttttatatataaatttaattcttaaaattagcaataatagtgggaacagtaccacataagatgaattatagttttcgaaaatataaatcatatgaatagggaggcgtaatggataatatattagaaactatgcattgtacatggggggaaaaggaaatttatataatttattatttaggtaaaaaacgtattgacacattatatatggaactggtatcatattaacatgaaaacggttttcgaggttaattgaattaggaggggacattaatgaaggaacaaatagtagcaaaagaaattctagagaatattggtggaaaagaaaatataaaatcagtagaacattgtgcaactagattaagacttatacttaatgataaggaaaaaataaatgaaaaagctattgaaaatattgatggtgtaaaaggacaatttttctcggcagcgcaataccaaataattcttggaacaggatttgtaaataaagtttatgatgtcatagttggacaaaattctgacttagtaactggaaataataaagaggaagcttatagccaaatgacattaattcaaaaaatatctagaacttttggagatgtatttgtacctataataccagtattagttgcaacaggtttgtttatgggactaagaggtcttttgacaaatctaggagttcaaatgaatgagaattttgttctctttactcaagtattaacagatactgcttttgcatttttaccagcattagttgcatggtcaaccatgaaaaagtttggaggtacaccagtaataggtatagtaataggattaatgctcgtatcaccaagtttaccaaatgcttatgctgtggcagcgggaacagcaacgccaattaatctaactatactaggattaaatattcctgtagttggataccaaggatctgtattgccagcattagtattaggaattattgcagctaaaactcaaaaggcacttaagaaagtagttccagatgtattggatctaatagtaactccatttattacattattattttcaatggtactaggattattaatagttgggccaattatgcataatgctgagcaattaatatttggagcaatcaaaggattcatggggcttccatttggattaggtggactagttgtaggaggagtacatcaacttatagttgttactggagttcaccatgcattaaatgctttagaagttgaattactatccagcacaggaaaagatgcatttaatgcaatgataacttgtggtattgtagcacaaggtgcggcagctttagcagtagccgtcaaaacaaaagataaaaagaagcgctcattatatatttcatcggcaattccagcatttttaggtattactgaaccagcaatatttggtgttaacttgagattcataaagccatttatatttggatgtgcaggaggagcagttggagggatgctttcaggaatacttcacctagcaggtacaggaatgggaattacagcattaccaggtatgctattatatgtgaacaatcttggaagttacattttagttaacgttgtggctatagcggttgctttttgtttaacattgttcttcttcaagccagaagaataggaataataataaatatttagatgaattacagatagatttagtagggataattttgcttgctaaatctatcaagctatataaagttatattttatatattaatatccatataagtttataagttatcttttcaataatatgtattaatgatatataataatatttatataaaacatatatggaggataatatggatcgaaaagtcacaattcaagatattgctaatatggttaatgtttcaaagagtagtgtttctagatatttgaataatggatatgtgagcgaagaaaatgctaagaagataaaagaagcgattgaaaagaccggatttgaaactaatttttttgcaaagagattaaagactaaaaaaagtggattagttggaattgtaattcctagaatcgattctgttacaataggcaaagtattaactggtatcaataaaaaattaatggaaaatgattatcaaggaattattttgatcagtgaattagatatagagaaagaactagcaaacattaatagcctttatcagcaaggggttgatggaataatcattaattctatggctattactaaaaagcatattcaattaattagtaggcttagtattccaactatatttacaggacaaaaaaatgagtttactaattatataaagatagatgattatgaagcaggaaaaatacttggaagttattttaaatctaaggggcataaaaatatagtgtttttaggagtaaatgaatgggatatagcagtaggagtggatcgtaaaaatggattcattgatgccgtgaagaaagataatccagattgtaatgttcaatttgttgaaactgatttttcatttactaatgcatacagtaaggctagccagatattagaatataagcccacagcaatagtttgtgcaactgataatatttgtttaggagtacttagatatttacatgaaaataatattaaagttccagaagaaatttcagtagctggatttggaggatatgatataggaagtgtttcataccctacacttacaacagtagcttttgattatgaattaattggtataaaagcagctcaaggaattctagatttaatagagggaaaagagttagaagagaataaggatacttccttgaggctaatagaaagagaaagtgtgggtgggattaattaaattaataggagaagaggaaagatgccaaacccaaaatcataccaggaaataaaccaaaatttaaataattattacagtaataaagaaacgagtatatggcgaaacaactttcacattgagatgccgtttggtctgatcaatgacccaaatggattaagttattacgacaataagttttatatattctatcaatggaatccatttggatgtgagcataaaacaaagcactggggattagtaacaacaaccaatttcgttaactttactaagccccaaatagcgttaaaaccacaagattggtttgatagaaatggatgctattcagggtgtgcattgattaaagataatgagttaaagttatactacacaggaaacgtaaaaggtccaaatggtgaaagagagtcatatcagtgcttagccacttgtaataaagatggaataatagataaacatggagtaattatagataaacaaccaaacggatatacagctcattttagagatccatatgtatttatagaagatgacacttattacatgatattaggtgttcaaagtgaagacttaaaaggaagagctttaatttatgaatcaatagattcagttaaatggaacttgcttggtgagttaaaaaccgatatgaaggactttggatacatgtgggaatgtcctaatataataaggataagtaaaggcaaacatgcatttatattttcaccacaaggtttagaaaaagaagaattgaaaaatcaaaatttatatcaggcagggtatgtaattggtgagctagatataaagagcgttgagcttaaaaatcatagcagatttaaagaattagatatgggatttgatttttatgctccgcaaatatttaatcataatggtaaaaatataatggttggatggataggaatgccagatagggactctgaatacccgacgtatgagaatggatggatgtattcattaactatgcctagagttttagagtataagaataatgtcctttatcaaaagcccattaatgaaatgagaaatttaagagaaactcaattaatagatattaaagggttaactttgaataagtacaatttagctttagagtctcgttcaatagaaataatgatgagtatagaagttgaggatattgaatctacagaagttaaatttaaatttaatgacgaatatattctgataacatatgataataaaagacaactatgtacagttgatagaagtaatatgaatattggcggaaaaggcataagaaaattcaaattaaattcttcaaaagaactaaaaatgaatgtattcattgacaattctgtgatggaaatatattatcaagatggattagaagtaacaacattaacatattaccctaagagtgaaggattagaacttcaaataagaaatgatagcaaaattacaattaatgagctaaatatgtggaacttaaggagtgtgaagtatgaataataatgttttttgcattggggaacttttaattgatatggtttgtgtagataataaaggtttaaaaaatggagagaaatttgagaaaaaagcaggtggagcaccagcaaatgtagcggcgagtatttgtaaattagaaggtaatgcttattttttaggacaagtaggtaatgatttttttggtaagcatttagttgagttgctaaaaagcttgaatataaatactgagatgaccgtagaaagaggaagtacaacaattgcattagttggaattgatgcaaatggtgaacgtaactttgacttcttaagaggtagtgatggggaatattcgcttgataatatagatctatcaaagataagtaattcagatataattcatttcgggtctgcaacgggatttttagagggagagttaaaaaagacatattttaaactattagaatatgcgaaatctaataacatatatgtatcatttgatcctaattaccgcgatgcactaattactcaagacaagttagagttgtttgttgaggattgtgttaaattcttgagatatagtaactttacgaaactaagtgatgaagaattatatttaataacaaaagaaaaagatatagaaagcgctgttaataagttacatgaaactggagttaaggttgtaacagttactttaggttctaagggcacatacttaagtgttaatggaaaaaatgaagtaataccatctataaaaattaagcaagtagattccactggtgcgggagatgcatttgttggagcagtattaaggcaggtatccgatattgatgacaaagagagtataagttttgatagatggaaagagatagtttcatttgcaaataaggtaggtgcaataacatgcaccaactacggggctatagcttcaatgccgacactaaacgaattaaattaagccgagttagatgaattcatatataggagggagatattttaaatatatcccttctatatttttggatttttatttgattattgaatataagttgataataatgagtatgaaacttatgattttatatttttattatatgatagaatattgagaaaggaacatatataatattaaaaatatttagtcaagaaaattcatgatgggagcattacaaatggttgattttctaaaaattgcaaaagaagaagctaagatggcaatgaaaaaaggggagattccagtaggagcagtgattgtattggatgataaaataataggaagagctcataatttaaaagaaaccttaaatgatagtactgctcatgctgagattttagctattaaagaagcttcgaaatttattggagattggagattaaatagagctgaaatgtatgttacattagaaccttgtcccatgtgcgcgggggcgataattcagagtagaatatctaaagtatatataggaacatttaataaagatatgggtgcttgtggttcggtaattgatgttacagataataaatggttaaattcttttgtaagtaccaaatggctatatgataaagaatgttctgatatcatgttggagtttttttgccagagaagaaataagtataaataaattataaaaaatatatatagttaagaatggaattaattttaaattttattgcaatatagaaataaactatgcactttaaatcttaaaagtattagatttaaggtgcttttcttatttaaagagattagtaaagatataggtagttagtgagagccaattggaaatatggggaataaaatcacatttttagaatattatgaagttgagatataaaaataaatatgatatagtaatagcaactggtcagaccactataccaatgatttttaaacaagaggtgatttttagttgaagtatttaaagcagttaatgattattctagtatcatattttttaggaacaatagtacaagtagtttttaaattacctataccaggcacagttttaggtctcatttttcttttcttagctttatattttggaattgttaaagttgagatgattgaagatatatgtgaggtattaataactcatatgtcattcttatttatcccagcaggggtagggttagtgacatcatttcaagcaattaaaggcaagattatacctttctccactataattgttatttctacatttgtagtttggattgtgactgcctacgttgttaaatttttaaggaaggtgacttcaaaatgaatgatatgataaattcacctgtttttggagtcttaatatctattattgcttatgaaataggtcttttaataaaacaaaaacttaagctttcaatatttaatccattacttatagcaatagtaattctgattacatttttattaaaatttaatattaagtatgatgattataatagcgggggacaaataatttctttctttttggctccggcaactattgcattagcattaccattatataaaaagttttctttgtttaaagaaaatgctttgcctattttatcaggtattttatttggagccgtatctggtatgatatctgtaattctgctttcgaaggcatttaatctttcaagcgagcttacaaaatcattaattcctaaatccataacaactcctataggaatggcattatctaaacagttaggagggcttccttctgtagctgttgttgctattataattactggaatattgggttctatcattggaccattcctatataaaatattaaggataaatgataaagtagccatgggaattgccatgggaagttcatcacatgctgttgggacagcaaaagctatggaaataggtgaaattgaaggagctatgagtagtttgactattgcaatttctgggattgtgactgtactgatagcacctgtattatggagtttattttcagtatttttaaattagttaggggggattatctttgaatggagataaaaataactacaaaaagggagagagtccaattaataagttatttagttctattgataatttattaattgaagagagagaacagaggctaaaagtaaagttaggaaaagagataaaaaatagcatattcacagatgaaattataatgaagcttaatgaaaatgacttctctggtttaattgatgaggaagataataatatggcgatgcttttttcaagtatatttccagtatttataaaaagtagagatgttgtttttagactgtataagcataaaatagaagttaatttatctgatgaaatgagcgatagatatatttatatcttttctgatgggaggttgacctctggattatttcaatgttttaaactaagtgatgatgaatatgtatatggaataaagagaataattgatagtattcctctttttaaaattgctattatgaacacattggatagctttagaaaaaatattagtatacataatcataaaatagagaattcaaaaaataaagaactgttagcagaaaaaaattacaacgaattacttaactacttatcaaaagcaaacatataaagttttgagaggatgatatcgatgttaagtcctgtgaagagtacaaaaatatatgaaatagtaatagagcaaataaaagaaattgttaaaagaggagaactaaagagtggagataagttaccatctgagagagatttatgtgagaagcttgaggttagcagggcatctgttagagaagcactaaaatctttacaaatgcttggacttatagaatctaagcacggggaagggaattttatcaatgaaaattttgaaaatagtctgcttgaacctttatctattgtattcttacttctaggaagcaaaagtgaggatgttcttgagcttagaaaaataattgaaccagaaacagcagctatcgctgctaaaaatataactgatgaacaacttatagaattgaaggaaataatggacgaattaaataataattcagatattgaagcctgtgctatattagacaaaaaatttcattataaaatagcgcaagctactggcaatcacttaatttcaactataatgttttctatatcttctttggttgaaaaatatattgaaaattcaaaagttcatactattaataaaatacctgtaaaaaatcatcatgaagaaatatggagagctttaaaagatcatgattctaatgcagcttcaattgcggcacaaaaacacttggaattaaatcatattgtttagaatctatttagaaatttaatttgcatatttctgtttaaagttctatatttaataattaattttaaatagggagatgattatcgatgattattgataaaatattttacaaaacattatttaagaatttattttcagatacttttgaattaaaactttgggatggaagttcagaaatttatggggaagggaatccagaatttaaaataatatttaatgagcctattcctaaagccgatattataaaggatccttcattaacatttggtgaagcttatatgactaaaaaaatagatattgaaggaagcattcaaaaggttatagaatctttatataataatcaggaaagttttttgagtaatagtgacaaatatgcaaatttactaaggatggctacaaatagtatcaaaaatagcaagaaaaatattgagttccactacgatattggaaatgatttttataaattatggttagatgatactatgacatattcatgtggatacttcaaatcaaaaagtgattcattaactcaagcacaaaagaataaagtagagcatattcttaaaaagttaaacttaaaagaaggagaaacactacttgatataggttgtggttggggtgaactgataatatctgcggcaaaaaaatataaggtaaaagcgatggggataactttaagttctgaacaattagcaaaagttaaagaaagaataaaaagtgaaggattagaggatcttcttgaagttgaacttgtagattacagggaactaaaaaatagaacatttgataaaatagttagtgtgggaatgttagaacatgtagggcaagatcatcttgcagagtatttttcaaatgtcaataacttattaaatgataaaggggtatctttactccactgcataacatcaacagaggttggaggaaataatacatggattgataaatatatattcccaggcggatatgtgccagcagttagagaactaatcaattgtatgtcagatgaaaagttcactttaattgatgcagaaaacctaagacttcattatggaagaactttggagcattgggcaaagaactttgagaatgcattgccagagataaggaagactaaggatgaaacatttataagaatgtggagattgtatttaaatgcttgtgcagcatcttttaactccggaaatataagtattcatcaatttgtattcaataaaggagtaaacaacgatttaccatggactagagagtatatgtataaataagtccatataagtactttaagagataaatttgtggtattactaaattatagctaattaaataagaagtaatttatagtaggcaaaagtacttaaattttaagtatttctgcctattatttgcattaattacgaaaatggaaggatgatggtttatattaaatatgaataaatagattctattatattaaatgataggatttctatatagaaaatattcagttgaatcgatgacaattatatgatattataataaagcattaaatactatatggagagatgtccgagtggtcgaaggagcacgcctggaaagcgtgtataggggcaactctatcaggggttcaaatccccttctctccgccaattaaaaaacgaaatataaagaatgcctgagaatttagtaatactaagctctcaggcattctttatatttagatagttattgaaaatattgtcaataactatagtggcttttgtatgatgatgaatctatggcaaataatacagttataaatgtatataatttaattacagatatttgtctaaatatctgaagaacacatattccattatggcattcgctgttactctggatttgaatttaatgctgtttatttcatattcacttgagaatatgaaaaggcatttatcagataagttggctaatgtattataacctacactggtaacgcatatgattttacagcctcgtgtttttgctatatttactgccttgattacctgggaggtttctccggacatggatatagcaataattagagttttactatcaagatcgcttgctgtagaatacattatgctggagtcgttaaaatatctgcagtttttttctacaagatgaaattttcttgagatatctatacatacatctttagaggaaccttccccgtaaaaatctattttttcagcatcgtggattatacttattacttcatcaatcagagaatcattgattaaatctttagttttagcaatatcatcaaataaaaacatattatcggatatttttttatgattattttctctatctattgaatttctcaagtttgctttaaattcagagtatcctgagtaagataatttattacagaatctcactattgttgcagtggaagtaaaggtttctttagaaagatcttgaattctcatgtttgataccttttcaatgttttccaatatatatttaagtaaataattttcatttttatttagaaattttctatttttttcaatagtatcaaatattgtcataaagtgcctccttaaaagaatatcacaaagagcagaaaattggaaacatcacaaaattttgcaccattctagtaaaagaaatatgatgttgtgtgttactaattataacacacaaatgaaaatattttcataaatgtacattatactatatgtgaaaaaattttctaaagctgtttaaacccttctcttattgataatatcacattatactaaaagtatcatgaatggtaccacatgaaagagtgttaaaatttctatgacaagggattaataataccttgtacagtagatatataaggggatgttttagatgaaaaaattcaatgtatcattagttggtggaggtagtacatggactccaggacttctcgcaagtttatgtaaattaaaggacaggtttcctataaatagattgattttgttcgatatagataaagaacgtcaagaaacaattgcaaattatgcaaaagtattgtttaatgaaagataccctgaattggattttagatacactacaaaggttgaagaagcttatatagatgttgactttgtaattatgcaaatgagaaccggtggttataagatgagggaaaaggatgaaaaaattcctttaagcttaggcgtaatagggcaagaaacctgtggtgctggaggatttgcgtatggtcttagatctataaaagacatgattaaaacaataaaggatataagaaagtattctaaagatgcttggatattaaattatacaaatccagctgctatagtggcagaggcattaagaagagaatttccagaagataagagagttttaaatatatgtgatcaaccagttaatttattacgttcttatggcagagttttgggaaaagattcgaaaaactttgaaccagtttattttggattaaatcattttggatggtttactaatttatatgatgaaaatggaaacgatttggttccagaacttagaaaagtaataaaagaaaggggatttattcctgtagatgcagagcaaagagataaatcatggttagatacttatgcaatggtacaggatatggttaatgatttcccagaatatcttccaaatacttatttacaatattattattatcctgattataaagttagtcatttaaatccagattatacaagagcaaatgaagttatggatggaagagaaaagagagtttttgaagaatgtagaagagtcgctaaagctggtactgtagaaggttctgtgatggttcataatgatgcacacagtgaatttatgatagaagtggctgaatctattgcttataatcttaaaaaaatatatatcgtaattgtaaaaaataatggaataatttcaaatttagatgatgatgtaatggttgaagttgcttcgataatgacagcaaatggaccaaggcctctttcagtaggtaaaatccctacattttacaaaggtctaattgaatcacaatcagcttatgaaaaattaacagtagatgcttattttgaaggttcatatgaaaaagcgttacaggcattaactatgaacagaactatcgtatctgctaaaaaagcaagagcggtacttgataaattaatagaagccaacaaggagtattggcctgaatttaaataataagatttaaatagaatattggtatattaaaaaacagtaccaatattctaataaaatatgaaataattattatattaggaggaagaataaatgacaaatacaagctatttctctaaatttcaacaattaggaaaagtattaatgaccccaatacttatattgccaattgctggtatattaatgggaattgggtctgcatttttaagcccatctgtaatgaaaacgatgccttttttgcaaatgccatttttcaagttgttttttagtttgcttaaatcatcaggatcaattgtatttaataatttgccggcaatctttgcaatatcaataactataggttatgcaaaaaaagagaaaggtattgcagctttatctgcttttttaggatatatggttatgaatgtaaccatgagcgccttacttattaatcttggtaaaataaacccagataaactgcttgtaggacaatcaaatatactaggagttccaacagttgatacaggagtttttggtggaataatagtaggatttttaatcgtttatctacataataaatattataatatatctttacctcctgttttatcaatatttagtggtacaaaatttgtcccaatggtttctattatcggatcattaattttaggattagcattgtctgtagtatggccttttattcaaggtatattaattgaattaagtatattaattaaaaactctggtgcttatggatctatgatatacggtctagctgagcgagctcttcttccttttggacttcatcattttgtatatcttccatttttctttacaagtcttggtggtagtatggagataggtggaaaagtagttgaaggtgctgttaatatttatcaggctcagttagctactccaggagaaatgtttaatattgatgtcactagatttgctatgaatggtaaagttatagaatctatgtttggattgccaggggcagctttggctatgtataagtgtgcaaagcctgaaagaaaaaaagttatagggggattttttcttgcagcagtaattccagccttcttttctggaattacagaaccaattgaatttgcatttttatttgtagcaccagcattatatggaattcatgctatatttgcaggaactgcttatcttgtaacttatttgttacaaattaatatacctggaagtgcagcttttggtggacctttcttaagctttatatttaatggaattatgcaatcagataaaggttctcactggatatttgttcctatagtaggtgtaatatatttttgtttatactatttcagtttcaaatttgcaataaaaaaatgggatttaaaaactccaggacgagaacttgaagaagattcagaagaaatttcagtagtttcatcaagtaatacaataattaatgatatagtcgatgcacttggaggaaaaaataatattaaaagtgtagatgcctgctttacaagattgagggtttctgttaatgatatgtctatggttaaagatgataatatatggaagaaacttggtgctaatggagttgttaaggttaaagatggtgttcaggtcatctatggagcaaaagctgatgtttataaaactcaagtaagagatttacttggaatggaataggtgattatatatgtttagtaaattatttaagaaaaaaaatgatattgtaatatattctccgataaaggggaaaattgttgatatttccgaagtcccagatccagtgttttctgataaaattatgggtgaaggtattgcagtaattcctgaagataatattatatgctcaccagtaaatggttatgtagctcaaatttttaaaactaagcatgcaattttactaaagagtagtgatgatttagaaataataattcatattggattagaaacagttaatttaaatggtgaaggttttgaagtgttaataaatgaaggtgacgaagtaactacaggtaaaaaacttataaaagtagactttgagttcatgaaaaataaagggattaatacaataattccagttgtcataattaatcatgcggatagaaatattattaaatattttggagacaagcaaactggagctgagataatgaaaatctcacaatagccaattaatatggataataaagggaatagtgtgcaattcaagtctaataataagatttgaaattatagacctgtttcccttgttatgtaagtgtatagataactagcacaactcgttaatttatatatctgtttataacatattctgcatcatcagataattttaggtatgtgcgtaaaaaatgatttgaagttggttagttaaaatagggagaattgaatcatgaagtagatttagtttttaacataaattatttctatcatcagttaaaactgaaatatatttttcggagtgttcgtgatgatggaaaaaggaataattgaagagttaaaaaacaattaaaagaagaagtgatgactgagataaaggcagaggtggcaaaaaacaagcagattaaaatatgagataaagaagatttaatgaatatgtttaagatgggaagaacaaaatttaaaaaattatagataataaacaatcgcctattaaagttataggacaagaatgctatgtgactaataataagttacaagcgtggttttatgactttgagggtatgaagattgatatagactaaccgtagtttacctcaaaagattgtaatctaccatattttttgtaatcagtattgtaatcaaataatgaaaaataggattgaaagctttggaaaaactaaggttacagaaatgacgagaaagctttcaaatccccttctctccgccatgaaataagatgtgaagaatgcctgagtgctaagtaaaactaagcactcaggcattttttaatatttttaagttgtccaaatcatacctcaaactaccgtataagacgttaattttccagctatattctaatcaaaatagggtgatgcaaccaacgctttatgcgagcgtggatgggagataatactacaataggttgattagtcaacttgacgatgataaagtattgttgactaatcaattatattgcaatatgataagatgataaattttaaaagtataaatttgataatgtttataagtaaatatggacaatgagctgttatattatcactttgtagtaagagatcaattaccatgctttcaataattaaaaagattattcaaaagtaatttatataagtctgttgtgagaacgggttgtatgatgatcaagattatgtgaatataaatagaatatttatattatatgaagtaaaattgttccactataaacgttgacaagtcaacacagtgtaaatataatatagtagactaatcaattatattataaggagagaatgattatggatgttgaaagcatgaacctcataatgattacaagtaaaatttttagatataagcaaatgtatttagaaaaggccttaaaaaaatatggattaagcagtggttccagcccatatttgtttaatcttgaaggaaacgaaggtataagccaaaacggcttaagcaaagaacttggtaatgacaaggcaatgtctgcaagaacaattacaaaattagtagatcttggttacgtttatagagaacaagatgaaaaagatagcagatcttataaattatatctaacagagaaagctaaagaagtattgcccaaaattcatgaagatgttcaaacgttgatgagtttaataacagaagatgtatcagaagcagaaatgttaattacaatgcagtctttaaagaaaattctaatcaatatccgaagattaaacgaatttgagaattaaggtaatatggttatgtaagttaaatattgacaagtgacaagggaggaaaatttatggaaaatataaaaaatagaagcaaatggtccatattagtaatagttttaatgtttacagttatgtctgctctagatggtagcattgtaaatgtagcattacctaaaatggctactgctttaaatgtaacaacatctagtatacaattagttgcaacaagttatttaatagtaattgctgggacagtattgatttttggaagacttggagacatgcttggaaaatccaagatgtttacattcggattaggattatttacccttggatcgttactatgtggtataacaaattcttttccaatacttattttagcaagaatagtacaagctataggcgctgctggaactatggctaataatcaagggattattacagaaacattccctccacatgaaagaggaaaagctcttggatttttaggtacttctgtagctttaggatctctaataggaccaggacttggaggactaatagtaggcgcagcaagttgggaatatatttttttgataaatgtacctattggagtaatagcattattttatgctattaaattgttaccgaatgggaataaaacagttaagggaaaattagatatcttaggagctgtattatttatgtttgcaatagttccactctttggagctttagatgaagggttgaatattggcttttcagatccaatgattttattgagctttgccatcgcaattgtctcatttataatatttatttttgtggaaaagaaaaaagaagatcctctattacaattaaatatatttagcaataaattattttctttaagtatattttgtgcatttgtaacttttgtggcaatcttctgtaacaatattattctgccattttaccttcaagatgtaatgaattatacaccagaacatactggattaataatgatggtttatccattactcttaactgtagtagcacctcttagtggaagcttatcagataaaattggttcagagcttttaaccttcataggtttgatacttataagcctaggtttaatattaatgtccactttaaatgtaaattcaactgtaataatcacaataatattcataggaattatgtctattggtatgggattatttcaatcgcctaataattctttgataatgtcaacagtaccgaaagagaaacttggaattgcaggaagtgtaaatgctcttgtaagaaacttgggaatggtatgtgggatagctttagctacaacgcttttatatagcatgatgagttctataattggataccgtgttacagattttgtagcagggagaaatgatgcttttatatatgctatgagaactgtatatatagcggctgcagtaataagcttaatcggtgctgccttgacttttttaagactaagaagtaaaaagctgaaaagctctaatatgcatttggagcaccagtttaaagtttaatatgaataaaggtaaatatatacctttattcatagaaacatatttaaaaagataactatattcctatgtaactataaatatatgtaaatatttataggacatataagagcttcagacatcattgtgtaaaataagagtttatgaaatataagctcttatttttttggtgtgcccagcatgggcacgtactaatcggtgaaagtccgtaatgggggcttatagtgctagatcataattataagaagtatacgaacatatgtttgaaattaatgcattgttattgtataatatggataaagtataaatttaaggaatagggaagaacgaaagctatgggtataaagagtgaacttgaaagaactagagacgaattaaatatattaattgacaataaggaaataattacaaatgataaggaattattagaacttagtataaagctagataagttgattaatgaatatatgaacagtattaataaaagtatttaggtatttttttatcgcaaaaattcgaactgatgtttttatattatctgtagattagtatttctaaatcatatagttttatgaatatataaaaacaatgatattagccagaaaataataaaacatgttcttaccatttgcacttaagtgaaaatagcaaggcatgttttctcttgaaagtgtaatattagaatatatggttttatattctagtatatttaatttcatattacacacaataataactgaaagaggtggttctcatggacattgattttaacaataatattttaggattagtccgaaaatgattttaaagtccccataagtacacttgtttcgaaacagaccagggtttaaaaataaaccctggttttattttgaagtatcagagaagattgtctgatcaagtatatagattgcatacgttatgaattagctagattctaatggagctcattccaataacctttgtttgcatccattaaatcttttaataattctttagcaatattagtatttacaactgtacgatttaatacaagtgcctgtaatgctttttgatagcttccttctaagcacgcgtccactgataatttttcatatgcatattgattttccataagtcctttgtaaaaagtaggtacacttcctacggctaatggttcaacaccattacttccaacacggcatggaacctctaccatcattccagatgaaacattttgaatagctccgttattttccgtaattattaagaagatttcatttgtattatttgcgattgctgttgctaaatcaactatatattctgcatggcatcccacatcactggtgatttcatatttggtaccatgcatcgtacctagagaaataatttcacgcaatctttcgtaagtttctttttcatttccatccattacttcattagcacgtgtgtatttgggattttctttatctctcattttatttgggtataaataatattgcaaatatgtgtttggcagatattcatcataatcattaatcatttgactcataaagtcaaaggttgctttccatgaaggttctttaaaaagaggttctgtttgtacatctactggggtttttaatatttctcttaatttaggtaaataatcctctccggtctttttatctaagatattggtgaaccagccaaaatgatttaaaccaaaatatttaggctctaaatcttttctttttaagccaagcacacttgcgtaaatgtccatgattgcaattggcatatcacaaatgtttataatacgatgatcactaggaaatactctctttgttgcttcagcaacaattgcagctgggtttgaataatttaaaatccaacattctggagaataagtacgaatattttttattatgtcaataacagcaggaacacttcttaatccataagcaaatcctccaggaccacatgtttcttgaccaagacatccatgttttaatgaaattttttcatctttttcacgcatttttaatcttcctgcacgaatttgcataagtgcaaagtctatatctttaaaggcttctttttcatcagtagtatatataatttcttcgagttctggataatattccttaaataagatttcagcatattttccaactatactttgacgttcactttcattatcatataagataattttccttaaggggaatctatctttttgattacataacattgcgagcatatctggtgtataacggcttcctccgccaacgatacagattgaatactttttcattttacattactccttttagttttatttttttgtgtttaatacattaacaagtttttctttttcagattctacagtcattccaataataatttgtacgttattccctttaataacgacacctttttgttttgctttactaattatttctttatctactttgttaatgtcacttacatcaattcttaaacgcgtaaagcagttgtttacttccacaatattttctgcaccacctagcccttcaataaataattcggcattttgattgttaggattattactttcaggggagtcacagattatatcattattaagagattcttcctctctaccaggtgtctttatatcaaattttttaattaggaaaacaaaggtgaagtaccatactatagccattacaataccaacggcaaagaaaatgtatatcttagataactttggatctataacagaattgcaaactatagtatcaagtaagccatagattgaatatgtccttgatcctaatacccaaagtagcatttctgaaaagccagtgagtaatccgtgtactaaccaaagtaatggtgatataaaaagaaatgagaaatcaagtggctctgtaatacctgccaccattgaaacgaagagtgttggtataagcaaacctttcacagtgcttttattttctgtttttgcagtttttatcatagcaagaactatacctaagcttgcgaagatttttgcaaatccaaaagtagcaaatcttatcgaaggatcaatagctgttaaattagcaccactacccatttctgcatagaaaatgtttacggcgccttgaacagtattaccatcaatttgggaagttcctccaaatccagtgaagcaaaatggcatccataataaatgatgtaatcctgttggaattaaaaatctgttaccaaatgcatatacgaatactcctaatgcgcctgcgcctttcatgaatattgataaacaagaaatgccataatttataacaggccatacataactaagtacaattgctaatattaaagtaattggtatcataattataaatacaagtcgtgatccgccgtatactcgaaacatttctacgaattgtatattagacgctttattaaacacgtatccagtaatacatccaagtattatgcctaaaaatacattcatatctactacctggaatcctaaaacaaggttttgcccagttccaaataaccccatggcgccaggctgagctagcatattttgtgaagtaagccatgcattgtttccagccaaaaatataatgtacacaatcagactaataatagcagcgtccacttttttatttttagcaaatgcggttgttagtccaacacagaaaataatagaaagattatttaacatagcattcatcatggtctttaataaagttccaataaaaatcataaatgatggcataaagctgagttgcataatgacagcaatagcgagaccagttcccatgattgctaaaaacattacaggttgaactgcggcctgtgaaaacttttgacttaatgataataatttttctttcatataatatgtacctccttttatttgtctttagaatacactagaatatatagagtatcaatggaattgccacttctatgataatgtttacttttagtgaaaaagttcactgaactacaaatataagaagatctgttagaagtgaacattgtaaagagttttacaaagtaatctacttttaacagacctttcatggagtaaatatcatatttaattgagtttatagacactagtttctttgtggcgataaatatttattagaatatttgcttaatgctaattctaataagattattaaatttgaagtgaaaaaattaggtaggtaatgctctttatctgattttgttccagcaacctctattgtcatatgagctattttgcccaatggagaatctttagttgaagtaaaggctacaactttaaaattattctctatagctacgttaaccttttcaagaacttctgaccttgccccagaataagaaagaaaaaaataaagtccagatttattcttactgaatgcttcgtaatgatagctgctagcggcatcaaatccaaatgataataatttttgtaagtaatattccttagcactgtcgcaaaagcctagggaatcaagatagattcttttttcgctatattctcttagtaattccacaagcatattaacatgaattgttaaagtctcactttcataagtactaacaatattattcgaaaagtccaatttgagtgcattattagtagaggcaagaattgtataatacatttcactatatccgctgtagccaagtttcttcgataattttataattgctgcttttgaaacaaagcattcttgtgcaactccatttattccaaccctttcatttttgctgatatgctcatgtattttattcaatattattttttcaagctctgagaggtttatattactttgcatttttaacacttcccgtctataaaaataattcttatgcgtataaaattacttttcctttagtatatcattatgattaagttaaaatctacataatagataaaagagtaatcttatttatagacgtttgagaatactgaaactgctattatgtggtatttaattaactgtagattaaaagtttctataagtttttggagtcatattcataatcttaagaaagtttctattaaatgaacggatgcttgagtagccacatttataagtaatatcagtaatcgggtcttctgtattttttaataaatatgccgcgtaattaattctattttgattaacaaaatcaacaaacgatattccgagtacattatttaaatatttggataggtaattgtaactgtagcaaaattcatctgcaatgctttttaatgagatatctttagtaaaattattttgaatatagttaaggattttatgtaataattcataatcatttttcacgcttataagtaattgcgtatgttccataacttcagaacaaagcaaataaagacaagctttcatctcgagaacattgacattatctctgaaaattttgtctagtataagagctcgcgcgttatgtgataaattaaagactggattttcgagaaatttaccatagatcatgctgtcaaatgtttttacatattcgggggaaaatatgcaaatacgagcatcagagtactttttagttgagagagagtggatttcgtaaggcaaaattaatatacattcatccttttttacttcaagatttctattattaacagaaatttgaagatctccatcaataacagatatgaactcgaagcttcgatgtagatgaacagggtaattaagattaattggatggtagtgggaaaaaagagtgttttctccaaagtggtgcgactcgtattttaacatagaatacctccaagagagtaaattttgtctacaattatataaatactttcttgttaagtcaaccataaattttatattattaaattacaaattgaatattgtattatagattttaatctccataaatatttaaggaatagagggatatagatgaatggtgagcaagaaaatactcatgaatttgcagtaaaggcagcaaaagaattagtatctaagatgacattacaagaaaaagcggagcaattaacttatcaatcaccagcaataaagcacttaaatgtacctgagtataattggtggaatgaaggtcttcatggggtagctagagctggaacagcaactgtgtttcctcaagcgattggtttagccgctatatttgatgatgaattcctgggaaaggttgcaaatattattgctacagagggacgtgctaaatacaatgaatacagcaaaaaagacgacagaggcatatataagggattaacttattggtctcccaatataaatatttttagagatcctagatggggacgtggacatgaaacttacggggaagacccttatttaacatctagattaggggttgcattcataaaaggattgcaaggagaaggaaaatatttaaagttagttgcttgtgcaaaacattttgcagttcatagcggaccagaaaggttaaggcatgaatttaatgcggtagttaacaagaaggatctatatgagacatatttaccagcatttgaggcatgtgtaaaagaggcaaatgttgaaagtgtaatgggagcatataatcgtacaaatggggagccatgttgtggcagtaaaactcttttaaaagatattctaagaggcaaatgggaatttaaaggacatgtagtatctgactgttgggctcttgtagatttccatatgcatcatatgattactagcacagcaactgaatcagtggcattagcaatagaaaatggctgtgatcttaactgtggaaatatgtatcttaatttgttattagcatataaagaaggtttagtaactgaagaacaaataactacagctgcagaaagattgatgacaacaagatttaaattaggtatgtttgatgaagagtgtgaatataacaagataccgtatgaggtaaacgattgtaaagatcataatgaaattgccttaatagcttctagaaaatctatggtattgctaaagaataatggaactcttccattagataagtcaaatttaaagtcaatagcagtaattggtcctaatgcaaatagcgaaataatgttaaaggggaattactctggaacagcatctaagtatacaacaatattagaaggaattcataatgcagttggtgatgatgtgagagtatattactctgaaggatgtcacctatttaaagataaagtggaagacttagcaaggccagatgatagattatctgaagcgatttcagtagcagaaagatctgatgtagttgtattatgcctaggattagattccacaattgaaggagaacaaggggatgcgggtaatagctacggggcaggagacaaagagaatttgaacttgccaggaaggcaacaaaatttactcgaaaaagtacttgaggttggaaagccagttattgttgtccttggagctggaagtgctttaacactaaatggtgcagaagaaaaatgtgcagccattttaaatgcatggtatccaggtagtcatggaggtactgctgtagcagatatattatttggaaaatgttctccaagtggtaagttgccagtaactttttataaagatactgctaatctccctgaatttactgactactcaatgaagggaagaacttatagatatttagaacatgagagtttatatccatttgggtatggtttaacttattcaacagtagaattatctaatttacaagtgccttctgttaaacctggctttgagagttttgatattagcatagatattaaaaatactggggaatatgatattgaagaagtagttcaatgttatgtaaaagatatagaatcaaaatatgctgtattaaatcatagcctagcaggattcaaacgcgtttcattgaaaaaaggagaaagcaacattgtaacaataaaattgaataagaaatcattcgaagttgtaaatgatgacggagaaaggcttcttgatagtaagaaattcaaattatttgtaggggtatcacaaccagataagagaagctttgagcttacctcagtagcgccattggaagcaaatattgaattaatatagagatttaaattatatattaaacagacaaattataattacaaaaatgtaagttagtatggaaataaatattcaaagaaaagataggagagaatcatatgaaaaatattgcaaaacaaaacgaacctctagtaactcatatttatacggcagatccttctgcacatgtatttgaaggtaagatctacatctatccttctcatgatcttgaccaagtacagatttcaaacgataatggtgaccaatataacatggaagattaccatattttatctcttgatgatactaattcaccttgtatcgataatggagaagcactgcacttaaaagacattccatgggcaagtaaacaattatgggctccagatgctgcttataagaatggaacttattacttgtttttcccagcaagagataaagaagatatctttagacttggagtagctactagtgaatctccttctggaccattcaaagcgcaagaaagttatatacctggaagctatagcattgatcctgctgttttaatggatgacgataatagatcatatgtttattttggaggcctttggggaggacagctagaaaaatggcgaactggcacttttaatccagatggagacggtcctgctgctacagcacctgctataggaccaagagtagctgaattaaatgatgatatgcttacatttaaagaagctccagaggagatatcaattgttgatgaagatggaaatcctatacttgctggtgatgaagaaagaagatattttgaaggaccatgggttcataaatatgatggaaattattatctttcatactctactggtagcacacattgcatagtatatgctatgagtaagaatccaaagggaccttatacatttaaaggaaaaatacttgatcctgtaattggttggacaactcatcactcaattgttgagttccaagataaatggtatttattctatcatgatagttctttatcaggtggagcagacaacaaacgttgtgtaaaatacactgaaataaagtacaatgatgatggtactttacaaaaagtagagttatcttaataatctaaattataataaatatgtatcttgaaagtttatagaaaggtacttcatatttgaaattcaccctgtcaagtagacaggagaaataatgaaaaattatgatgctaaggtctgatttcaatagtccattggagtcaggctttttaatattttatatagtctgtttatgtataaaattcttaacttaaggaggagaattatgttaaaaattaaaaacccaatcttaaagggctttaatccagatccatctatatgtaaagctgaggacaattattatattgcaacctctacttttgaatggtttccaggagttcaaattcatcattccaaagatctagtgaattgggagcttatagcacatccattgaatagagtctctcagctaaatatgttaggaacccctgattcaggtggaatttgggcgccatgtttgtcctataataaaggtatcttttacttaatatatacaatagtaaacaacaatggacatattaaagatacccataattatctggtaacctcaagtgatatttgtggtgagtggtcagagcctgtttatcttaattcgagtggttttgatccatctctattccatgacgatgacggaaaaaagtggcttataaacatgaaatgggataatcgtataggaaagaataattttgctggtcaccttttacaagaatatgataaaaaaaacaaatgccttactggccctgtaattaatatttttaaagggacagatttgggttgctctgagggtcctcatatatataagcataatgattactattatttgatggcggctgaaggaggcactagttatgaacatgcagtaacacttgctcgttcgagaaaacttacgggtccctataaggttcatccacaaaatccaattcttacttctgtgggaagtgatatgcataaagttcttcaaaaagcaggacatgcaagcattgtggaaggtcctaataatgaatggtttatggttcatctttgtggaaggcctcttcctgaaacagatcgctgcattctaggaagagaaacggctatacaaaaggtggaatggcgtgaagatgattggctttatttatgttctgacacagataacttaccgtcttgggaaatagaaattaacaataacagtgaaagtgaatcaaataatgaagaagatgtcttagtttcacagtatgacgattttaataatactttactaaatataaattttcagtccttaagagttcctgcggaaacctttatgtcacttactgaaaggccaggatttttaaggttatatggaaaagaatcaatgttttccaagtttacacaaagtatgatagcaagacgtcagcagaactttgtttattctgccgaaacctgtgttgaatttgaacctgaaacaaccttgcagcttgcaggattaatttgctattacaacacagaaaactattattatttgaggataagcatggatgaagaattaggaggcaaatgcataggggttctagctagcataaataatgatttatcagagtccatgactcaggatgataacatcttgataactgatgtagaacgtatttatctaaaagtggaagtgaattttgggcaacttagatttttctttgctaccaataagaacgagtggaggcctataggcaaagtttatgacgcaagtacattgtcagatgatgctatcaaaggttcatgggctttcaccggtgcttttataggaattgcgtgtcaggacttatcgggtatgaataagtatgcagattttgattatttttcatatgtagaggtgagataagttaaaatcccaattgcattatcataaatggttcatatgtcaaaacaggtggtttcaatatagatttaaaccacctgttaatatataatatacggagataaataagaagtattttaaaaatttatttatcaagtttaagttgatcttcgccccatacatataattcctttaatgtaggaagtaaggcttttcctctttctgtcaaagaatattcaaccctagggggaatagtttcatattgagttctaacaattagcttatgttcttctaattcctttaaggactttgtaagcatcatgttagtaacacctttaacttttcgttttaattcattatatctagtagaatctttacttgataaataccacatgataggtaatttccatttttgacctaaaatatcaagtgcatatataacaggacactctgtttcatagatattatcatcagggaattctttattataacgcatataatcactcataagtatagctcctttgaatcttatagtatactttttatactgacacagaaaaaactgcatacttgtatatttatacctttatgttatattgattataacagaaaaataaaacattaaaaagaggagtgttatttgtgaaggtttatgctatcaatggaagcccaagaaaaaataaaaatacggctacattacttcaaaaagctttagatggagtgaaagaagcggcgaaagataaagaaattgaaactgaaataattaatttatatgattataactatactggatgcaaaagctgctttgcttgtaagagacttgaagggaaaagttatgggaaatgcgcagtaaaagatgatattcaagaagttttagaaaaagtgtctcaagctgatggaatcatttttggatctccagtatattttttagatataacaggtcaattgcgatcattcatcgaacgattattatttccttatttagtgtatgataaaaattattcttcactggcaccaaaaaaaatgccaacagcaataatttatacaatgaatgtaacagaagagataatgaataagtctggttacttatcaacttttaataatgtagaaggagcgattgaaagaatattcacaaaaccattagttatgtattcaaatgatacttatcaatttaatgattactcaaaatataaaatggaagtattctctgaagaagcaaaagcagaacatagaaaagttcaatttcctttagattgtcaaaaggcatttgaaataggggctagtctaataaagtaatatatataagtttaatcataaaacattttacaaagtcataatagatgaggtataaagatattaacttaaatgaatggagatgtatatatgaaatttatagaattagctgccaaaagatattctgtaagaagttttgacacaaagaaaatcagtcaggaggatttaaatttaattttaaaagcaggacaattagctccgactgctgcaaatcgtcaaccgcaaagaattttggtacttgaaagtgaggatgctcttgctaaactacaaacttgcacaatttatcattttaatgcaccgttagcattacttatatgcgccgataaaaatgaagcatgggaacgcagctatgacggaaaagtccacactgatattgatggaagtattattgctacgcatatgatgttacaagctgctgaacttggattaggttcaacatgggttggtcattttgatcctgcggctatacgtgaggcttttaatataccaacaaatcttgaacctgtatgtcttttaccaattggttatccaagtagcgaggctaagccaaatcctaaccacgaaaaaagaaaggatatttccaaaactgtcttttacaataatttttaatgtatgatttatttattaggataatttaattgtataggaaattatagaatttttaagagttcaaagctagatgaaatctggctttaggctcttcggtatgttaagaagtaactataaaattaagaggtatacaaatgaaaaaggataaaataaataagatactagaagactattggaatagttttgtgaaattgtatggtaaaagcaaaaataaagaaagcccgacgtgcaagccgggctttaaatatgtgcaaaaaatgagctactacaaacttagttaattacttttgtagcagctctttttattttaatttagtaaataagtactttttaaaacttatttaagaagtaaagatttcaaatgtagaggtaaagatattacatataattaattaatgcattactgtaaaataacaaatgtaaacgatgttaaacgctttgaagatgagagtttagcaaacgtattcttagagatttaataactttttaatcattatttaaaaagtaaaaatttcaaatgtagaagtaaagatattaaatataactaactaatatattattgtaaaatgttcatgaaaacgattagtgaaagttgaggtggttagaattgagtaatgtatttttagaaatgaaaaatatacataaaagatttccaggagtttatgctcttaagggagcacagttggaaattaaaaaaggtgaagtacatgctttattaggagaaaacggtgctggaaaatcaactttaatgaaaatacttgggggagttcatacacaggatgaaggtcaaatatttgttgaaggagttgattgtggagttattaatccaactaaagctgcacaattaggtattggatttgttcatcaggagctaaatctagcagagacattgacggttgcagaaaatgtttatatgggaagactaccatataaaaatgaagccttgggtattgttgactacaagaaattacacgaagatacagattccataataaaaaaattaggaatagatataaaagctactgacctagttatgcagcttccaactgcaaagaaacagatggtagaaatagcaaaggcaataagtttaaatgcaaaagcgattatttttgatgaaccgacaacatcgttatctcagaaggacgttgaaaacctttttaaagttataaaaacactaaaaaatgaaggtgttgcagcaatatatatatcacatagattaaaagaggtttttgatatttgtgatagagctacagtactcagagatggtacttatattgaaagctgtgaactagaagggataactcaggaaagacttataaatatgatggtaggaagagatttgacagagctatttcctaaggagatttttgaacctaaagaatacgttttagaagtagaaaatattagtgataatgttggcagagttaagaatgttagtttgaaagcaagaaaaggtgaaattttaggactagctggtttggttggatcaggtagaacagaacttatgaggcttgtatttggcgctgataaaataagtgaaggtaagataagaatcaatgggaaggaagttaagattaattcacctatggatgcaatcaataatggtatctgccttttaacagaagataggaagagccaaggattatctctagtaatgagtgtgcttgataatataactttaactaacttaaaagattttgtgttaaatcataaaaagttaagggaaactggagaaagatttaaggatgcacttgagattaaaacagcaaatcttgatgttatggcaggaacattatcaggtggaaatcaacaaaaattaatactagctaaatggttaaatacggactcggaaatatttatttttgatgagccgactaaaggaatagacgttggtactaaagctgaaatatatcacataatgaatgatctagttagaaagggcaaagtagttataatggtgtcttctgaattacctgaattattaggtatgtcagatagaatatatgttatgtgtgaaggaaaactcactggagaacttagcagagaagaagcgacacaagaaaagattatgaaattagctacgcttggagggattaataaagatgaatcaaacaattaataataaaattgtacaagaagaaggtattaagatgaaaaaggaagggtttaatattaaaaacttatttctcaaatattcaatctatctagtacttgtagtgcttattttagtattctcaatagcaagcccggactttttgggagcagcaaatgcttcaaatttcttaagacagattcctacagtgggaattttaactgttgctattactatggtaataataactggaggtgttgatctttccattggtgcaatagctgcattttctggatgtacagtagcctatctatctgtaaaaggggttagcgtaccagtttctttacttgctgggttattagtaggtgcagtttggggattatttaatggagtattaattacaaaatttaaattagaatcttttatacttactatgggtacaagttatttaataagaggattaatactattttttacaaatgggatttatatcaagggtgttccggattggttctataatatttctaacacagaagttggaatatcaataatacacactaacactatagtattcatcataatagtattagtaatggcttacttaatgaaaaatacaagatttggtagatactgctatgtggttggatcaaacaaggaagcaggaagattatcaggaataaatgtaaacaagcatgttataaaggtatatgcaatagaaggtgttttagctgcaatagctggtatattactaatgtctagtataaatgttggtgctccaagtgaaataaatggtccagatctatttgcaatggctggtgcaatcatgggtggagtacaattcggtggaggagtaggaactatcggtggagctatggtaggaatatttactatacaagtattccaaagtggattagcaatccttggaattaactcattcttacaacaagctgtaacaggagctgttattgtacttgctatagttgttgacttctacagaaaaggaagtttatttaagaaaaaaggctaatcataaaaagtcgtttgagcgtaatttggtagacttgaggcttaagtgtttactactgaataaggcttaaaatataaaaacatatctaaaaaattggaattacggaaggggaaaaattatgaagaagaaaataattgctttattatcaacagtgcttattgttggtagcttagcagggtgtggaacaaagacacaagcagggggaacagcaagtacaagtggaaaaaaggttatttattttattccaatagttgatacaggagcttactggtcacctatgaagaaagcagccgaggatgaggctaaggcattaggatatgatttagtagttaaaacttcaccaccaaatgaaacacaaaagaacgaaaagcatataggattccttgacgaagctataaagaataaagcagcaggaatagctattgctccaatggatccagatatgtttgataagaaggttaaggaagcaaatgataagggaattccagtagtaacttttgatgctgatgtaaagacaaaagaaaatagaacatcttatataggaacagacaataagctagcaggagaacaacttggtgaaaatggtgctaaagctttaaaggaaaagggtgtaacaaaaggtaaaattgcaatggcagcagtaaacttaactcaaacaactatgacatatagacaagatggaataaaagctggatttgaaaaagttatgggagcagatgctaagaattttgagtggttagagccaatccaagataatgaccaatcagcagaatctaaaagacaattagaaggacaaataacttcaaatcctgatatggtagctgtattctcattaggatcagaaggaccagatacaggtgtaatggaagcaataaaatctcaaggtaaatcaggaagtatctatcacttcggttttgactatactccaacttgggaaaatggtgtaagtagcaatttaatatcaggaattgttgaccaagattcttatgcaataggtaaaactataattgatactttagataagaaaataaaaggtgaaaaagttgatgatgtttatccagtaccagttaaatgggtaactccagataaaattgttgaatacggaaaagaaaaacaaaagcaatttacaacagaaactaaataataattaaatacaaataaaattaataagggctaactcaaatgattaatgtattcaaatttactttagtatattttcaaattgagttaccctttttattgctatttaactaaatgactatacatattaattggtaatagggaatgctttataagtgatttaaaatacatatgaaaatcaagctttgaactaaaggttacaaggaggtttagaggatgaattttgggaataattttagtgtgggtaaaagattggtaatttcatacactctattatttataattataacattggtaggactcataggtttaaagagtttaagtaaagttaataatgcatcagatagtatgtacaatacagatcttgtatctatagatgttttacatagattaaacgcaaattcattggaaataaataataacatattaagcctaattcatgatagagatgaattaatgataaaaaaattaaatgatgacatttcaaaagaatttgaacaaggcaatatacttatagatgaatatagagggttaaatttagatgaatatcaagagaatgagcttgtaaattataatgaaatttataaggattataaggaaaaaagtgattcgttgctaaagcttgtaaaggaaaataattatgatgaagctatactagattatcgaaatttatcagtatcgcgaagcaaggttgcagcatcactaactaaattattagagtatagctcaattaaggcaaagaatgagaatattaacaatgctgatttatatagcaaggtagagatacaaatattaacttttataatagcagggttgattcttactataatcttaggatatgcaatgactagaaatatgatagtacctttaaagaagataaagaattatgcgaataatcttgcgcagtataatttttcggagaaaattatacttaagggaaaagatgaatttgcacaaacaggagacgctcttaatatagcattgaaaaatgtaagggaacttattaggacaatcctagataactcaacagaactatcagcgtcatctgaggaattagctgcatctgttcacgaaataagttcgaagctttcttttataaatgaatcgacagatgaaatagcagtaggagctgagcggacgagttcatcaaccgagaaatttgttttatctatccaaaagattaatgaaaatataaataatctagctgaaatagtaaatcaagaggttaaaaaatcagtagatataagaaccaaatcaagtagcatgatggaaaaaagtgaagattccatacaattatccagaaagatatatgaggaaaaaaacaaaaaaattaaagccgctatagagaggggaaaggtagttaaagaaatagaagttttaagtgaatctatagtaagtattgcttcagagactaatcttttagcattaaatgcaagaatagaggcagcaagagcgggagaaatgggaaaaggtttctcagttgttgcagatgaggttggaaagctagcagaagaatctattactactgtaagtggtattcatggaattgtagaagaaataaaaaatgtatttgaatatttatcagaaaattcaaaaggaattttaaagtatatagaacaaaacgtaaacgatgattatgagtttatgatagaatctagtaaaagttatgaaaatgatgctagatttataaataaaatgtccgaggaaattgctatcatggtaaaggcaataaattcaaatattgataatgtagatagtacaatgagagagttttcaattaatatagagaaatctaaaaataattctaatgaaatattagatagtataaatgaagtaaccaaagaagtagagcaaatttcctttaatacgcagaatcaaagtgaattaacattaaaattgaatgaggtcattaatagatttactatatagatgagttgtgttaaaagtgaattttggttccattaaaatataaagtatatttatattttaagagaaatttgaagacttgcagtaaaagcataatacagatatagttaaggaaggaaaatttaaatgattgatcatcatcgacctaattatcagtttttttggggagggataattattaaaaaagtaattttatttcctataattttaatatttttagttagtttaaatggctgttctttagataaaaaaaatgacacagaaaataaagaaaaaataacattaacaatgtggcatatatggtcacaaactacaatggatgctaatggaaggataattcaggatacggtggaagaatggaataaggctaatcctaatgtccaaattaaagttgaggctgtagaaaatgaaagatataaagcaaaaataaagacagcatttgctgtaaacgagttacctgatatattttattcttggggaggtggctttagtaagccattcatagaatctggaaaggtattaaatcttaatgaatatatagatgaagatacaaaagataagattaataaagatatgcttaataatgtaacctataataacaacatatatggattaccaatgactttatcagttggaacattttattgtaatacaaagctcttttcacaagcaaatattaaagtaccagaaaattatgatgaattcctagatgcagtaaaagcttttaggaataaaggtataacacctcttttagtaggcgaaaaagacaattggacaggaattctctattatgatatcttagctttacgggaaggtggaataggtggagtcagtgatccgcatgtaggtgctaataaaagtgatacaatattaaaagctgcatatagattaaaggaattagtagattcaaaagcttttaatgaatcaaatatggagcttacaagagatgaatctgagatcttatttaaacaaggaaaaattcctatgtattatacaggaaactggttcattggtgagatagggaatatggatccgtctataaaggataatgtaatcgttaagaaattcccggtagttaaagagggagatgggaatgataaagaatttttgggtggagcagtggatcacttaatggtaagtaataatacaaaatataaaaaagaagctgttgatgcggcaaaatttatagctgaaagaatatcaaaaagatattttgaatttggttcagggcttccagcgtggaaatacactgatgataagagcaatgtaaataaattatctaaggaattagagacattaacagagaatgcatcatatagcttatatggggatatttacttgggagaagaaaagggaaacagagagaaggagctagttagtaagctatttaaaggacaaataagtcctgaagacttcacaaaggaaatggtgaaaatagaatgatgaggatatgattaaatgtataataaattttttatattaaagaatttgaaggataaatatttaaattcaaaaataagtataaagattattgtatatttttcaataatttttgtgctttcaacagtcatacttacctttgcatataagaaaataaattctatttataatatagagaagatgaaacaaagttcagttgaggttttggaaagtgcagaaactaatacgagcatgataattgataatgttaataacgtctcaaagatgattatatcaagtgacaatgttcaaaatacattaaagagagttcagaaagaagggactgcctatgataatattagtaattatctgatacaattcactaattttagctctaatatatcttcaatatatgtattagataactatggcaataagtattattctgaaaatgtcttttataaggattttcagatggataagattaaaaattctgaatggtataatgaattattagagggtaagggtaaatatatattaagattaaatggcggaggattttttgagggttatggtaataattatgtatccttaataagagaaataaatgatataaatactggtgaaaaaattggcttgataattataaacatgaatgagaatgcgttctataatttaagtttgaagctaaataatcaatatggaacaagacttattataaagaatgataaagatgaattgataacaggttcggaggttgattctaaaatactaagtagaataaaaaattataatgattctaaatcaaaagtgttttttttagaggaaaaaatacaagataaggattatataatatcaaatcttaaaaattcagactataactggaatctgacgactgtagcagaatacaatgaatctccagagcaaacaaagtatactaattattttcttttgtgttttagtataataaatttcctactaattattattgggtctataataatatctaaatttataacaatgcctttaaagaagcttagtgaatcaatgaaggggattcaaagtggagagtttaatattgttaatataaaaacgtacaatgatgaagtaggagaattaaaaaagggatataatattgcaatttctcaaattaatttacttttggataaaatacgtaaagatgaaaagataaaaaggcaaaatgaattgaatttgttaatgtcacaaataaagcctcactttctatacaatacgtttgatactattaattctttagctctactcggaaaaaataaaacaatatatgaaatgataaaagccttgggtaaattctatagaacaagcttaaataatggaaaagatattattactgtaaaagaagaaataaatacggtaaaaagctatctgataattcaaaatataagatatgaggatatgtttgaggttgaatatgatttagatccacgatgcgacgattttaagataataaaattagtattacaaccgctagttgaaaatgctatttatcatggaattagaagcagcaagaataaaggaaagataagaatatctacctttcaagaggaagaaaaagttatattaattttggaagataatgggaatggcatggatgaatcacaagttagcaatataaacgaaaataaaactactggcattggagtaagaactacaaaggaaagattaagagttttctatggagaagagcacgaatttattgttgaaagcaagaaaaatgttggtaccagaataactattaagatgcctagaattaagaaatagattaagttttctaacgaatattctaaagggaagtggattattttatggatagcattataaaagttatgataattgatgatgaacatcttataagggatctaataaaaaattgcattgattggaatgaaattggcatggagatagtagctgaagcttctaatgcggttgagggattaaatctaataaataaagaaaagccagatattattttaacagatataaatatgcctgtaacagatggattggatatgagcaaaagcatattagaaaggtatccagatataaaagttattgtaattacaggttacaatgaatttgaatatgctaaaagaagtataaagattggtgtgaatgattttattcttaaacctatagatgaagatgaattaagaaattcagttttaaagctaaaagacgagattcaagatgaatatctaaagaagaaggaatacagtgatattaaggaaaaaatggttgtatataataatataataaatctaaatgatgcaaatgaaactgaggataaaaatttaagtatagaacaaattaaaaaatttatagtgaaaaatatatctaatcgagatttatctttaaaactggtagctgaatatttttatgttaatccaagttacctaagcagaatatttaaggaaaaaactgatgagactttttcagaatatattgtaaatactaaagtaaagatagttactgaaatgcttaagaacccaaatgcgaaggcttatgaaatttcaaaaaaaattggtatcgatgatcctaactattttagtaattggtttaagaagtgtactggtctatcaatcaaagaatataaaaaacaaaagctatgaatttacaagagtatagggatatgagtagaaatgtaagaatatgtggtttgtagaaactgggtattattacatttcttttttttgttatatttaagttttaatagcctgaaatcaatacatagatgataaagaatagaagtagaaaggtataatttccacgataatacacgtgtttattaattaatgaatataaaataattcacaagaataaaaaatttaaagtcacagataataaaataagttatgaatgattagtctatgtttaatgcagttacgcatttaaacaataaagcaagaaaaaggagaataaaaatgtttaaggaattcaaagaatttgctatgaaaggaaacatggttagtctagcgataggtgttgttattggtggagcttttagcaaaattgttacatctttagttaatgatattataatgccactagttggcttattgatgggaagagttgatttctctaatttattctttactttaggaagtggaaattttaaaactgttcaagaagctaaagatgcaggagtggctacagttaactatggaatatttataaataacataatagattttctgattgtagcattctcaatttttattattatacagcaaataagcaaacttactaagaaaaagggagagaatattgttcctgataagaaaaaatgtaaatactgctacaccgaaattaattcgcaggcaacaagatgtcctaattgtacgtcagaattgaaagaaaattagataaatgagatggtgtataaatacagaaaaatgaaagaaaaatttttttatatttcatatttgtgaaaaaaaatagcttgcaggcatagtgagaattatgtaaagattcatagaaaagataaataatatgtatcatttaacgtcaaatatgttataatcaatatattaattttttaatgaacaaaatttgtattatgacaacttatgagttataaaaattgcataattggtttctaacaactaacacatgcattaaaagataattcatatgaaataaaaataataagcattgaaggagttgtattttaattggggaaaaaatttaaaagagtactggttgcaaacagaggcgaaatagcaataagaattttcagagcttgtcatgaacttggaataagaactgtggctatatacacagaagaagataagtttgctctttttagaactaaggctcatgaagcatatcaaattggaaagaataaggggccagttgaagcttatttaaacattgacgaaataataaatcttgcattaaaaaaacatgtagacgctatccatccaggatatggatttttatctgaaaatccagactttgctagaagatgtgaagaagctggtatagaattcataggtccaaaatcggaaatgatggaaaaattgggggataaaattaaatcaaaaatagtagctaaagaagttggcgttccagtaataccaggggtagaaaaacctatatcttctgaagaagaagcaattgaaattgcaaaaatatgtggttttcctgtaatgataaaagctgctgccggtggtggtggtagaggaatgagaatagtaagaagcgaaaatgagcttctaccttcttttagaaatgctaagaatgaagcaaaaaaagcttttggtaatgatgatatgttcattgagaaatatatagaaggaccaaagcatattgaaatacaagtgcttggagataagtatggtaacatagtacatctttatgaaagagactgctctattcaaagaagacaccaaaaggttatcgaaattgctccagcattatcattaacacaagaaaaaagagaagaaatctgcgtagatgcacttaaaatagctaaatctgtaggttatagaagtgcaggaactctagagttcttagttgatatgcacggaaatcattactttatagaaatgaatccaagaatccaggttgaacatacaattactgaaatggtcactggaattgatatagttcaaagccagattttaatagcagaaggctatgagttaggctctgcagaagtaggtatacactctcaagacgatatacagccaagaggatatgcaatccaatgtagaataactacagaagatcctgcaaataatttttcaccagacacaggtaaaattgatgtttacagaacaggatcaggttttggtatcagacttgatggaggaaatggatatagtggcgcagtaataagcccatattatgacagtttacttgtaaagagtactgcatatgcaagaacttttgatgatgctgttagaaaatccatacgtgcaatcaaggagcttacaatttcaggggttaaaactaatgtagactttttaattaatgtgttaaataatgaaaccttcaaaaaaggtgaatgtgatactaactttatatcaaataatccacaattatttgatataaggcctagaagtgatgaagaatacagagtattaaagttcattggtgaaaagatcgtaaatgaaactaagggtactaagaaagaatatgacgtgccagatattccagctatagcatctttagaaggcttaagcggaactaagcagattttagatgcagaaggtccagaaggtgtagttaaatggataaaaaatcaaaataagctgcttcttacagacacaactatgagagatgctcagcagtctttaatggctactcgtgttagaacccaggacatgaagaatattgcaaaggcaacagcagtttttggaaatgatttattctcacttgaaatgtggggaggagctacttttgatactgcttatagattcttaaaggaatctccatggaagagacttgaatcgttaagaaagagaattccaaacgtaatgttccaaatgcttgttagaggagcaaatggtgtaggttataagaattatccagataatgttataagagaatttataaaagaatcagctgacagcggaatagatgtatttagaatttttgattctcttaactggttaaagggcatagaggtatctttagaggaagtattaaaatgcaataaggtagctgaagtagcattatgctatactggagatattttagatgaaaaaagagataaatatagcttagagtactatgtaaataaagctaaggaaattgaaaaaatgggagctcatattcttgcaataaaggatatgtcagcactacttaaaccttatgcagctaagaagcttataactgcattaaagaatgaagtttcgatccctattcatcttcatactcatgatactactggtaatggtgttgctacagtattaatggcagcagatgcaggagttgatattgttgatacaactttcaatggaatgtcaggacttacaagtcagccggctttaaactcagttgttgctgctcttcgtaatacagatagagatacaggtattaatttaagcggaattcaaaagatatctgattattgggatacagtaagaccagtatacagccagtttgaatcagacttaaaatcaggaagtgctgaaatttataaatttgaaatacctggtggacaatattcaaacttaaagccacaagttgagagctttggtcttggacatagatttaatgatgtaaaatacatgtataaagatgtaaatgatatgcttggagacataatcaaggttactccatcatcaaaaatggttggagatttagctatcttcatggttaagaatgatttaactcctgaaaatatagttgaaaaagctaagaatatggcctttccagattctgtagtttcatatttcaaaggaatgatgggtcagccagaaggcggtttccctaaggatttacaagaaattgtattaaaaggagaagaggctataactgttagaccaggtgaattattgccaccagaagactttggaaagattgaaacatacttaaaagaaaagtataagttcacaccatgcaaaaaagacgtaataagttatgcattatatccagatgtatttgaagcatatataaaatctatattagagtacggtgacgtaagccgtatgggcagtgatgtattcttccatggacttgcagagggagaaaccagtgaaattgaaatagcagaaggaaagaccatgattgtccaactggttaaaatcggagatcttgatgctgaaggaaatagaaccttagatttcgaaatcaatggaaatagaagagaaattaaaataaaagataaaactgagagaattatcagtaattcaggtaaggatgattcatctaagatggctgatcctgataataagctagaagttggagctagtatcccaggaaccataatcaaggtgcttgtaaaagaaggagacggtgtaaaagaaggagatagtttacttgtggtagaagcaatgaagatggaaacaaatattgttgcatctagtgcaggaactattgaatctgttttagtaagtgaaggacaacaagttaaaacaggtgaattattagtaaaacttaaataataagcatatataaatagccctataagatagtttatagggctatttatagtggatggaatattaattatacagaaagtgacaagctcaaaatataatataaatatgaaataagaaatagggtgatttactgatttttatcttaactagaatatgtattaatatgataaatttattatattatgtagaaatttcgttgagtattagtagaatttaaaatataatgataatatgattaacttacaaagcatattaaatttaatggttattttaagaaggagaattgtgagacagattgatattaaagttaggtaggttgattgtatttataaataaaggggtaggtggtgtaattatgaaaaatgtgaatattgttatagtggatgactcgccttttcaaattgctttattgagagatttattgacagaaagtggatttaatgttgtgggtgaagcaggttccttagaggaaactattgaggttgttacaaatatgaagccggatttagtaacaatggatatgactatgccaggaactgatggatttgaatgtacaagggaaatacataaaattgatcctaatattaaagttataattgttagttctatgatggatgatgaaatagtaagaaaagcgaaaaagaatcacgtatgtgggtacgcacaaaagccagtagatgcagaagaattaacattattaataaatagagttatggcagatgaagaattgtttttagaattggaaggtctatattcatcagtgtttagagaggctctattagatgtctttaataagcttactaaaacagtgccggtgattacacatgaaagtaatgaaaatgttgagaaaattagtaagggaatttcaattgtcatgggggttataggaaagtattcaggaagaataattttcgatatgtcatttgaaactgctaatagcataggaaaggcattgcttaagagagaggtaaagaatactgaagaaatgcttaatgttatgtctgagataacaaatatggcggcaggaaatgcatgctcaatgataaataaaagaaataggatatttggattaagggttgctccgccaaccacattccatggagaatcaattagtatatcgaaagcagaattagaaactacttattctgcgaatgcaaaaactcagttcggagatttatcaattagtataggctttggaagaggtgaaggagaatggatgtcaattatataaatccaatattaaattcttttgcaagtgtattgccacagttagggttacctgatgtagagaaaaagggaataagtctaagaggtagattcatagagagtcctggagttgtcattattgttggtattataggtgacattaaaggtaatgttatttatgggttaagcttagatgatgcaaaacgaatagcatctacaatgatgatgggaatgccagttgaacaatttgatgaattggctcaaagtgcaatttcagaacttacaaatatgttaactgcaactgtagcaactaatttttcaaaagaagatattaatataaatatatctacaccaactcttgtacatggaaactttactgcaaatgcgagttcagataaagttgtatgtgtgcaaatgggtgttggagatatgaatattgaggttaacatttcaatggagaaaaacacaatttagaatatttataatttttataataaaaccatttgtgattttaaatcataagtggttttattaaaggcgaattagattatttaaggaagtgaattcatataaataagagtatattttcaaaagttttaagaatagctttggggatttctagagatatattttatgcgatatcaattatatccattatagttttaagtgttttaaatacaactagtatatatggttatgcaatacaaagatataaattaaatgaatacactggattatcaacagaaatattaatggataactataaaagagtaatttattatgttcagaatccgtttattaaggaattaaagtttaatagtatacctatgagtgaattcggaaggatacacttttttgaggtgaagagaatatttatagcgctatatgtatttagtataatatttattggcgttataatctttaaagtattggctaataaatcaaatgatttaaaaaagaggcttatagcaaatttcaatagtggtgtaaatatgatggcagtaatattcatatttgttggtgcaatatcagcaaaggatttttccaaagcatttatttattttcataaaatattctttagaaataattactggatatttgatcctagaactgatcctataataaatgcattaccagaagaattttttatgcttgaattaatgagtataataattttgttgatagtagttactgtcgttataaagttactttatattagaaacaagttaggttcgaaaagttaattataatttacttttgaaactctctggtatataataacatttataagaaaaactgattaaatatagcgaggttaatactacatacgctatgttaaaagactcttgctttaaaaggcgggagtttttttattattaaggaggagattattttgcaaaagattatttatgttggaataggcggttgcattggagctgtaatgagatacctagtgaccatgcaatcagcaaaaatgataaattctaatattccattaggaacattaatagtaaacgtagtcggaggtttccttataggaatgataatggaactaagtgtttcaacagatttgatatcgcccaatttaaagctttttttgacaacaggtgttatgggtgggttaacaacattttcaacatttagctatgaaacaataaatttaattagcgacggaagatacttatttggaattgctaacattttattaaacgtatttttaagcataggaggagttgccttagctagattagtatgtagtatatcaatttagaaaagaatagttattttaaaaaactaaaaaaagatgagattaaagcaataagtctatgaaaagtatgttaaaatatatatgaaatttaagggggatggactatttgaagtgtaaaatatgtggtatggaaataaatgaaagaaattttaattttaatgaagaagcttttattaataagaattcgatagacaatattattcattgtccattttgtggtgtaggtaaggagtatttgagtgaaagtaatgaaataattgcagtacaaagtgacttgtttgatgaaaatactttgaagattttagatcatgctgttaagcttgagctctttaatggtgacttttataacacggcagctatgagagctaaaaatgataaagtcaaaaaagtatttgaagtattatcaaaaatagaaatatgtcattcaaaaatacatcaaagactaggtggctttataaaggctcctaatttaagtaaagttagctatgatagatatgatagtgatagtgcacttttacaattagcaaagcaaaaagaagaacatgctgttggatattatgaaaaatataaaaatcaggttaatgacagcaatttatttgaaatatttgcagctttagctggcgtagaaaaagagcatatcattcttgttgaagagtagataatctttaatttgaaaagatttaaggcttatttaaataaaaaatatgaggaaagaaatgatataaagttaattttattattgtattatggtatgcatggaataaatttaacataaagacagtaataatgttcttgaatttagactttttatgtgttatcattaacaagtatcgaaaatgacatttaataaattaataataattctaaaaatgtgtttttgataaaagcaatgattaacatggtttgacgtctgagaagagacgattttctcaataggagaaattaaggtgcaaacccttatcattccaccattgccatgctagatggggagttagcggtgccctgtaacctgcaatccgctatagcaggattgaattcctcgcttaggtattagcgatttatagtctgacttttgtaagtggtgttgatgactgggtcccacgcaatggaagcccatgaacctcgtcagatctggaaggaagcagcgataagtggttccttccatgtgccgtggatcaatctggtctgagctaactgcattagtaacgtatagaaaactaataacgaagcgaggtgcatggtttattttaatgtttaattatagcatggaaatgaaaaattaattaggttattcttcaataggattaacataggacacaataggataagaaagtgagggcatttcagcaatgaaataccctcattttcttatcctatttaatttaaatttactatttactttacaatatttttaagacagcctataccttcaatttcgcattcaactatatcgccaggctttaggaatttaggtggtatgaatcccatgcccacaccagctggagttcccattgcaataatagttccagcctttaaagtaattccctgagacaattcatgaattacgtcttgtattgaagtaatcataagatcagtagtactattttgtcttagctctccgttaactctagagcatatccttaatactggaggattaacaaattcatctttagtgacaatacaaggccccattggagtaaaaccatctaaacttttaccgaaataccattgtttatgtcttgtttgaaggtttcttgcactcacatcatttattatagtatagccaaaaacataatcaaaagctttttctttaggtacatctttagcgtcttttccaatgatcactgctaattcagcctcataatctagactatcaactatttgtggataactagggatataatcaccatcagcagtcgcagtattaactcttttagaaaaatatactgcatatggtctatctccaccaaaggcttcgtttttatatcgagcagattcaactgcatgctccatatagttgatacctaaacaaataatatcttgattaggattaggtattggaggcattttagaaatatcctctatggagatatattccttatcattattagttaatgatttttgtagaagatccatttcatgatctgttatgttttctattaaactgatcatgctatcataattaatgccaagagattttataggataaactccttgctcattgagagctagtattcctacttgctctataccttcatgcttaaaagttacaaatttcataatacattccccaattctaaagattttttattttaaagttgtattttagcccatttctaaaatagaatttaattcttcgtaattatgatagagtaatatgaatttaaaactgatattactgtatatttacatctgtattaaatttacaaaagtataatgcaatccattcttttcgtcaataaatttctctgatgtgtattcagtattataatttgaataattaattccagggaaatgtgtatcgccttcaaattcttcatctacttttgttaagtataatttctttgcataagggagaaattgtttataaatttcagcacctccaattataaagacttcatcttcacactccaaatatctttgaagtactgaattaaaatcgtgctctattgtcaccttatccgaatctacattaaaattattatctctagttagaactatatgttctctattaggtaaaattccaggcaatgattcaaaagtttttctgcccataatcatttttttgcctgtagttatttttttaaatctctttaaatcctctgaaatatgccataataatttattatcttttccgattacattatctttagcaatagcaacaattattgaaatcatttattatcccacctatcttaggcacaatcaaaaagtatattattttctttcatatgccttaaatttaattatactgatacgtccatttttatagattcatgatgcttataatcttctaattttatgtcgtcaggagtaaaatcatagaaatttgtaatctctggattgatccaaagttttggagcattatatgcatcattttttcttgtaagttgaagtttcaaaccatatacttgattttcgtatatatgagcattatttattacatgagtaaataatcctggcttaagtccagtaacttgagctaacagatgaactaatacagcatactgagatgtattaaatggaacaccaagtccccaatctccgcttcgttgaacaagcatacagttgagcttcccatctgttacatcccacattgtaagaaagcagcaaggatataaaggagcgctatctaggtatggaatctgccataaattaatcatcattcttctatcttgtgggttattttttaatgcatctattaatttatccatttgatcgaactttttcactatccaaccataagaagttccgatggttccgtcttccatcatccattcatcccatatttttacgttttgagattgaagttcttttacactgtttgattgatctttaaagatccaaagaagttctttaacggcagttttaaatgccacaaattttgttgttagtattggaaattctttttctaaattaaattgcataatttgatgaggtagtttataagtcttgactccagttctgttattatcgaagtaaccattttctaatatatcattagcaatggctaaatatttatcatcatataaactcattatagatatgcctccttatatttaaaaactatttttataataaaattattcaatatacattttaacctaaagtatttaacaagtcatccaatatattttagataaaagcatattaaaagtatatggtcttcagaaggagtgtaaattcaagaaactattagtatttatttttaaagatttttatattacatatatttcttcaaatatatgtaatataaaactaattgtgtattttgcattgcacaagcaatagtgtataataatgttatatttaagagaaatggcgaggtggtatcccgtgggttatacagcactatatagagagtggagaccaaagaattttgaagacgttgttggacaggaacatataactacaacgttaaagaatgaaattttaaacgatagaattgcacatgcttatcttttttgtggaactagaggaacaggaaaaacatcaactgcaaaagtaatggcaaaggcattaaattgtctagatttacaaaatggagaaccatgtaacgagtgtgagatgtgtagaaaaataaatgagggattagcaattgatgtaacagaacttgatgccgcttctaataatggtatagataaaattagggacattatagatgatacaaaatatccgccccaggaagctaggtataaaatatatataatggatgaggttcatatgctttcagtaggagcagttaatgcgttcttaaaaactttagaagagcctcctaagagagtaatatttatattagccacaacagatccgcaaaagctacctataactattctatctagatgtcaaagatttgattttaagagaataagccaaaaagaaatatctagcagacttaaaaagataacagattctcagggaataacttatgagcaaaaaagtttggatttaatttcaagagtctgcgatggtgcaatgagagatgcattaagtatattagatcaagcgattgctatgggtgaagataaaattaactacgaagatttagttagtatattgggacttgtgacaaatgaatatttgtttgacataacttatgccattatagatagaagtattgaaaaatccatgattataattgataagcttgtttattctggtaaggatatgcaattgttcattaaagatttaatagcacattttagaaatttacttatggtaaaggttacaaataatccagaagaagttttagacatgtctcttgaaaatattcatttaattaaagaacaaggaagaaagattagagtagaagaaataatgagagctattagaatacttcaggattcggaaacaaattcaaaagctagcaagcaaagtagattatatttagagcttgctattataaagatgtgtaaaattgagtatgatacttcaaatgaggttattttatcaagaataaacaagttggaggaatcattaaaaactggcaagatccgaatggttcaatcagaaaatattaatgaagaattaaaatctgcacataataatataggaactaattcaaataataatcaaagtagaaatgctattaataagggtaacataaatagtaacagtgttaatttagaagctaatccaaattcatcgttaacagtagatgatgttgggagagtatggacagaaatattagaaaagttcaaggcaaagagggcaatgattgtttatgcttcaattgttacagcaaagccatatagcttaaaaaatggtatagttacacttgaatatgattcaatgtatgcatttaataaagataggttacagaaggcagaatacagagaaattgtgaataccgtattttcagaagttctaaaggaaaaagtaattgtagattatgtagtaaaaaatgataatgaagtaaaagatcaagaagagttattaaaagaaacaatagaaggaataccatttgaaatatatgatgaataagaagttacttattcattaaacttgagtattaataaaagatgttttataattaatgaatgagattcaagaaagaggaggattttttatggcaaaaggtggatttccaggaggctttggtggcggaaatatgaataaccttatgaagcaagcacaaaagcttcaaaagcaaatggaagatatgcaaaaggaacttgagacaaaggaatttgaagcatcagtaggtggtggtgctgtagttgtaaaagtaactggtaaaaaagaagtatcatcaattaacataaaaccagaagttgtagatgcagatgacgttgaaatgcttgaagacctagtaatgagtgctgttaatgaagcactaagaaaagcagaagaggaaacttcaagtaaaatgggtaaactaacaggtggaatgccaggcgggttattctaagaatttcaatagttattaataagttagcatacaggagtgtagaagaaacttcagcctgtatgctttttataataggctaaaaatatagataaaggagaattataaattatgatggagttttatccagtagccatagaaaagttgatagaagaattcgctaagctaccaagtattggacaaaagacggctcaaagattaacattacatatattaaatcttccggatgatgaagttaaggaatttgcggatgcattagttaaggcaaaaggaacggttaagtattgctcggtatgtggaaactttacagataaagatccttgtgcattatgtgggaatcctaatagagataagggtacaatatgtgttgtagagcagccaaaggatattatgacaatggaaaaggttaaagaatacaatggagtatatcatgtattacatggaaatatatctccaatgcaaggaagaggtcctcaagatataaaaatcagagaacttgttgccagaatgaatgaagatgtaaaggaagtaatattggcaactaatcccaatatagaaggagaggcaactgcaatgtacatatctaagatacttaaacctcttgatgttaaagtgactagaattgcttcaggaatacctgttggtggtgatttagattatgcagatgaagttacattatctaaggcactagagggaagaaaagagatataaaataaaggaacctaaataaaattaggttcctaaaaagtgttacatagatgggagttagaagtttctatctgcatgagtgaaaagcttcttaagtataatatatataaatttgaaaaagtgttacagtattaaaataaattatgaaatcaaattatgtatatttttaccattgaatggataaaatggtagtaagaagttttttggagggatttacatgaataaaaaaaatattgtagagtacctgatgaacaagactaatgactcaactatgtatgctaagttattacatgatatggaaattgcaaaaatggaaataaatgtggctcgtagcatgtttaataatgttaacgatgacaaattaatagaagtagctatttattcagagaatgttgcaagaaaaagatatgattacttattatcaatagcaagagaaaaggggataagagtagaacataattatgtagtagaaaataatgtacgaattgttgaataaataaagtgggggagctaaatatggagggacaatatttaatatatggattagcaggcataatattattatttttaatgataagattattaaaatggccgataaaaatacttataaatggtatcataggcgttgtaatattatattcagctaattttataattgcaaatctcggattaataggcataaatgttaatttttcgctggcgattaatccaattaccgctttgatagcaggtttttttggagttcctggtgttattgttttgattataataaggttatttctttaattgagttttagaattttcatttagagaattttgacattgcaaaatttaataattgtttaaagattgtctgtatttagaaatataaaaagtttattatgtttctaaatacagattttgttatttttaattataattatgtttgttaattaagtgattttgagttaatatttaatgtataaggattaaaattcctagagtattatttattttccaaggggggactcttttaacttattgagattagttttatattgaaattaatgtagtaattttttatgtataaacaataaaagagtatattatgagttacgtataagaaataatttatgaaggggaaaagaaagtgaacaaagaatttcttaaaaagattataataacgggaatgacaactctaatggtaacaaacatgtgttatatctcagcatcagctaaatggattaatgataagaacaatggttggagttggttagatggagatattaaaactactggttggaaagaaattgatgaaaagtggtattattttaatacagatggaataatgaaaacaggatggcttagtgataatggaaaatggtacaacctatctaatagtggagagatgactataggttggaaaaaggttggtgaaaagtggtatcactttaataatgatggggtaatgagcataggatgggtaaatgacaatggcacttggtattatactaattttagtggagaaatggaaactggaacattaggcataagtggcaaagtttatactttctctgatagcggagaaatgctaaatggtaatactgagcaaatagaaagtggatcagagaatgtaaatggtgtaaaggatgacacaaattctcgtattgcatatgttgcgacaaataatgattcattaaacgttcgatcagatgcatcaacttcgtcagatataattgataatatatacagaggtgcacaggttaaaattgttgatgatgaaaaaaatggattctatcccataataataaatggaaaaaggggatgggtaagctctaaatgggtcacgtttaataaacctgaagatgatacaacaaagagtccaagctcttctaatatacctaattctagtgtaggtactccatcagtagataataaaaattctaatgcgatcagtagttcgcttagtgatataaggaatacacagccaagtacagataataagtattactattctgatgataatcttttttataaagttaaactttcgccaccattttatagtggaggaaaaccgattaaaggaaattgtacatggtatgcttggggacgcgcttgggaaattacaggagtaaagccaagtgatgcaggatttataggaaatgcctatgaatggtgggacgcaaatcaaaaaagcggtaaataccagtatggttctcaacctagagtaggagctattgcagtttggaaatctaacatgcctaattctggaggcgatggacatgtagcaatagttgaaaaaatagatggtggtaaaatttatatatcagaatcaacttggaatggtgtaacttttaggtatagagaaatatatgataccaattatttatatggatatatttatctggacaaggcaaaccactaagaatttcataagctaaaggggctagggagtagtttttattagtgaaacataataaatattattgcacatgtaatataaacagaggttaatattaggttataaaagctaattataaaaagctatcctgaaagagaggtgtagtaatgaaaaaaattaaaaagttaagtatagtagcaagtatagtagcatttatgctggttgtatctaatggatcacataatgttgcaatggcagaggaatcatcagtaacaaacaatagtcaaggagtaagattaaatgatgatttttatgatgcagtaaatagtgattggattaaaaatgctaaaattgaagatggaaaatctactgcgtctacttttgatgatgttgagaataaagtaacagaacaaatcaaagatataattaacaatttgttgattaataaggatgcgtataaagaaaatagtgatgagaagaaaataataaatatttacaataatactttaaatatagaagcaagaaatagagaagggataaaaccagtaaaggaaaatttagatgaaattaaatcaattggaacaatagatgatattactaagctctggaaggataagaggatattaaactcaacaataaagttttctgtagaaaaagatataaaagatgtgaaaacaaatatactttatataagtcctactgcgcttagtttaggggattcagatgaatatactaatccaacagagaatagcaaaaaagagcgtaagttaacggaagattattataataaaatattgatgttaagtggatatactcaacaagaatctcagaaaaaagttgatgatatgtttaaatttgaagaaatggtagctccgtatattaaaggaaaaaaggaaaagtctacaactaagaatttgattgatgaacaatataatgtatatacagtagcagaattaaataatttagctcctaatttaaatctaccagaaattatgaattatatgggaatagacaaagctaataagattattttagaagatccagaatggttgaaagcatttaataaattatataatcaagaaaatttacctctcattaaaaattatattgaaatagttaatttactatatgcatcaaattatttaagtgaggattttgaaaatgccaataaagaatacgcaagtaatatgctaggcataactggtaatgtatcaaaagaggaagaggccgttgataatgtaaattctatgatgggaatggctattggaagactttattctgaaaaatatgttcctgaaaagactaaaaaagatgtagaatccataacaaaggatattatagcagtttacaaaaagagaattgataatcttgattggatgagtagtcaaactaaaaaaaatgctattgataagctagataagttaaagataaagatagcgtatcctgacagttggaatgattattcaaagttagatattaaatcatacgaagaaggtggatcacttttccaaaatgcaatgacacttagaatatttgagcgtgataagatgtttaataaaataaacaaactagtggataaagatgaagatcagtttaaacctcaaacagtcaatgctttttatagtgcaacagaaaattcgattattataccaggcggaataattcaaggccatttttatgatgtaaatgcacctaaggaagttaatttaggtggaattggagttattattggtcatgaaattagccatgcttttgataatactggggcccaatatgattctgatggtaaccttaataattggtggaccgaagaggattataaagaatttatgcaaaagactcaaaaggttgcaaatttttatagtcagattgaagcaatgcctggtgaaaagttagatggcaatcttactgtgggagaaaatattgcagatataggtggagtatcctgtcttttagatatactaggcgaaatgaataatgcaaattataaagcgttttttgaaagttatgcagttacttggaggcaaataacaacaaaagaatatgcaacatatgcattaatcatagatgttcactctcctaataaggttagagtaaatgcagtcctaccacaatttcaaaagttctatgacacatatggaattactgaaaaagatggtatgtatgttaagccgggggatagaataggaatttggtaaatgatatcttatatgttttaagtgaaaaataggtagcttttcaaaaaagctatctatttatttattaatggcttataatttgacattcattaattttgagttaataataatgtaagtataaaattaaaggagtagtgatgctattatgccagcaggaaatggagtaaattgcggagattgtggagaactaaagcaaggaagatgtaatggaaaggatctgacttgtttatgttataaatgtccaagaaaattggcacagtgtatgtgcgttaaatattgtagagaaactgaatcagtattatattttgatgaagacaattaaaatataactttataattactttaaatgtactcctaaaggagtatgtttagtataaaaaataatcaaatgataatgttgaaaggcgaatagtgaaagagtaaaataatgtataagtaaattgatatgtgcaaagaggcatatgtaaatatctcattaagagaattacatatgcctcttattttatattattcaatactttaggaaaggaagttttagcaaatgcgtagtttagaaacaaatgattggatggttattaacaatatagtatatcagattaattctattgagaattctactactatgcgaaaaaatttccttactcagatggctttagttttagattttgatagtgctgatttttatattgcatcagaattaaatagccatacattggttaaaccagtattttacaattataagcctagagcggatgaaaattacatggacaagtatgacggtatagattatagcaggggattaatgtttggtggtaaaagtaaagtatatagagaaagtgatattatttcagagaaaaagagagtagagacggaatactataaaaagtactttgaacctaacaattggcatcatacactaaatatgatattggcacacaaaaatcagtttgttggtgtagtatgtttctttagaataaaaggaaaagaagattttatatatgaggattcttttgtacttgatattattaaagaacatttagcctttaggttatatcaggatctaaataataattccatgggtggagaaaaaatatctatttcccagtgtgtagatacttatggattaaccaaaagggaggaagctgtgttatgtgaactaatgaatggattagagaacagtgagattagcaataaattatgcattacaaataatacattaaagaaacatgtacttaatatatatagaaagctaggtattaagaatagagttcagctatttaagatggttaaagaaagaggatgagaatactactttaggggtatctatatattaaaaaggataattaaaatggtgtttttggtgaattgttataaaaagattttgatagtatattattcacaagaagtagtgaaatagttgtttagatggaagtttgtatataattttgcaattagggaggagagaggttatgaaagaaatagtattaattataagaccggaaaaattagaaattattaaaagtattttggatgaataccactgtggtggaatgacaatatcaactgcaatgggatgtggaactcaaagaggctcgctagaaggtgtaaatgagattaagggtttaaaaacaaatataaatttattacccaaaattaaagtcgaggcagtagtagaggacaatataatagaagatattatcttatcagtaatagacaaggtaggaactggcaatgttggagatggaaaaatttttgttagaaatatagaacaagttgttcgtattaggacaggtgaaagaggaagtaaggctttataattataaatatttagatgcaagggtgcataaaggtatgaatatctttatgcacttttttgttttagctcatgatagaagattcaggaaattataagcataaaagctatttttatttagaggagtgatttagatgataaaaggtatattaaagaaacttatattaagtataacaataggatgcatggtaacaatgagtttatctggctgtggttcaaatactcaatcaacttctaatggaagtacaggtgaaaattctggtgaaagtaaggaattaaatgttatctgctggtccgaatatctgccagatgacgtcctaaaaggctttgaagaaaagtatggggttacagttaatatgactacatttactgatccagatgaaatgcttgcaaaagttaaatcaggaagtaaagggacatatgatatgattattggcccggctcaagatattaatatactaaaatctcaagatttgattcaaaaattagatacaagtaaaatagagaacttcaaaaatattgatgagcaatatttacatgaagcaaatgatcctaaaaatgaatacagtattccttatttgggtacaagcatattaatcgcagttaatacagataaaattaaggataatataaaatcatataaagatttattgaatcctaagtataaagatactatggttgttgttgaggatgctaggccaatagtcgggattggattaatgacaaatggatataagataaatgatacaagcgatgaaggattaaagaaagcagaggactttttaacacaattgaaaccaaatattcatgcattcaatggtgatagtccaaaaacattattattaaatggtgagtgttcattaggccttgtttatggaggtgaatgcgctttagcagctaaggagaatccagcaattaaagtagtttatccagaagaaggcatttacttcacatttgatatgatgatgaaagtgaacggagctaagaattctgagaatgcagacttactaatgaactatatattagatccagaagtaagtgctactatttcaaagactttcccatatgtaaatccaaacaaagcagccaaagatattctaggagacgactttaaaaataacaatattatgaatatcccggaggctgaaatgaagaaaagtcaaggtttacaagacattggagaaaatgtatcaaagataactgacttatggactaagtttaaaggataagggtgaaaaataagactttggaggggattaaatgtctgaggttatcgtgaaaatagataatataaataaaaaatacggagataatcatgtagttagagatctatttattgatataaaaaaaggtgaatttttaactatgcttggcccctcgggttgtggtaaaactacaaccttgagaatgatagcaggcttcgaaacacctactagtggaagcatttatattgagggggaagaggttcaaaactctgaaccttatgagagagaagtaaatacagttttccaaaactatgcactatttcctcatatgactatttatgataatttagcttttggattatcagtcaagaaagttaacaaagcagaaattaaacagcgtgttacagaaattctcgagctagtgcagctagtgggatttgaaaatagaaaaccagatcaattatcaggtggacaaaaacaaagggttgcaataggaagagcccttataaatagaccaaaggttttgcttctagatgaacctttaggagctttggatttaaaattaagaaagcaaatgcaatttgaattgaagcgtcttcaaaaaaagttgggaattacatttgtttatgtcactcatgatcaagaggaagcacttacaatgagtgatagaattgcaattatgtatggaggagatttagagcaaataggaacaccaaaggaaatatatgaaaggccaaaatctaaatttgtggcagattttattggagaatcaaatattttttatggagttgctaataagttagagaatgatttatcaagagtaaaattagaaaatggagatgctatagtattggattctcaggttatggataatgaaataatttatgttctagtaaggcctgaaaatataagattatctaaggaagcgatagaaggatttactcttgtaggaaaagtaaaagagcatgtctatattgggaatgttaataaaacaataattatgcttccaacaggaatggagataaagatgaatactactccaaaagtggaattactaccaataggttcagaagtatatgtgtattgggaaaaggaagatgcagttgttattaaatcacaaagccaagaagtcttcaatgttgtagataatcccgtatttacagtagagaaccaaacaaaataaggaggtgcttaaatgaaaagtaaaaagaaaataaacatgcctcttataaccacagttggtccagtttcagcatggatgattttgctagtggctattccatttatttatgtcttcgttatgagttttatgaataaggggacttatggtggagttgttattggatttacattaaataattttgtacaagtatttgatccgttatatttaaaggtttttggtgaatcatttttgatttcgacctttacgactgtaatctgcatagtaattgcatatccatttacttactttatagcccaaaaaacaactataaagaagatagtttttatggctatggtaatagttcctttcttggtaagttcgttaattagactttttggatggatcaatttacttcgcaaggacggtattatcaattcactattgttgaaattaggattaattaatgaaccacttcaactagtatataatacaaccggggtaatgataggtctagtatatatgttattaccattcatgattttacctttatatagctcaattgaaaaattggataaatcgcttttggaagcctgtagtgatttaggagcaaaacctattacttcttttatgaaagttaccttaccacttacgatgccgggaatatttgcaggcagtattctagtatttattccttcattaggatatttctttgttactgacttacttggaggaagtaaaactcaagtaattggtaatgttattagaactcaatttataaccgccaggaattggccactcggatcagcaatttcaatatttttaattgtaattactttggtacttgtatggttataccaaaaatcaggtggtaatatggacgacttaggaggtatgtaaaatgacaaagatgcagaaaaagaatatatctagaatatttaaaaatatttatatttatcttgttttcttatttttatatcttcctatcttttatgtaattattttttcatttaatacttcaaagttaaatattactttcgaaaatttcacttttcaatggtatgggaccttcttcaaaaatagaactttaatggaggcgctttcaaatactttgattattgggattataagtactattatttcaactattataggaactattggtgctatagggctaagtaaatacagatttagaggaagagatgtaatagataaattattatacatccctatagtaattccagaagtagtacttggtattgctctactttcaatatattcagttcttagtattcctttaggattaattagtattactttatctcacattactttcagtattccttttgttgtaataacagtgagagcaagacttgctggatttgataaatatcttgaagaagcagctatggatttaggtgcaaataggattgtgactttctggagagtaacgttaccgctcataatgccaggagttttgtctggtgctatgctggcattttcattatctattgatgatgttgtaattagcttctttacagctggaccaggaagtacaacacttccacttaaaattttctccatggtaaagactggagtaacaccagaagtaaatgctttatccacagtaataatggttataactattataattatagctttaaatactgcatttcaagttaggaagcttaagtcacaataagagaatagtagaacggaatatttgtctgttatttattttcacgttcatgaagataataaggaataaaggtttactaacttgaataagagggtgagttaatgattaaatatgatgttgttattaagaatggaaccataatagatccaaagcgaaaaaagagtactattgctaatattggaattctaaatggaaaaataagagctataacaagagaagatatggaaggtaacattgaattagatgtaagaggcaaaacagtatgtccaggtattatagatattcatgctcatgtagagggggacttagattgtgctagagtgctagcagccatgggagttactacagtatacaatggtaattgtggaatgtctccagaaaatattaaggaattctacaataaatatgatagttttttaatcaatcaaatagaacaaattggacatactactctgagagaacaagttggggttactgatagatataaatcatccagcgatgaagaagttgaaaagatgaaggttatccttgaagaagcatttgaatttggagtcagcggattatcattcggacttgaatatgttcctggaagctcaaggaaggaagtattagaactagcaaaagttgcagcccaatatggaaagttagtatcaattcatacaaggtcagactcctatggtggcctttctagcttaagagaagctattgatataactagaaaaacaggtgcagctgtaaatatatctcatctaacttaccagtttggaatgggaatggcaacagaagctcttcatatgatagaagaagctttagctgaagggctagatatatctgtagatagcggaatgtatagtggatttgcgacttccattggaagtgctgtttttgatgaaggctgcatagaaaagtggggatgcgattatagcagcttaatagctgggactggtaaatataaaggtaagagattaaccaaagaaatttatgaagaacttagacgaaattatccggatgatacggtcataggcatggtaggagaggaatatgaagtatttgaaatcctagaaaaaccttatgtaatggtctctacagatgcgggaacattatacgatgctggagtcccaggtcatccccaagatgcagggacatatcctaaattttttaaaactatggtaagagagcagcatagaatcactttaatagatgctataagacgatgcacatacatgccggcaaaacgcttaggattaataaataaaggatttattggagttggagctgatgcagatattttaatatttgatgcgaaaataatagaagatagagcagattatccatgctttggagccacagacacaaggccagaaagcattgaatatgtttttgtaaatggagttattacagtaaaagggaaagaagtattggatataagtgcagggaaaactattaaagataagtgtcttatgtggaattgggagcaatgataagtatggaataaactaataagggctaccacaaatattcttgagaatattagaatatatattcttcggaatattaccataaatattcttaagaataagtattctgtaccatatatattcttcagaatatccttaaaaaatcgggagctacagatattttattagaatttgaaattaattgttaatagaaattaatctgtgaaattcacagcaaaataaattggtggcaaaaataagttgagagatcttatattaattaaatgagaggaagagatattatggaaattaaaaagatgtacatcaatggtgaatgggtagaagctacttctaaaaaaacgagagatgtaataaatccagctaatggacaagtaattgcaaagacaacagaaggcgggattgaggatactaagctagcaattgcagctgcaaaagaatctttttatggaaaaggtgaatggaggagaatgaatgcacaagctcgtgctgatattcttttacaaattgcagataagatagcagaaaaaagagataaatttgcaatgctcgatacaatagataatggaaaacctcttcgtgaggcagaaggtgacatagatgacggaattcattgttttagatattatgcaggcttaatcacaaaaccatatggaggagtttatgatgtaaatgatggatttgggcaaatgcactcatatacagtgcatgaaccagtaggggtatgtggacaaatcactccatggaactacccatttttaatggcagtttggaagttagcgccagctattgcggcaggaaacagtgtcgtatttaaacctagctcaaatactcctttatcaacaattgcattatttgaaatatttgatgaaatagggcttccaaagggatctgttaatttggtattaggttcaggtggaactgtagggcaggaaatagctgaaagtaatgatatagacatggttactttcacaggaagcacagaagtaggacaaagtattgcaagagctgctgtaggaaaccttaaaaaagttggcctagaacttggggggaaatcaccaaatattatttttgcagatgcggactttgaaggagcagttgaatgggccatggttggtatattctttaatcaaggtgaagtttgttcagcaggttctcgtattattatcgaggagtcaattaaggataagtttgtagcacgtcttgcagaaaaagcaaatgcaatgactataggaaatccagtaaataatccagatatgggtccgttagtttcaaaagaacatatggaaacagtattaaaatatattgagataggtaagaatgaaggtgcaaccctagtttgtggtggagaaagatacacagaaggagaatgtgcagaaggatattatgtgagaccaactatattcgacaactgtacttcagatatgacaattgtaaaagaagaaatctttggaccagttgtaacaattcaaacatttaaaacagaagaggaagctatagccttagctaatgatacaatctacggtttagcaggagcagtatttacatcagatggaactatagcattaaaagtaataaaggaaattagagcaggtatcacgtggattaattgttataatccaactttcaacgaagcaccatggggaggatataaaatgagtggatatggtagagaactaggtgtccacggtttagaagaataccaagaaataaaacaaataaacattaatttaaccccaggaccaattggctggtacgaacattaaaattggttttgtgaagaatataaagtgaagcgagaacaaccgaaagagaatacatatatgttcctcaggactgtgaaaaatttcgctgagaatatctaaatggaaagttgcaccacttctgcatgctcctgtgacaagcgcaggacaagcaaaagcggaacaacttcccattaagatattacggcagcttatttttcaatgcctgctccacatatatgtattctctttctttgtgctgctatcactttacatacttcttcacatatattctatttctgatttttgtagtaaatttaaaatatttctgcactgcaagtatttttacatttcgggtactttgtagcgtccttaaagtaaggttattctctaaattttaacaagttccatttagtagacacattgaatttgcggtataaattctgaatgtgtttttttagtgtatatccacttatataaagtttgttagcaatttcatcattattcatatcctgaaaaattaattgtaaaacttctacttcacgattcgttaaattatacttcgaggctagatttgccatagagaacgatatattggaagaattttttgaatcctttgtataatattcataaaagcgaagattgagatgatcgctaaaggcctttacaatgaacatctcatcggaggtaaaatctccttcttctcgtctacgataaattgtgagaactcctaaaaataaatcattatatacgagatttaattgtaatgagtaatgaagcctaaatggctcgtagcatttcttatatagtactgttttcactctctcttcttcaggcattaaatcgctttcacgaataagtaggcattgtccgctcaacattacccaacgagtataatcttcatcttcatttaaaaggtaatttttttcagtatctgagtaaacctcagggacacagatgggatcacataccaagttcttcgaattagtatggtcagccattaaaatactggaggctgtattaggaattaacatttttagtaggttcaaaaatgttattttcattgtatcaaaatccggaatgctatatatctgataaattatattatttattaatagaaattcattattttgcatatagataccttccataactatatattactaatatttatatctgcataaatattctataaatatgcgagattattaaaggtattttaccataaattacataaattgtacatgtagttataatacttaaatattattgtaagtatatactaacaaggaaagaagatacttataaagtagtatacgtacttctaaaataatgcaataaccatacattgagagaattgttttaactagggcatttgatttataataatatcaataaagaaaatagattaaatacaacgacgtattactgatttaaaatcattgtaatgcgtcgttttgattttagaaagggagtaattattatggcacaaagagaacaaattgttgaagatttaaacagagttataggatatataaaaagcgatggattaacaaacgaggaaaaagaatcaattacaaaggatacaataaattattttgataactatgtaagtccaggatggcttaaatacagaaaatcagtatcaacaaatgcagcagttgtagaatggacagatcagggagcatattgcacaggattatatggagaagaatttatagattgtctaggtggatttggaatttatacatgtgggcatagaaatgaggaaatacttgatgttgtaaaagcacagctcgatcatcaagcattacattcacaagaattattagatccattaagaggatatcttgcaaaagcagttgctgaaattacgccgggagatttagaatattgctttttcactaatggaggagcagaagcagtagaaatggcattaaagcttgcaagaatcgcaacaggtggaagatggtacatttcaacagtaggagcgtttcatggtaaatcaatgggagctatttcaatgggggggaagagcacatacagagtgccgtatacaccaatggtacagcaagttcaacacgttgaatatggaaatgcagaagatataaggaaagctataagtaatctatatgcagtaggcgagagagttgcagctgttatattagagccaatacaaggtgaagcagggattatcattccaccagaaggttatttacaagaagttcgtgaaatatgcgatgaatatggagttgctctaatatttgatgaaattcaaactggaatgggtaggactggaacaatgtggaggtgtgaagcagaaggtgtaactcctgatatcatgacttttggtaaggcgtttggtggaggaataatgccaataacaggtattatatgcagacctaaaatgtggacagaagaattagtggacaatccatggcttttaggatcaccaacttttggaggaaatccagtttgctgttcagcagcgcttgctacaataaaatatatgctagaaaatgatgttccaggacaatgtaaagaaaaaggtgaatatttaaagtcagggttagaaatgttatggaagaagtatcctacagttataaatgaggtaagaggtactggacttatgttagctgtagagtttcgtgaaagtgatataggatactctgttgctaaggggttatttaaaagaggcgttatgactgcaggaactttagtaaatgctaaatgcatccgttttgaaccagcagctgttatttcaaaaaaagatatggataatgttattgagagaatggatgcagcattggaagatacaaaaaaggaatttaatatttagaagtaaagatgctatatatcaatgtatatagcatttttttcatgataaggagatatgtgcttatgagacaattaatgctaggtcctgtgatatataaatataatgattgtaaaactttttgtaaggaatttcacataggcaaagatgatttgataattacagaaaaagaaatatataataattgcttgaaatttaatgtaaatgaggcagcagttctgtttaaagagaactatggaattggaaatatgtctgaggatatcgttgagagtatgtatgaacatgttagaagaatatctcatgaaaggattattgctattggcgagaaatgtattttagagatcggaaaaatattttccttaacaaatatttctccagttgtagatttatacaataataagatagaaataattaaagaaaaagaattagtattagtcccaactaaacttggtatcggaagtgaagtaaataatgtttctgaattacaattaaaagaaaataatatgaaagtaagccttgttgcagatgaattatatgctgatagtacagttatgataacagaattactaagcaaattgccactagacctgcttataagtagctctataaatgcattaattcatgccattgaatcatatttatctcccagagcaactgaatatactaggcttttttctttaaaagctgttgaaataatatttagaagctataaaaatattataaacaaggaaatggttatgagtagtcagacagtagatgattttcttttagcaggcaattattcagaaattgcttttgcaaatacaggcggggatgatttagatgtaattaagcaggaattaagaaaaaaagataatacagttacgtatggagaagctaattatattacgtttatggaaatgcttaaatcttatcagggtatatatcctgatagtgacatcataatattgagtggattttttgcaaatttgttagagtgcgatactagcgaagtgtttgaacaagtagaaaatctattatgcaaactaattgtaaaaagttcatcaagtaagaggcgatagattaaatatagaagaaacaaatataaattatagaaatttataaaattaagtaaaagacaaaaggtcttaatgataataacaatttaaatctataaataaattaggataatcatataaatactattttacatcagattatgatatcaaaaaaatatggagtttagtaaaaatgctctatattttcaaagatataaagaaattataattggaataataagttatagctttgcgctagaaagaatataatattgatcattagaaactagttaaaatcacgaatagttagaattataatgcatatatttagttcatcataatggtaatattttatgaaatttatatagaattgatattatctatttcaaatat

SEQ ID NO: 20 - DNA, 79868 bp, Clostridium beijerinckii
taaaatagaagtcatttacttcatcgctagtatattttataaatctagcttgatgagaataagcagcgattccttttaaaccatattttatagtttctctaagagaacgaatatctggatctaagttctcatcgtacattattccagctttttcagcatcttcaagtatagattctttagaatcacttaggttgtacaacgcttcaggagaggtgatattttcagatttaacctttgctcttaaagactctttaatttcttgagactttttaagttgaataaggtgagccttagggtcaaaattaacattagttaatgtcataaataaagaatcttcaacaaaagaggctactgatgtgtcaaccttttcatttttgtttaaaagttcttttgtgtaaacactgattccttttaattgataaatcaataaatcttgcattgctgcaatttcaggtgttttaccacacacacctattttagtacatcccttacccccagcagtttgttcacattgataacaaaacattttttctaccataataaaaactcctctcatatttacataatataatgctacggatatattatacaataaattggataaaaataaaatataattttcataaaaatgtaaaaataaccacaataaataacgaatttttgtcaaaactttgattataatttaaaaatttgtgatgttttgctgattcttctatgagaaattccgaagttatttatttaaataataatactatcgaaaggaattaaatcttataaagttaaggattggaaatagagtatagcatttttaaattattataatcatatactttagctgtagaaatgattgaacgcatttgcaatctaaaaccagtacataatttagcttatattaatgataattattatagaaaatgaaaagttctaattttttaataagttgaaagaagtaataaattatggaggaattaaattgactagtggaaaagtatgtccacttacaaaagctaagattcatacgtcaaagagacttgcaaacgatgttgtaggaatgctaaaagataaaaagtctaaaaagatgaatgctatatggcttgaagtgacaggatgttcaggaaatataatttccttacttaatagtgaaaatcctgggctttatgatattttaactgacatgttgaattttacttataacaacacacttatgggattagaagggcagcttgcttttgaaaagtttttagaaacactagatacagagtttatattattagtggatggggcagtttcaacaaaagaaaatgggcgttataacattgtagcaaattataatgggacaaatatcacagcattagatgcaatacaattagctggcggaaaagcgaaatatgttgtagcagtaggaacttgcgcctctcatgggggaatatcagctgcaaaaccaaacccttcagaaagtaaaagtgtacaggaagttttaaatcgtcaagttattaaactaccaggttgtccttgccatccggattgggtagtaggaactttggcacacttgattggttatggtgtacctgaattagatagcgagggaagaccactacttttttatggagttacaattcatgataattgtacaaggcgaggattttttgatcaaggtatatttgcacaaaagtttggagatgaaggttgcatgatcaaactaggatgtagagggcctgttacaaaaactgattgcccaaggagaaaatggaatggatacgttaactggcctattggagataatacaaattgtattgggtgtgcaaatgcacaattcccagatggaatggaaccttttgtaaagtattaggcacatgaaataaaatagtggacaagtatactgatcaattgttttatttcatgtaccacaaggaggagttatgggcaaaacgataactatagatccggtaacaagaatcagtggttttttggaaataaaagcagaagtagaagggaatacaattgctaaagcaaatgcaagtggactactctttaggggattcgaaaaaatgttaataggaagatcacctttagatgctgtatattttacagagagaatttgtggaatatgctctactgctcattcaatggcttctactttagcgttagaagatgcattaaaagtaacagttagtttaaatgataattatattcgagatattttacatggctttgaatttatacaaaaccatttaagacatttttatcttctgtctatgccaagttatgtaaaaatatcaaacataaaattaatagaagaacaacaatatactgattatagactaccagataaaataaacaaaaaaatagaagaggattatgtaaaaagtattgaactcagtagattagctcatgaaggattagcacttctaggaggaaaagctcctcataaccatggtatttttgtaggtggagttacggtgaatatagatgcgtataaactagaaaaagtaaaaagtattattagaaaaatagaatcttttgtaaaaaatataatgaaagaagatgtagagataatttctaaatattactctgactattttaaaaaaggacaatcttatccatattttatgacttatggagtatttgataaatatgaagattctgagattacttatgttaagtcaggagtaatgaaggataatgtaaaatatcctttggaaccagataaaatcacagagcaaatccattattcgtggtataaaaaggacgaagggctggaagaagtagatttatctaaattagatgcgtacacttttataaaagctccccgttatttaggacttcctatggaagttggtcctttagcaaggttaatagtgagtggacaatacacaaatggacattcatgtatggatagaaatatagcaagggtattggaaacagaaaagattataggaataatgaataagcttattgaaagagtagaactaagacctaataatcaaaaaacttataatatttcagaaaaagcttatggtgcaggcttaactgatactactagaggtgctctcggtcattggattgaaatagataaaaatgttattaatcattataatatcataacaccaaccgtatggaatttatcacctaaggatgaatcaaatcttcctggaactatagaagaagccttgattggaactaagttaaacaatattagagagcctatagaaatcggtcgtattgtaagatcatttgatccatgtgtatcttgtgcaactcatttgattggatcagcaggtgatacagaaatagtagaggttttggtgtaaaaatatatgcatagataaacaagttaaaaatcatacttatgtgataactcgccggaagaatgaatactctgttgtttcggttactggagaatacagctgtggatttctaatagcagaagttgcacccactgttgcatgctcctgagggaagctcatgacaagcaacaggaacaacttctgctaaagaaatacctacagcgatattctcagatgaaacactacacaaaagagtattcattctttctagtgtggaatacattttaaagtacaaatttggatcgaaattcgtttatctatagaaagtggagaaatatatattatggtaaactctaatattaaagtgattgcgattggaaatgttttaatgagggatgatggtataggaattgaagtagcaaaaaagatagaaaagaagcttttagaaaagaatattaaagttatttatggagaaaccgatgttcaatacagtattgccagtgtaaaagaagatgactatatatttattttagatgctgcatattatggaaagagtccaggtgaaatcacttgttttcagttagatgattttgtttctaagaaaaagggatattcccagcatagttataatttcttggatttattaaaacttttttatcctggtgctaaagggcaaatttatggaattgaagttaatgatgttggaattggcttgggattgagcgaagaattacaagataaattggaagagatttctaaaaagattttagatgaaatagaaataaatatacttaatttacagtcaaaaaataaatgaagggatagtgaaaaatatgcatgatactattttattaagtaagatttcagaagaattaaagaatatatgtgaaactaataatattaataaagttaaaacattcactgttattgtaaatcacagaagtcatgttaatgaggagaatctttatgaacatcttcagaattttaattcaaagttagttggaaaatggacaaaagttaatgtacagagggaagatatacaggatcaaacagcaattcttaaaagcattcaaggcgaacaaaatgaaaattagaagtctatattggaaactcgatattatcccaatatatcgttagataggatcagggtgaaaatcagaacaagggtctgtcactctagtaatgcattatacaatatattgagtttgcctttttgtatacaaaacaatatatataatgaaaattacttaatgcgatagctcataacatataaatagagaaggtctttaatatatgagatatatagtaaaaatttacggaattgttcaaggggtaggattccgtccatttgtatatgaaaaggcaagggactttaaaattcgtggatctgttcaaaatataggtggtgccgtagtaattgactgtttaggtgagagggaaaacataaaacggtttatgtttaatgttataaaaagacctcccagtattgcaagaatagaaaaggttcaatgtacgttaattaaaaacgatttaagtactactccatattccagcgaaaacaaatttataattaaagaaaacattgatcaaaaatttgttattagggaaagtactaaacaaaataatgaaatgagatttgtttcacctgatatagcagtttgtgatgaatgtttagaagatattcgaagtaaaggaaaccttcgttataaatatgctttcacaaattgcactcagtgtggacctaggtattcaattatcaaggctttgccatatgacagacagaatactactatgaaagaattttatatgtgcgaggaatgtaaagacgaatatgaaaatccactcagtaggagatttcacgcgcaaccaaattgctgtgaaaattgtggacctaaactctttttaacaaataatcatggagaacaaattaagtgtgaagatcctattaaagaaactatttcacttattgaggaaggaaaaatattggcgattaagggaatcggaggatttcatctggtttgtgatggaagaaatgagcaagctattaatttgcttagaagtagaaaacaaaggaaagataaaccattagctttgatggcaaaggatattggaattgttaaagagatttgctatatatctgataaagaagaggaagtaataagcagtaataagagacctattgtaattttaaagaagaaatatccttttgtattaccagaggctatagcaccaaagcaaaatagtttaggagtaatgcttccgtatactccccttcattatctattatttaatgaaaagttagatcttttagttatgactagtggaaatataagcagcatgccaatggaatataaaaatgaagaagcactaaaacatttaaatacagtggcagattattttctgatgaatgacagggagatttacgtccaagttgatgattctgttgtaaaagtcataggggaagtagaaaaggttattcgtggtgcaagaggatataggccttattcattaaaaacaggagttgaaaatgatattatagcagttggagggcagcagaaaagtactatttgtgtttctaaaaatggatacgcatatttaagtcagtatttaggtgatttaggagaatttaattgttataagaattttaaatatgtactaaaacatttttgcaatttatttgatattaatgaagaagtattggcatgcgatatgcatccagcatactcaagtactaaatatgcaaaggaaaagaaaatgagaaaaatagaagtacagcatcatcatgctcatatggttagctgcatggctgaacattctatttatgattctgtaattggaattatatttgatggtactggatttggacttgatggatcaatatggggtggcgaatttttggttggaaatcgaagagtatttaaaagagcagggcaattgaaatatgtgaatctccaaggaggagaacaagctataaaagaaccttggagatgtgcttcaagttatttatatgctttgggttatgatccagaaaaaataattcaaggagtagataatgaaaaaattgaagtagttaaacaagctttagattcaaaaataaattgttttttatcttcaagtgttggaagattgtttgatgcagtagcagccttatgtggaatcagaaatagtatatcttatgacggacaggcagcaatagaattagaaaatattattgattataaaattaaagaaagttatttatgtgatatcaacgaggaaaatagtatttttaatattcaatataaaagcattattgaaggaatcttgggggatattcagaaaaaagaattgatttctaagatatcgtctaaatttcacaactcacttattaaagcttcatgtgatttagtttgtaagcttagagaaaaggagcatatagataaagttgttcttagtggtggtgtttttgaaaaccattatcttttaaaaggaatatatataaatctgattaagcaaggatttaaagtgttttataatgaacaaatcccaactaatgatgagggaatttcttttggccagctccatgtggcaaatgcaattattgaaaagaaataatatatttaaatttgttatgtatatttttcataagactaagaagcaaagtgaattcatattgtatttactaagttaatctactaatgctatgttagaaaaataggttgtcagattgatttacgatttttataagtgtgaataaagaaggaaggtaagtttatgtgtcttgcaattccagcacaagttagaagcatagataactatagtgcaataatggatattatgggattagagagtagaattaatattcagcttattgaagaactaaaagtgggagattatgttttagttcatgcaggctgtgctattcaaaagattgacaaggattattttgaagaattacaaagtatatttcaatcaatacttaatagcgaggaaaaagtatgaataaagaaattttgattaaaaatattcttaatgaaattcaaaagtctcaagtcaaaaagtttaatgtcatggaagtttgtggaactcatactcaggcactttcaaaacttggaattagacaattggttaatcctaatataaatttactgtcaggaccaggatgtccagtttgtgttactccagaaggttatatagatgcagctatagaattacttaagaattcaaatgtgattttaagtacttttggagatatgattaaagtaaatggaagtagagagaatttaattaagcaaagagaaaaaggaaaagatattaaaatattatattcacctttagattcaatagcacttgcagaagaaaataaagataaggaaatagtttttcttggagtaggctttgaaactacaactcctataattgctttagctgtaaagatagcacaggaaaaaaatataagaaatatttcatttttaataggaatgaaaagaatggagccaatactccattacatacttaagcagcctaatcacaatataaatggattaatgtgtccaggacatgtagcagcagtaaagggagcagattattttaaatttattgtagaggaatataatattccagcagtaattgcaggttttcaagctctagatattgctagtgctttatattttttgacgaaacaacaaaataaaactgaaaaaagatttgaaaatttatataaaacttgtgtaagccaagaaggaaacaaaagagcaaatgaattaataagtgaagtattcacatattgcgaacatgaatggagaggaataggagttattaaagattctggatttactttgagggagaaatataaaaaatatgatgcttctgaaagatttggaataaatttaagtaagacttctgagaaaaactatattagaacttgtgcatgcagtgaaattttattggggaagaaattacctaataaatgcgagctttttggaaaaggttgtacaccagagcatccaataggaccttgtatggtatctacggagggatcttgctctattttttataagtatgggggagtggaataaatgaatgaaatgattaagcttattcatggtgatggaggaaagcatacaaaaatattaattgagcagcttttttacaaatattttaataacaatattcttttacaagaacaagactcagcaacatttacagcagtacaaggaaaaatggctttcaccacagattcttttgtggtaaagccactgtttttttctgggggaaacataggaaagcttgcagtttgtggtactattaatgatttagctgtatctggagcacagccattttatttaagttcgagttttataattgaagaaggattttcaatgcagagccttgaagaaattgttaagtctatggggcaaacctgtttagaatgtggggctaagatagtaacaggagatacaaaggtagttgaaaagggaagtgtagatggaatattcattaatactagcggaatcgggtatataattaacggatatgaagtaaaaactattgaagaaggagatagaattataataactggtggaatcggcgagcacggaacaacaattgcagtagagagatataacttaaaagtaaaaggagactataaaagtgattgtgcaccactatttgcttttatagaagaacttaaggaacagtttccttcaataaaaataatgagggatgcaactcgaggcggattagccactgtattgcatgaattttcatcactttgcaagcttgggatacacctaatagaaaaggaaattccaattagtgaaagtgttaaggctataaataatcttttaggattagatccattgtatatggcttgtgagggaagaatggtactagttgttaaagaaaccgaagctgaaaaagtattagatataattcactcacttgatcaaggaaaaggagctagaattataggtgaatttgttaaagagtctaatcagaacatatttatagaaaacggatttggtggaaagagattattatcgcctttagagggaagtatgctgcctagaatatgctaaggcgcgtaaataagaagtaacataataatgattttaattttgtaaatatgataatatggagtaaaactgctatagataattaatattatttatagcagttttacttgtttctatattttgctttaatgggtttgtataaaagtatatgtatattatttattattatgatattttatggtgaaaagtaaaaaatatgaaaaattatattgacaattcagataaaaatggttagaattaaaaacaacaaaaacacactaaccctatagggaatatgtaataaagtctttttattatatataaagggaggacttttaatgatagagttgaaaaatatacaaaaaatatttaataaaaagggcgtaaaagtagaggctttaaagggcgtcaatttacaagttgataaaggagatatttttggcgttattggatttagcggagcgggaaaaagtacgttaataaggatggtaaattacttagaacaacctacttcaggagaagtgattgttgataataaaaatttgggaaagcttacaactaaagaacttcgtgaggttaggaaacagataggaatgatatttcaacattttaatttacttgagtctaagaatgtttttgaaaatattgctattcctcttgtattaaatcatagaacaaaggatgaaattgaaagcagggtaaatgaactattagagtttgttggacttgaggataaagctaaagcttatcctagtgaattatcaggaggtcaaaagcaaagaattggtatagcgagagcacttgctactaatccattaatacttttatgtgatgaggcaacttcagcattagaccctcagactacaggatctatattgcagctgcttaagaaaataaatagagagtataatataacaattttaatgattactcatgaaatggctgtaattagagaagtttgtaataaagtagctgttatggaaaatggagaaattattgaacaaggcaatctattggaggtatttggtaatcctaaagaacaaacgacaaagaattttgttaagactgttgtgcatgacgaggtaccacaagttatattggatgaaattaatagtgaagatgagaatagcaaagtcttaaaacttaaatttataggtgaaaattcaaagaaggctatacttgcagaagcatgtagtgaattcaatgtacaaccaaatatattatttgctaatgttacggaattacaagggaacatacttgggaatctcatagttgaattaaaaggtgaaaaagaagatatagaaaatgctcataaatatatgaaagatagaaaagttggagttgaggaggttttgatatgacaacaataacaggaccgcagattattaaggctattattgaaactttacaaatggtaagtgtgtcgcttttgattggctcccttttgggaattccacttggaatattacttgttattactaataagggaggaattataaaaaacaaggctgtatattcagcactaaataatgtgattaatattgttcgttcagtaccatttataattttgcttgcagcaattgttccatttacaagacttattgttgggacctcaattggaactaaagcagcaattgttccacttataatatatataattccttatattgcaaggcttatagaaaattctttgctggaagttaatgatgggataattgaggctgcagagtcaatgggggcaacgccagtacaaataatatggcattttcttttaccagaggcaatgggatctttaattttatcgctgacaacagcaacaattggattaatcggagcaactgcaatggcaggaaccatcggagctgggggaataggtgatgtggctatttcttatggatatcaaagatttgatacaaaagtaatcctcattacggtaataatattaataatttttgtccaagccattcagaattttggaaataaattagctagaaaggtgagaaggcattaacaaataggatgtcaatcattataaatttataagaataaatagaattattatggtcttaaatgctactaaaacgatgggaagtataaaaatagaactaaataatcaataagttaggagaataaaaatgaaaaagaatatatttactaaaattattataggtttaacaacaagcctgtttgcattagggttagcaggatgcggaaacagtggaagtactgatacaaaagctacggaaaagaaggatttaacaataggaatatctcctggaccatatagtgagctatttacaagcgctgttaagcctatattagagaagaatggttatacaattaaagaagtgaatttttctgatttgagacaagctgatgtggcattaacagaaggaagtattgattttaatgtagatcaacacagtgcatatgcaaataatttcaataaagaaactaacaataagctaactccaattactcctattccaacagttccagcaggaattttttcgaataagcatacttcaattgaccaagtagctaaaggtcaaaaagtagcaattcctaatgatccatcaaatacagcaagagcttttaggcttctaaaaaaagctggatggattaagttaaaggaagatgcaaatccaacaacattaactataaatgatgtaagtgaaaatacttacaatcttgatataacactaatggattcagcacaaattccacgtgcattagatgatatagactttgcagtacttcctggaagtatggtttacgcatctaaaatagatccttcaaaatcattattatcagaagatgttagtaaagaattacaacttcaagtagttgttgatgaaaagaataaggatagtaaatgggcaaatgatatagtagaggcatataaatctgaggagttcaaagattatatggcagaacacaataagaataattactggttcataccagatgaaataaagtaagacagttttatataagcaattatatattgatatttaatattaaaaggttactctgattaatttttttaaaagagtagcctatatatttattgaatatgaaattatagaatattactaacttgaaagaccgatgaaattacgattagtagatctattataaaaggagggaataattatgaatgaaattgaaaaaaagataatagatatcattgataaaaatagagataaaattattgcttttgcaacagatatatataagcatccagagcttggctataaggaaaagagaacatcagaaaaggtattaaaaattttaaaagagaatagtgaagaaattgaaaccaatcttgcaattactggtataaaggggtatttaaagaggaaaaattcagaggagataaaggtggcattaattggtgagttagatgctgttgtatcaccagataacccatttgctgataaaaaaacaggagcctgtcatgcatgcggtcatcatactcaattggctggaatcataggagcggcatttgcactgtcagatgatgaaataaagaattcattagatggaaatgtagtgttttttgcggtacccgctgaagagtatggtgaagtagaatttaaactttctttaaaagaaaggaatttaattaagtatggaggaggaaaaagtgagcttattagaattggagcatttaatgatatagacctttctgtggtacatcattctgatcctacaggagctgatattgtagtaggagatagtacaagcaatggttttgtatcgaaagttacaaaatataaaggaaaagcatctcatgcagcaggaacaccacacttaggtattaatgctgtaaacgcaagttcactgggcttgaatgcaatagcatatcaaagagaaacttttaaagatgaagattcagttagagttcattcaataataaccaaaggaggcggattagtgaatgtaattcctgatgaagtagtaattgaaagtctagtcagagcaaaaaatgttgaagctattagagatgccagcagaaaggtggatagagcctttaagtctggtgctttagcagttggagcggaaatagagataattacggcaccagggtatcttccagtagtacctttaagaccgtcaaaagaaattttagaaatagcacatgaaatactgcctaatggaagggttgaggaagttgatcctaataaacatacagcaggctctagtgatgttggggatttgactcatattatgccagtattaaaatttactacaggtggagttgaaggcggattacattcagaatatttcaaagtagtaaatgatgaaatagcttatattgctactgcaaaaatcatggctttaacagcctatagattactaaaggaaaaagcaaaggaagctaaaaagattaaggacgggtttaagcctaagtttactattgacgaatataaagaatacatggataattttgatgagatatttaagggtgattataaaaatgaataaacccgatagcaggcacatttagtgaatcaagaatatattgttcactaaatgtgctttatgcttaaattaaaacttatatccataatggctaaaagatgatatactaatatgagaaagggagcgggtttcttggaagcatataaaagttttgaatcattaaatgatagatgtagatatatctttcgaatcatacaagaaaatggtcctatagctaaaaatgaattggcaaacgtaactaagataaaattaactacattaaatagagatcttaaaatattaattgacgaaaaaattattgtggaaagtgatattggaaaatctacagggggaagaaagcctagtttatatgatgttaatcatagtgaattttatattattggaattgatatttcaagaatttatactagaatagttataacaaatttgaaattaaaaataatagaagaaaaattattaagccatgaatatgatatggatacaatatctgaaattatacctaatgttataaaagaatgttatatgaaattaaaaatacaaaaagcatcaattgttggaattggaataggaatagttggtggatttaattcagatcaattaaaagatgaattaaaaagagaatttgatacaatgatatgtatagataatggtgcaaatgcagctgttataggtgaatataactttgggattggaaaaggtaaaaagaatattgcatatattaactgcggtgtaggaataagaacggggatcatatcatctggagttctaattcgaactattaacaacgtagaagatgcatttggacatatggttgttgatgctgacggggaattgtgttcctgcggaaattatggatgtatagaaagttatgtatcaatatcaaatataacaaaaaaatttatagatgaaataaaagaaaatgaatcatctttgttaaagaaaaatttaaatgatattaattatatagatgtttgtaaccttggggaaagagaaaatgaagaggctatgggtattataaaagattcggctttatattttggaataggactttcaaattatattaagttatttaatccagagcttataattttaagtggcccattaatacaacaatcaaagttgttttatgaaactacaaaagaaatagctcttcagaagtgtcacataaaaaataataatattcaatttattaggggtggatattttgaagataaatctatagctgtaggagcttgtgctatggttatacaaaaaatacaaaacgagaagataaggaagtgaaattatgaatccagtagcattttcaattggaggatttgatattaggtggtatgggatattaattgcaacaggtattatgcttggaatactaatatctcaatataattgtaagtggagagaagttgattatgataatttactaaacattgtattattatctattccaattggtataataggtgcaagactatattatgtaatatttgaatttgataactataaagataatattattaatgcttttaatataagaaatggaggacttgcgatccatggggggctaatttttgcattaggaacagcattaatttatacaagagttaaaaaattaagctttattaagtttgcagatgtggcagcaccgtcaattattttagctcaggctctaggaagatgggggaatttctttaatcaagaggcacatggggatgtagttagttatgaatttattaagcattttcctatgttcattcaaaaggggatgaatgtaaatggattatattacaatcctacttttttatatgaatctctctggaatttaactatatttataatactgatgattatgctcagaaaatgcaaaaaaaatggaatagtattttttacatacataggattgtattctataggtagattcataattgaaggaatgagaacagatagtttaatgataggaagttttagaatggctcaattggtaagtttagcgggagtcattgtatggataatatttatagctgcaagttattataatagcaaatctaaggagaatacttataaagagtaaaatttataattttatttgttaaaaaggagctcaatttagagttctttttttataatgttataaaatatcatttgatttgtttaataactgaaattttaaaaataatttaatgaagttagaataatgttaagtaaaaggtaagctgatattttaatgatatattggcttacctttttttgcattaatatatatgtcgcaaaaataattcttcatcacaattctaaaaatattgcaagaatttcagccataattgtgaaatgtgtattgcaacatatacatagttttattgtgtgataaagttactgataatagaagagcaattttataaaataaaaagagacaaacaagtaaggttagaagtttagttggaaagtgattagttaccttttaaactaagccatccagattgtattcaatgtggaaagtgtgttattgaatgcctaaaaaagcaattggatataataaaattactataatgtaaggaactaagcacaaaattgtgttttgaaatataaaatttaaaacttatatccaaaatggttaaaagatagtgtataatataggagagttatattaatataattaatagtttttaaattttaaaaacttgtttaattataatgcataattgttatggaagaaggttttaaatttgatacaatttttatggttaaccccattgggatttttagttggagcatttggaactctaataggtgcaggtggaggctttatattggtacctattttattattgttatatccagataagagtccagatacaataactagtatttctctagcagttgtattttttaatgcattatctggctcttttgcttattctagaatgaaacgtattgattataaatcaggaataatttttgcaatagcaacactacctggctcaatattaggatcagttataacatcatacgtaccaaggcagctttttaatgggatattcggtgtgttattggttattatatctgtatttttgatattaaggaccaaggaggagaaagtagaaaatagcttggtagttaagaatggctacattacaagaacagtggtagatattgaaggggtagaacatacattttcatataatcccgtaactggaatagttgtaagtatttttgttggctttatgtctagctttttaggcataggaggaggaataatacatgttccagtacttgtcaatatattaaattatcccgttcatattgcaacggctacttcgcattttgttctagcagtaatgtcattatcaggaactatggttcatatagtcaatggagtgcttcagtcaagctttatccaaacagctgcattatctataggtgtattatttggagcgcagttaggtgcgaagctttcaaaaaagattcacggagtagcgataattagaagtcttgcagttgcgttagctattgtaggggtaagaatatttattatggcattttaaatcttgaatcattaaatattttaatggttatcattaggtatttatattatatttattatcatatatctattatactgaaacaaaatgagaaagaattagtaattcatagttagggagatgtatgattattatggttaatgagaagagacaaaaagaaatgaaggcattaggttttttattacaaaatgatagggaacattacgcagtaaggtttttaagtagagcaggaaattttacagttgaagaattaaacaacataaatgggattgctaaaaaatatggacgagggtattcaggacttacaacaagacttcaaattgaagttccttggattaaagatgaagatgcagaaaaagtaatggaagaagcaaaatcttttggactacgtcatggtggaacgggtcaaaagataaggccattagttgcatgcaaaggaactgtatgtctgcatggtaacattgatactcaggcaatttgcagagaactagaggaaaaatattttgctacagatactcctcataagtgcaaaataggaatagttggttgtgcaaataattgtgcaaaagctaatataaatgatattggaataatgggaaagacaatcccagaatttaatttggacaactgtgttggatgtggaatttgtgttaaaggttgcaggcaaaaagcattagaggtagtaaatagaaaagtagtatatcatgaagaattatgtgtaagttgcggtgaatgttctagactatgtagaaccaatgcagttggtattaaagaaaaaggtgcagaaatttttgttggtggaagatttggacgaggaataagaataggagattctttaggaaagatatttaaagaaaaagacatagtatttgtagttgataagattatggaatgctatagagaaattggagtaaaaggagaaagaatctcgacagtaatggatagagtaggaaaagaaaaattcatatctgaagtattaagcagacaataagacattttatttgttgtcctttataaaccttagcttagttatagagagaaagactatgaattggttttatctctcttttttgttataatttgtttatgtgactatgtcacttatattttctaaagatttatatataataaagtcatagaaggaaataggtaagtaattgtggaaaatagacataaggtaacttaacagaattttcactaattgtgattaacttaattagcagaatactaataagtataaaaagaaaatacatagagcttaataggtataaaatcataattgatagagatttatattaaaattataagttgaggttaggaggaaatggtcatgaagaaaaaaatattaatagttggaggggttgcgggtggagcatctgccgcagcaagacttagaagacttagtgaagaagatgaaataataatgtttgaaaaaggacctcatgtatctttttcaaattgtgcactcccatatcacttaagtggaataatagacgaggctgataggttggttctaatgagtcctgaaaaatttcttgttcaatataatattaaagcaagggtgaacaatgaggttttatcaataaataaagaggagaagtatataacagttaaaaacttagaaaatggtgaaacatataaagaagactatgataagttagtattatctccaggagctaagccaattgtacctaatattcccggaattgaagaagtgaatatttttacaataagaaatgttgttgatatagataagttaaataaatatgttaaatcaattgatacacaggatattgcagttattggtggtggatatataggagttgaagcagcagaaaacttaagagatgctggttataatgtatccctaatagaggcaactgaccaaatattaagaccttttgattatgatatggttcaaatatttcataaagaattatatgatcatagtataaatttaattgttggagataaagttgaaaagtttgaaaaagatacggtgatactatcatcaggcaaaagaattagtgcgaaggttgttgtaatggcaataggagtatcaccggaaacagccttagcaaaaggagcagagttagatattggagaaactggagcaataaaagtagatacaaattacaaaactaatgatgatagtatatatgcggtaggagatgccatagaagtttataattcattaactcattccaatgtgaaattatcacttgcaggcccagctcaaaagcaggcaagatctgttgcagatcatataaatggaaagaaaggcttaaataagggatatataggttcatcagctataaaagtttttgattataatggagcatcaacggggttaaatgaagcacttataaatgttctcaacatgaatatacaatatgatgttgtaagggtaatacttacagataaagttggaataatgcctaattcatcgcctgtacatttaaaattattatatgaagttccaacaggaaaaattttaggagctcaagctataggtaaaggtgatgttacaaaaagaattgatgtaattgctactgctataaagtttggtggaacagtagaagacttaaaagatttagaattatgttatgcaccaccatttactacagcaaaagacgttgttaattatgctggttatgttggctctaatcttttaaatggcgattttaagcaggttaatatagatctagtcagaggacttgttgaacataatgcttatataatagacgttagagaaagaggagaatatgctaatgggcatattaaaaacgcaattaatattccattaagtgaacttagacaaaggataaatgagataccaaaagataaaccagtatatttacattgtagaactggtcaaagaagttataatgcaacattagcactacaaaacttaggttttaataatgtttataatattacaggtagtttcttagcactatcattttacgaatattttaacgaccaaactaagaatagagaaagcatacttactgaatataattttaagtgatttttaatatttaatttattagttgcaaaaggaaaagtaagtaaattataatattcaaaaggttcaagtgttgaataagaatagcacttggaccttttattaaatgcagatgtaaaaaataattagatatatggtatcttcataatttctccacagttaagcggtaaaatgaatatataaagagaagataattaaaatataatttgtattactatcatcgacttcttcataaaatctttacaaatattttgtattataaaataaaaaagattaaagatattgataaggagaagagatcagtgggatttaaaacaataataaaacttatggatataaaaacccttgttgcagggttagttcctgtaattttaggttcagtttattcaaagtatgcttttggaaagttaaatgctttgtatgttatattattagcaattgctatgatattgattcaaagtgctactaatatgattaatgattactttgactataaacgtggagcagacagtaataagagtggagatgaaaaagctctagttagcggtgaaatcacatctaagcaagtattatttataataatcttatatcagtttattgctcttatgattggtctttttttagctagccaaacaagctattacattttactagtcgctgtaataggaggtcttatctcaattttatatgcttttggtcctttacctatttcatatacgccatttggagagattatatctggagttactatggggattggtataactactacagtgatttatattcaatcaggcatatttaatataaatacaattttggttgcagtccctacagtattatttattagtactatattactaacaaataatttaagtgatatagaagaggatagtgaagctggaagaaaaacactgcctattatgataggtaaaaaaaatgcaaataagctttgggtttttaatataataatgttacttgtactaacagtctgtttagtgttaatgagcatttatcccattgtcgtgttattacctgtaattttaatatatccctataaatcaattaggagttttctttcatatgaaaaaagttctaaaacaaaaggtaggagtatgggacttataggacaggttggtctaaaatatcatttggccgtagttattggattgataattgcaattataatgtaaaaaattattatgatgtaatgtattaaaatttagattctgtctgatttgaaattataaaaatcctatgaatatgcaaaagattcaagtgttataatcaatagagcacttgaaccttttattatatataattagaatattttttgaaaatatattatcttcataattactccataattgagtagtaaaataagtatataaattaagaagaaaattaaaggagtgatacacaatgaaaaagaaagttatgattctagcattagcaggtatattaactgtaagcggaatatcacttgcatatgcggcagataacaataatacaaggtttaataaatttaatggacaaatgatgaatgtgaaaaatggtgaggttaaatcatcatcaaattatagaggaacaatgatgagcatgatggggtctggagcgcaatcagatgataatatcaataaaatgactgaactaatgaaagagaatggttttaatgatgaagcaaatgctatggaaaatagagattttaatgccatgaaaaatttaatgtctaatataagtgatgaggattataacaagatgattgatgtaatgaaaaataacggatatggatctatggcaaatatgatgcaatctgtaggaaaagaaaagatggcaaaacttcatcaaagcatgatgaggaattagtatcatcaaattttaaaaaatcgaaataaatttagaatgataatatgagaatggaaggatggtctggaatgatgattataccaataattttaattattgctgttatatatttaattttcaatcaagaagaaagtaaaaagcttaaagtttgcagtgttagagataattctctaaatatactaaatgaaagatttgttcgcggagaaataagtgaagatgaatataatagaataaaaagtacattaagatcataggtaacagtaaaaagtcatgtaaaaggagtatagataattcttcttttacatgactttttctgtatagagaaaaggagttatcttaatacatattgatcgatttgtaagaattttaatttttaaatgtaataagggcataatgtatatttttacgaaaatttttctacataaaatctttataaatattttgtatgataaaaaataaaagttaaataattaaatacgtgtaataagtcgcttattaataggaataatgcagtaaaacagaagtttgtattttataaacctctgcttttttgatatttattatgaatggctttaataaaaaattctttaaatttactttaataatgtctcggatttcagcggcacatgtggaataatttgaaaattatgtgttaacctataggatttctacataataacttcataaaaacttgttaatatgtgagcagatataaaattattaataacttttagactttgtacctgtagaaggaaggtttgaacgtgttgattttgattttaaagtaaattgaaaggggataaaaatgatacaagattatttgattattggaatttttcttatagcttcatttatttttggaatggtcgtcttattaacggcttccttagtaagaccgaagaagccaaataaagaaaaattatctacttatgagtgtggtgttgaaactactggttcaacgtggattagatttaaggtcagttactttatgtacggcttagtatttctactctttgatgttgaaacagtatttttattgccatgggcagtgaaatttaaatcattaggattattcgcactttttgaaatggttatttttataggcattttaatcattggtttatggtatgcgtggaaagagggggcattagagtggaagtaaattttaaacaagataaagagattcaagagcaaatagaaaaaaatattattttaactaaattagatgatactttaaattatttccgcgtacattctttttggccgttaacatttggactcgcatgctgtgctattgaaatgatggcagcaggaggtgctcgttatgatattgcacgttttggatatgaagttttccgtgcttcaccaagacaagcagatttgatgattgttgcaggaacaattactgaaaaaatggcacctatagttaaaaagatttatgaccaaatgccggaacctaaatgggtaattgctatgggaagctgtgcaactagtgggggaccgtttgtagattcctataatgttgttccaggtgctgacatatttttaccagtagatgtttatattccaggatgtcctccacggccagaagcattaatccatgggcttttaacgttaaaagaaaaaattattcatccgaaagaggtgggaagaagtgagtaagacttgtgaaaatctaatttttgaactgaaagcagaatataagcaagatattgaaattatagaaaatacgcagattgctattcacacagaagcaagtaaatttctagacgttataaaaaaggtaaagcaatatggatttgattttttagttgatttaacagctattgaagatgatgtattaagctgtatttatcattttatgtcattaaatactcatgagatgattagaattaaggtaaaacttaatgaaaagcttgaaattccatcattaactaaatattggcttgcagcaaatgttcaggaaagagaagcttatgatttatttggaattaattttattggccatccagatttaaaaaggatattatgtcctgatgattttctaggacatccgcttagaaaagattttaaggttgaaaagcgaaggtagaaaggaggaagtttgagaatggaatataacagagagttgcacactgaagaaatgactttaaattttggaccacagcatcctagtacccatggtgtatatagagcaatctttactttagatggtgagcatattgtaaatgtagaaaatatcataggctatttgcacagaggtatggaaaagctagctgaatccagaacctatactcaatttataccttatactgatagattagattatttatctggaatgttaaatgagttaggttacattcaaacagtagagaagcttgctgggattgaagttccagaaagagcagaatacattcgtataataatggctgaattgcagagaatagcaagtcatcaagtttttttaggaagtatggctcttgatttaaatgggcataccccttggatgtatttctttagagatagagaaaaagttttggatttattcgagatggtttgtggttctagaatgactacaaattatatgcgtatcggtggagtaagctatgatctgcctgaggaatttatgcctagcttaaaaagctttcttaatgatatggataagagctttatagagtatgaacgaatcatcactggtaatgaaatatttcaagcaagaactaaaggtgttggaataattagtggagaaaaagctttagcttatggtttaacaggtccaaaccttagggcttctggtatagacttagatttaagacgtgatgcgccatatggtatttatgatcgtttcaattttaaagtgattgtcggtaaagatggcgattgctatgaaagatggataatgcgtattggagaaatggaagagagtataaaaataattaaacaggcgctagagcaaataaaagaaggtccagttttagctaaagctccaaggctgataaaaccgccaaaaggagatatttatcatcaaattgaaggctctaaaggtgcactcggatattacttagtaagtgatgggtctgataaaccttatagaattcacatacatggcccatcttttgttaatataggtgcctttcctgaaatggcgactggaagcactattcaggatgctgttgcaatactcgcatcacttgatcctatattaggcgaaattgataggtagttcaggcacattcaaaaaataacaagtccatttgccagaaaagttcttatatgcagcatagctgcttttttctaaggtgcccattttccatcatgggaagctcgattcgcatacgctcactgagtgctcacagagtaagcgaccatcatcaaatcgtagatttgggttcactgctcacgtcggcaaattgacctaatagggccactataagggcaacttgtctccttgcctgatgaaaaataatcatggcaactttgaacttgttatttattttcatgtgccttaggaggttgaaatggagaatatatttttaaacatatctaattggattaagggtttaacttcggcattggcaataccaaatgcctttgtaagtattattatgagcttagtttattttattgggattgtagcttttgttttattaaatgctatgtttttgatttatttagaaagaaaattttgtggttatcttcagcagcgtccagggcctaatagatttgggccacaaggaatatttcaaagcgtagcagatgttgtcaaacttctcggcaaggaagatattattccagaaaagacagataaattagttttcgtaatggcatcatttttagttatggttcctgctttattaatatatgctgtgttaccttttggaaaaaatatggttgctgtaaatttaaatttgggattgctttatttcttagccatatctggagtttcctcaatacctatattaatggcaggttggggatctaataataagtattcccttttaggtgggatgagagtagttgcccaaatgataagttatgagatacctatgattttttctcttcttggagtagttatgataagtggttctttaaatttgacagaaattataacagcccaaaatagcgtgtggttcatttttttacagcctgttgcatttattatttatcttattgccgcgactgcagagttaaatagagctccttttgacttagctgaaggagagcaggaaatagtagctggtccattcacagaatatagcggaatgagatatgcacttttttatcttgctgagtatacaaatatgtttgctacttcagcacttacagctactttattcttaggaggagctagtggtccgttattaccttcttggatttggtttatcctaaaaacttacttaatagtgttactgcttatgttagttcgttggacttttcctaggtttaggttagatcatatgatgtctttaaactggaaatatcttattcctatttctctaataaacattttactaactggaattggtattaaaatatttcagttaggtatatgaaagaaaataataagtccatgatgcgatgtatattttcagtcaggcaaggaagtatttttatctcatagtgggcctattaggtaaaaatgctgacgtagtatgactagaaatagactagcatgatgacttattatttcttgaatatgccacaattagttaagaggtgaatttaatgtttggtaaaggattattaaatggtcttagagtaacacttggacatttatttgaaaaaaatatcactcagcagtatccagaagaacatccaaagcttccattgcgttctcgttgttcttttagactggattcagaaaaatgtatttcatgcagcatttgtgctttgagctgcccaaatagagttattaatgttgaaagttataaagatgaaaataataaaaaacatttaactaaatatgaaatgcaattagaatattgtcttttttgcggattatgcgttgaaagctgcccaactaaggcacttcaggttacttcggattttgaactaagtgcttacagtagagcagaaactaagttaacactatttgatgaatattcaaagaagtaacaggtcagaatacttttttgcatgatgagaaacatgcattatattaatgaccaatatttacttcatattcttaacaaggaggatttataatgatttcagcttttgttttttggcctatagcatttttaattatagcttttgctataggtgtcgttcattcaaaaaatattatccatagtgctttatcaatgattttaacattcataggtatagcagtggttttcatcttgcttcaagctgattttctagctttagcacagattttaatttatgctggagcaatttcaatcttaatcgtatttgctataatgcttacacgaaaaaatgatatgaaaaacagtaatccctttaataaattaagatggacaggtttagcattttgtttaggattctttgggcttattacacgcttaattttacgtagtaactttacttataagaatttaaatatagaaaataccattagtgctattgcagatggattctttggaaattatatgattccctttgaagtttctgcattactcttattaatagccttggtaggcgctattattttagcaaaaggagtgaaaaattagatggttggtttagaaggttatttaatactcgcagcagctttgttttgtattggtctttatggagcagttgttaaaagaaatgttatcagtgtattaatgtcagtggaaatcatgatgaatgcagtcaatattaatttagtagcttttaatagatttttagcaccagaaaaggttacaggacacctttttgctatattcgttattgttgttgcagcagccgaaatagctgtaggtttagctattatcttaaatatttatcgaagtctacctacatctaatgtagaagatttcaatattttaaaatggtaggtgttatgatgagatttatagatttagcttggataattcccatatttcccgcaattgcatttctaattattgggttcattacagaaaaattaaaagggattagttcagcaattgcaataggtgggatggttctctcttttatattttctttaggtgttttttatgaggttattacttcgaaagttagcataaataaacctgttgaatatgctgtttcgtggctatcagctccaattaagattgaagtaggagtattaattgatccacttacagcaactatgcttataatcgtgacttttataggtttattggttgaaatatattccttgggttacatgaaaggagaaaaaggtttttcaagattttttgcgaatttatctctatttacaagctcaatgttaggactcgtaatttctaataactattttcaaatgttctttttctgggaactcgtagggttatgttcttatcttctaattggtttttactatgacaggccttcagctgtaaaggctaataaaaaggcgtttgtcgctaacagagttggagatttcggatttttagtcggaatgctttgccttttcatggcttttggaacttttaactttagagaactagctgcaagtattccagcatatcaagatgttgtttatttaactataatagcattattaatttttgcaggaccagtagcaaagtcagctcaatttccacttcatgtttggcttccagatgccatggaaggaccaacaccagtaagcgcattgattcatgcagctactatggttgcagctggagtatatcttttagcgcgtggttatatattattttcttctttacatgaagtaagtttagtaattgcgtacattggtggaataactgcattcatggcaggtacaattgcaatagttcaaagagatttaaaaagaatattggctttttcaactatgagtcaattgggatatatggttatggcaatgggagtaggcggatttacttctggaatgtttcatcttacaagccatgcattttttaaggcattattatttttaggtgcaggtagcattattcattctattggtgtacaggacatttttaaaatgggcggcttaattaaaaaaatgaaacttgtaagcataacttttataattgcatctttatcactagctggaattccacctctatcaggctttttcagtaaggatgaaattttaactgtaacttatgagcatggctatatatttttatattacttaggcttaattacagcatttttaacagcattttatatggctcgtttagttttaatagccttctttggagaggaaagagaaaaacattctgtccataaaacgccctggtgtatgactgttccattaatcatattatcagttttttcagtattctatggttttataaatgaaacatttgcttcatatatatactttcaaacatctcaaattcctgaagcaaatttaatggttatgagtgaatcagtagcagcagcttttagtggaatactgctcgggtggcttatatatggtaagaaaataatatcaagtgaagctctaagtgtgaagtttagaccaattcatcaatttctttttaatcaatattatataaatgaactttatcacttaatatatgaaaaagtagttttaaatatttcttatctttttaattggtgcgatcgtaacgtagtagatggaatttttgataatactacttctttgatatggagaataggagctaaacttagacttattcattcaggacgggtgcaaaactatgcattgatttttttcattgcaattgctttaataattctttggctcgcagcaccaattttaggagggatgtagatgcaatttccaatattaacgtcaatattattagcacccattttgggtataatcataatacttttgcttccagaaggtaagaaaaaggaaataaaagttacagcagcaattgtcacgtttatttcattgttgctttcgattatagcttttgttacttacaataaggaaatgggaggacttcaatttcaagaaacatattcttggatacctgccttcggaattaattattctgtgggtgcggatggtttaagcatacctttaatattgcttactgctatcgttatttttgcaggtgttttttcatcatggaaaatggaaaaaagaataaaggaatttttcatatttctacttttgctagttgtaggtgtttttggagtatttatttcaagagatttatttttattctatgtattttttgaaatagctgttattccaatgtatatattaattggagtttggggaagtactagaaaagattatgctgcaatgaagctaactctttacttattagtaggcagtgcatttattctaattggaattattgcaacttttgtatatgctaataaacttggtataagaagttttgatatacaaactcttagcactattgaatatagctccagttttcagaaatttgctttttttctaatgttaataggttttgggatattagttcctatgtggccgtttcacacatggtccccagatggacacgtagctgcgccaacagctgtaagtatgcttcatgcaggggttttaatgaaactaggtggttatggaattatccgcgcgggggtgtttttatttccagaaggtgcaaaatactgggttcctttaattgcagtgctatcaatagctaatgtagtatatggtgctatggttgctatggctcaaaaggatttgaaatttgtaattggttattctagtgtaagccatatggggtacgtactactcggaattgcttcattaaactttgaaggaatagatggagcagtagctcagatgtttgcccatggtattatgacagcattattctttacgctaataggaaatatttatcatcaggctcatacaagagaaatagctaagtttggtggtttaatacatcaaatgccaagagtggcaattggttttataattgctggttttgcatcattaggattaccaggactaagcaactttgttgctgaatttctaatatttttaggatcccatgatgagccaagaaaactattttcagtaataccttttaaagcaatctcaataatggctattctaggaattgttattactgcggcttatatattaaaggtaattcaaagcacttttcttggcccaagaaaagaagaatgggatcatttagaggatgcaaaaggagtggaaatgatacctatagtgatgctcgcaggtgtattaatattttttggtttattcccttcaccactaattgaccttattcatagtggagcaatgtcacttatgggtaagatatcagatataggaatgataatgggaggattttaattatgagttatatagttgaacttttaactgcagctttatgtcttgtacttttagtatcaagtttatcgttgccgaagtgcaaagaaaagttgtggttatttacaagcatatgcctttttataattttagtaatttctttttttaatggaagtcagtcgcaaactttgtttgatggagcttatattaatgattcctttagtactttttttaaacagctatttttaatagctgcagtattaacagtgttaatttctagagatcatctagtttcaaaacaaggagagttctatgcattaattgtgtctgcgctacttggaatgatgattatggtatcatcgggagaactcattgcaatatatatagggctagaattaatgactatatcattttgcgttttaattgcttataaaggtgatgataaatcaaaagaagcaagtttaaaataccttattttaagtgcaatgtcttcagcaattttcttgtatggattaagtttaatatatgggattactcaaacaacggctattaaagaaattgcagaagcactggtgacaggacagatagcaccattagaaatactaggcatgatatttttaattgcaggttttgcttttaaaatagccattgttccttttcatatgtgggctccagacatttatgaaggagcacctacttcgattacagtatttttagcggtagcatctaaaacagcaggtttagcagttttattaagattatttatgactggcatgtcatctgcgtctagctactggattgatttaataatagtattatctgttataactttagtgcttggaaatttagttgctattccccaaactaatattaaaaggctgcttgcttactcaagcatttcacaagcaggttattttttactagggattattgcgaattcaagtcttggcatcgcatcaattttgctttatagtttgttttatctgtttgcaaacatgggagcatttggagttgtaattgcagtttcaaaggcaacaggaagtgatgaaattaaagattatgcttatttagctaaaagatcaccatttttagctgctgttatgcttatttccttactttctttagcaggaattccacctttagcaggatttataggcaagttctatttattcttatctataatagaaaagggacagatatggttagcatttttaagtattggtatgagcgttatatcagtatattactatcttaaagttgttaaggttatgtattttggagaaagtcctactaaacttgaatcaattccggtatccataagtacaaaattagcattaactatatctatgacagtacttgttattcttggaatttatcctagccaagtagtaaatgtagttttgtcagtatctaaagcatttttatcctaatataagaattactaaagattctattttgtaataatcattatcttcataatttctacataattttaatgtataatgagaatcattttcaaatgatagatagtaggaaggatgaggaaaatggttgctacaatattaataattgcagttgttgcttttatagtttttagagtattcaaaggcggtggaggatgctgccattaaggatgtacttcaaaatgatttttttatcattttgaagtactttcttttattaagtgtaacagaatttgaaatttaaaataataaaagaacttattggaggaataatttttagttaaattattaaatatatgataaagtaatattaaaattaactatatggggggaatattatgaacaacattttaataattgaagatgaaaaaagcgtatcagacgttgtaaaagcatatttggaaagagaaggatatggggtgtattccactgaaaatggattagatggaattgaagtttttagaaaagaaaggattgatcttgtaattttagatttaatgcttccagatattgatggtgaggaagtttgtaagatattaagaaaaatatcagatgtatatatttttatgctaactgctaaaagtacattaagtgataaaattgaagggttaaatattggagcagatgaatacctaacaaaaccattaagtccaagagaacttactgcgcgtgtaaatgcattgttcagaagagtaagaacaagaaaagaaaatgtactttcttttaataataacaaattaataattgattttgataagagattagttaaattgagtggagaggaagtaagtttaactccaaatgaatttgatatattatatattttagcttcaaatcaaggaaaagtatttacacgggaagcaataatagagagagcttttggaatcgaatttgatggttcagacagaagtatagatgttcatatcaaaaatttacgtaagaaaattgaagaagataccaagtctcctcgatatatagttactgttacaaaaattggttataaatttggtgatgaagtatgaagcaaagtattagggggagattgagttttattataatattttgcgcagtagctaccgtattattatcagctttattagtaaatataactataacgaatacattcaataagtatatggaaaatatacaaactcaaagaaatacaaggttagtagaatattttcaacaagtttataaaagtgatggtggatggaatattacttcgggggaagaaatgatgcatgaagcgtatatgagtaattactgtttaagtcttttggatgataataaaaaggttgtatgggaaatgaaccatgaagatatacaaaataaaaatcatatgacagtaaatggcaaggaagaaaccggagtgtatacttccaatacttttgatataaatgtaaatggaaaaacagtaggttatattattgtcggacagtattcgcctgttttgctttcacaggaagatataagcttcaagggacaaattaataagagtattgtatttagtggagtattaacactaatagtagtagcattgataagtcttattatatcaaagcaattttctgaaccaataaaggaagtttcaaaaacttctgtaagtttatcaaaaggaaattataattctagatcaaatataaaaagtaatattgaagaaattcggaatttaactgagagcataaatgatttaggtgagaaattaaatagtcaggatgtattaagaaagcgtcttatttcagatatatcccatgaaattagaactccattaaatgtattacaaaataatttagaggcaatgatagatggaattatacctgtaactactgataaacttaatagcttaaatgatgaagtaataagatttggcaagcttttaaataatttgaattcattaaaacaaatagagtcagatgaaatagtgcttaaattaggaagggttaatataggggagcttatttcaaatgtaattagtgattttaatattgctgctgatgaaaaaaatataaagttaattattaataaagaagaaggtaaaaattttattgtagtaggcgattacgataaattgaaacaagtatttataaatcttatatctaatgcaattaaatttaacaatataaatggaactgtatgggtcaatattagtagcgatataaactcagttatcattaaaattaaggataatggaattggaattaaaaaagaagatttaccttatgtttttgaaagaatgtatcgtggagataaaagtagacataaaattgagggaagcggaataggtcttacacttgtaaagaaaatattaactttgcattctggaacaatagatgtagaaagtaaggaagataaggaaactgtatttacagtatgcataaacaaaagtaattaatacataaatttttatcacaaactacataaaaaaagaaggtatctataaacactttaaaaagtgattttaagataccttttttgtttttttgagaattattaaatttacatttattcccttaaaatatagatgatttattatgttttaataatagcatataactaccaatataatttgacagaaatttcatatatcatccttatagaatcttcataactttttattatactttactatataataagcgacttttttctgaaataatatatttataattatagaggtgacaagcatgaatattataagaaaagttaataaagcaatatataaatgtttaaacaacagaaaatatgtaagattatttgctataggtgcaattattctattatttagtagtattgtatcaagttttgatatgagtgaaaaattaaaacataacttatcagtaaataaagctaatgcatctcgcttaaatatagctaatgcgtctattgaaaatggggttcaggtagtaagaataacagtagataataatggttatacccctgatgttatttatgttcaaaaagatattcctgttaagttgatatttgaaggagatcaacttaattcgtgtaataatggaatagtattaccatctttcaatatagataaagatttcaaatcaggagaaaatataatagaatttatccccaaagatgaagacatagagtttagttgctggatgggaatgataaaaggaataattaaaattacagatagcattgagtccataaatgagaccgaaaaattttaatagaaattcagattttattgtgaaagttatgtaatataagcactaattatatagaggattacatttatcctgataattagattttaattaatatttaaaatttatttttatctacacaatatcttcataacatttatttataatgtatttacagggaggcgatagtgatgaaaagctatagtttacgttttaaacaagaaaatatgctttgtcataggtgtctaatgaatgttgtaaaaacattaagctccattcaaggtttattaggagttgatgttagtttagaatcaaagaaaattaaagtaatctatagagataaagagatatcaagagatgatattaaagaaatagtaaatagatcaattttaagtggtaaagtagttaagcttaaacattaattataatgagaatatgagggggaatttattatgaattgtcatggaaataataaaaatgaaggaaataaaaaacacaatccaataaagcatatgttaatgatggtgctttgttgtggattaccgtttataattgtagcagcacttccttttttaagtgttggaacaggacttaaagcagctataggtgggatagcacctttcatatgtccaataatgatggcacttatgatgggaatgatgtttaaaggcaagcatggaagctgttgtagtgagaagaaagaagttaatgaaaatcaaaacaaaatagagcaataggctaataaaaaaagaggttaatcagtatcgtatgttactattaacttcttttttagttagagaaataaataaagaatgaacagttattagattggttttgggtataataaaaggtaatttacaaataatagattaggtatttaaaatatctaaatattatttgtaattcaaatttaacataatataaaatatatttaataaaagggagtgaatgaaaatgagaacaataacatgggtattgattgttgcagctgctataagattaggaataataggttttttgggagatgatttcatagggcttgcctttggttctgcacctgtaacaatgtcttggctcgatcggatagtttgtggcattgttggtatagcagggatatatgcaatttatttattattcaaaggaacgaatagtgaagtagcctagaaggataagaaaagtaacacaatcattttaaatatgtttaagcaaaagtaccatggatatgtaaaaggctcaagtgctgtaaaagctaaaatttgagtcttattttatttgaattgattataagaatgttgtaaaatagcagatagtaatcaagatagtacgtgataaataaatggcatttagaaattaagattttaagttagaatattaataaaggagaaatccatgttcaatataaatgatgtagtggagatcttgagaaataatagctctattgcgatacctataagtctaataataagtataggcatttcccttgttggtatattaccgtcagtatttataacaggagcgaacatagttttcttcgggcctattaatggctttttcatatctctgttaggtgaagcaataggagcatatattacttttattatctatagattaggttttaaaaggaagattgaaaaattcacagatagaaataggttaatttctagaatagttaaaagtgatggaagagaggcggggctactaatatttcaaggaagaatcattccatttataccatcaggaattataacacttgcagcatcaataagtagtgttgatagtacaatattcactgttgcaacattgattggaaaggttccatctatagcgttagaggcacttgttagctatgacataattaatatttacgataattggataaggctagtcataacatttattagtctaatagttattaaatttacaattgcaaagaaaaaagattattaagtaaaaatgaattagaataatctcagattagagagttctaattcatttttttattaaagccggttatttatctagagttttgatataggctttcatttggttgatattcatgtcaccaacatgcttagaaagtatatttccgtctttatcaataaagtatgaagtaggaattgaagttatgttatattttgtagctacactttgatcagggtctataagtaccttaaagttatatttgttactatcaataaatgatttaacagcatttaatggctcaccgatttctacagaaactataactaagtcactatcctttgtttcttgatataatttttctatctcggtcatttcagctttacagggggggacaccaagttgccaaaaagttaagaaacactttcttgccttttaaatggttaatccccaatatatataagtcaataattatcataagtaaaattattatataaaaaagatatgaagattatatgtatttttgataacttattattaaaataaaaaaagttaaatttacatggtgtgaaatttattatattagacagcgtaaaattagggaattagaaattgaatatattattatgaattggaatattcttcataagttcttcataatagaatggtattatttgagttgttaaaagttaatattttaagaatgatttagaaaacaaaataatgtgtgtattcaattaggagataacatataaactgaggaggaacaatatgaaaatatttaataatttaaaacttgcacaaaaacttatattttgcttcttattaatttcattacttatagggattattggatttagaggtatatcagaaataaaaaaaataaatgcaaattcaacctctatgtatgaagataatttaatacatttaaaaacagttgaggagttaaaagcaaactttttacagatacattcagatttattagcgcttttaacaacaaaagatgcagctaaaaaacaggatattgaaaatgaaatagaaaaattaacaaatgaagatatgatgatttctgaagaatttaaaaatgcaggtgaaacaggtgaagaagaaaaattattaacaaattttataaagcttcacgaagaatatatgatgtcacgtaaagattttatggacttaataaatgcaaataaatatgatgaagcacaaacggcttttcaaatggtaactgaggctagggataagacttttgatagtattaataaaataattgattcaaatataaaagaagctgaaaatgcaaataatgttaataatttaatatttaagaattcgtttaatttaatgattggtatagttatattcggtttcatatttgcaattttacttggagttttgatttcaacattaatatcaaaacaaataaataaggttttagtatttgcggatgctctaggtagaggtgatttaactcagagaatagatttctattcaaaagatgaaataggaaaaatatcaaatgctttaaataaagctgctgaaaacactagaagtcttatatcaacaataatttcaaattctagcagtataaaagaatcaagtgaagaaatctataacactatagaaggaatttctacaaaaatgaacaatattaatgaagctacaaaggaaataacaactggtacagaagaattgagtgcaacatcacaagaagtaaatgcatcaattgaagaaataacttcaaattctattgagttatcaaataaggcaaaggattgcgatcaagcttctaatgatattcagatacgtgcctcagaaataaaagataagggactaaaatcaataaatatttctaagaaaatatataaagaaaagcaagaaaatatattaaaagcaatagaagaaggaaaagttgttgaaaaaattaaagtaatggctgattctatagcaaatatagcatcgcaaacaaatcttttagcattaaatgcggccattgaatcggcaagagctggtgaaatggggaaaggttttgctgtagtagcagatgagatacgcaagcttgcagaacagtcagcagagaatgtttcaaacatacaagaagttattactcaggtaaacaatgccttcaataatctttcacataacactcaagagatattggcgcatattgataataatgtaaatccagattatgagctttttttagaaactgcttttaaatatgaaaaggatgcagtctttattaaatctatgtcaaaagaaattgcaaatggtacaaatcaaatacttagttctatagagcaaactagtgctgcaatagaaacagtttcgtctactgctcagcaatcggcagaaagttcagaagggatattaaatagtgtagatgaaacaactgccgcaattcaagaagttgcgaattctgcacaaaggcaagctgaattatctgaagaacttaatttcttggtacaaaaatttaaaatatagataatatgttgtataaaaatataaagggaatggtactatcgcagtaggaaaaggacctacccaagtttacattgaatcagatgataaatattcattcctagcaaatcaaggaactgaagatgcaccatctaatactgtttcaaagatagatatgtcaactaagaaagtagttgcaacaatagaaactggaaaaggagctcatggagtagtagttagctctgataataaatatgtttatgttactaatatgtatgatggaactgtaagtgttattgacaatagcacagataaggttattaaaactataaaagtagaaggagaaccaaatggaataagctacaggtaattaatattctaatgagaataaatttaatttgagttaattaaatttagtaatttatgcaatcataattcatagttcttaatatataaaaaagtgtattgaattctaaaataattagttttcaatacactttttagtatcttttatgatttatacttttaaaaatttaattaaagaccagaagcttcctacacttccaattaaaatcccaactaatataaactgccattggagggtttgcgtaatataagatggtgatattaagtttattaaaagtaaattttcatttatctttataaaaactagtttatagagatagtatattaatatatttgaacatactgctccaaacaaaccaataagtgcaccttcaataataagcggccatctaataaaccaatcagttgctccaacaactttcattattccaatttctctacgtcttgagtaaatagctaattttatagtattactaataaggaatatagaaactgataccattaatatgaataaagcaattccaatccatttcacgtttttggatattggaattattttatttgtaaattcctgatcattgccaatggattctataccaggcatattttcgattgcgcttatcacttgatgtgatatttcaggattttctagatctattataaatgaattaggcagcggattattggaagaatcataattatttaataaagaactattatcttcagaaacctgtttattaaacttttttaaagcctctgatttatcttcaaatttaacacttttgataccagaaatattatttaacttttgctctaagttttcttgatctttattagtaacgctattatttaaaaatacttgtatttgaacctgggatttagcattactcattcctatatttatatttagcattaatagcattgagactcccattataaataaagttgaggtcactgtaataactgatgctatactaatggttctatttctatttaaactctttaatgcatcaataatataatatttgaaggtattaaaattcattatcataagtccccctaatttcatctcttattatagttccattctcaatagcaataactcgcttcctcattgaatcaacgatatctcttgcatgagtagcctaagtattgtagtaccgtttttattaacattgtcgagcgtgtccattactcccattgcagtttcaggatcgagatttcctgttggttcatcggcaattaaaatattaggatcattcactatagctcgagcaattgaaactctttgctgttcaccgcctgacaattggcttggaaatgacctaaatttatcagataatccaactagtgataaagccaataggtaccttcttttttatatctttagtactgacaccaataacccttaatgcaaaagctacattttcatagacattaagagttggaattagtttaaaatcttgaaatattacacctatctttcttctgtaaaacggtatttgattcttatttagattggttacatcagtatcgtttaatattaacttaccatgtgtcggctcaatttctttaaaaagcatttttattattgttgatttgccagcaccacttgagcctactaaaaaagcaaaatcacctttttctatagttaagttaacatttttaagagccaaggtgttattgtcatatactttagtaacgtctagaaatttaatcattagtaatcctccaattagatgttagttaaatatacttgtgtgtttttgtaatattataacttattattatgaagaaattatgtgtttccttatggtaatgtattcctttatacgaatctacataatttctacacaattttagtgtagtataggattgaatttacaaaagagagacaagtattactctataaataagggagcgatataagtgaaaaaaacaattaaaacggttatgcttgcaacagcattagtgatgattactcaagtttcagcatttgctgcaccaacatctaatcaagcacaaactcaattggagcaaaataaaaattccttaaaggaagtacaagataaacgacaccagcttgaagcaagcattgaagagttggataatcaaattgaagattatatgatgaagattgaagcaaataagaataacataactggggcagaaaacgatatccaaacaacaaaaaagcaaattactcaggttgaaaaagaagtagaagctaagcaagatgtattagatcaaagagtaagagctatgtacataaatgggcagtctaactatctaaaaatcttattggaatctgaaagtttcagtgatttaataacaagagctgaagcaattagaaaaataattggacttgataaacaagtaataagtgatttaaatgataagaagtcagaagtagaaagtaaaaaaacatctcttgaagttaagtataatgatttgcttgcattaaaaagcgaaaatgaagacaagcttataagtctaaatacaaatatagcagatcaaaagaagcttattcaagaggccaaagatcaggaaaaattatttgcatcaaaagtagatgaatctcaagtgcaagtaagcgcaactatgaatcaagtaaataaaataagaaatgaagcacctagagttactaatgcatcgagaggcgcaaaatctgcacccgtttctgataataacataatagcatatgcttcaaatttcttaggaactccttacctgtggggaggaacaagtccttctacaggattcgattgttctggttttacacaatatgtatatgcacactttggtattagccttggaagaacaacttatgaccaaataaatgatggatatgaagtttcaaaatccgaactacagcctggagatttaatattctatggtaagggcggaaatcctactcatatgggaatgtatgtagggaatgggacatatattcatgcgccgagaacaggtgatgtaataaaaatatcatcaatagatagaccagattatattacagcaagaagagttaaataagctaatatttttagccattagaatagaaaatatcaaattttaaattaagatattgtagttggaggtatgaatgatggtcattgaagtagcaataacggtggtagtagttttatttgttgcgcatattctttatcacaaagtaataaaaaaagcttcagggggatgctgttgtaataaagatggtaagtccaagaaaaagtgtagtaaatagttttatagttattttaaatttgtaggaaggaagttaatagtatgaaggaactgtttagttttggcccaatacatatatacttttttggactaatgatagcattagctgtaattacaggcggagcatttgcaattaagcaaggggaaaaaagaggaataaatgaagacataatatttaatctaatttttattgttgttatagcgggtgtattaggagctagattattttatattcttttttataatccatcattttattttagtaatccaggagaaatatttaaaataaatgagggtgggttatctatacacggaggaattgtttccgctgtgcttgcaggatacatatactctattaagagtaagatatcatttttaaaacttgcagatatttcagtggtgggtattgcattggctcaaggtataggtagagtagggtgcgatgtatttggcaaaccaatggcaaacataatgatatgggggattaactataatgggcaactgcttcatcctgcacaagtatatgagtttattttagactatatattatttatagttctatggagaagaagttacaagaaaaaatttgaaggtgaattatttataatttacttaatcgcttttgccataataagaggtattgtagaattctttagaataaatcctgttatctggggtccgttttcaatttcgcatttattaagtcttgctttagttattataggattagccatttatatattcttatccaagagggtcgcaggaaacgataggatttatgtggaagagaataaagtaaatttaacaagttcaataattattttaattgcattggtggtaatatctgtatttgtattttattttgtgcaaggataactaatgaattgtgtttgtgtttcaactagaggtaaataaaatattataaagttaaagagctctaataaaattttggtttttattggagctcttattatatttttaatgccagaggttacgggtgacactgactaaatttgaattacatatagcagatctgaaagtaattattattttgattatttataaaattatcttcataatttctacacatgttctttgtatactctctaaagaacagtaattcaattatataaaaattaaaataaataattatactaaaagattagattattgagaggtggtgaggtcatgtcaaattttataaaagctaaaaatgctgtgagtaaagagctttatgaagttgagatgattttaaaaaatattggaaaagattttagttcgggttcaactcaagagatatttgaatatttctttaaggttccaggaaaatatcttcgtcctagtttgataatactttcagctaaagctataaatcctgaaatgactatagatgagagaatgcaattaattaatttatgtgtagcaattgagctaatacatagtgctagtttggtacatgacgatataattgacaatgatttatttcgccgtggtcaaaagacgttaaataatatatatggtagaaagatagcggttctcgcaggggatgccttttatgctaaagcattttcaatattattaaaactaccaacaaatgatgcagaacaaataattacacaagttattgaaaaaatgtgcgttgcagaaattgaacaagctcaaaatcatgaaattacaaagcaggattactttaacataatagaaggcaaaactgcatcctttatggctgcctgctgtaagcttggagcaaaaacagttaatgcaaaagaagaagaaattgaagccttggaaaattacggcttaaatttaggaatgttatatcaaatcattgatgattgcacagatggtgattctaacgctactaaaaataatataacggttgaagatgctaaagagtttgctttaaaagctgaacaagcaattaaaaatttagagacttcggtttataaggatagcatgaatagtcttttaaatcatatacttgaatcttcaaataagaaaacaaaaaatgcttaatcttaaattcataataaatatcacaagggagatgacattaaatgagattttttagaaataaatatttagttcctgtgtggacaattttgcgtatatggctaggctatcaatggatagttccagcaatagagaaacttaaggatccaacttgggtaggaagtcaatcaggtgtagcgataacaggatttttaaaaggagctttagctaaagcaaccggagatcatccatcagtacagttgtggtatgcaagatttgttgaaagtgttgctttgccaaatgtaggagtattcacgtatgtagttccagccggagaacttcttgttggtattagtttaatccttggagcttttactatagcaggtttgattggtggagcatttatgaatctaaattacttattagcaggaactactagcactaatccaattttatatactgcagctataattttaatggcagctggagcaaacgcttataaaattgggattgatcagttaattgtatccttttggaaaaagaaatatggtaaacaataaatatagcatagaaaataaaaatataacaaaaaagaaattaagtctttagacgtgataatgaagggagtcaaaaaacaatgaaaaagaaaacaattagaggtgcaatattaagtttaattcttacgttaggcctttcaacagcagcttttgctgatggaatgggtaacatggatatggggaaaggaacagaaaaaagtgtaaatggtataaatgcagaattaacgtttaataaagataacaaagttaaaaccggtgataatgatgtaatgatcacattgcatgataataatgataaaaaaattgaaaatgctgatgttaagattagtgcagaaatggacaagaactctgatatgggcatggatatgaatggtaaaaagccaattgaagtatcattagaaaatagtaaagatggtcaatacatggggaaaattaatttcactgataaaggtaaatgggttattacagctaacattatggtaaatggagaacagaaggatgtagagtttgatgcggatgtggttagcggtggaccaaactgggtagttataggtggatttgtaggaatagtggtagtaataattatagtagctgcagtaaagaaaaaaagtagcaaataaagataaagaatagaggtgatagtttaatgtcgaagttggacaagaaacttagtgatgaaacaaaggcatcacaagagcaaagaggaaataatttattaaataataaaatacttaagagcttcattaaaagtaagtggtatccaggaatatttcagctatttgtaggaatagtatttgcattcatcgtgtttgaattactaactggacctgacgaagctcacgataactttggtacagcgggaacttgggtattgtggtggcctatacttccaatactattatttttaacaggtaggttttggtgtgctatatgtccatttggagccttaagtgatgtagtacaaaaatttgtaggaagcaaaaagccagtacctaaatttctaagaaaatacggagtatggcttatagatgcaatgttcttagcaattacatggagtgatcacgtttttggagtcgttgaatcacctagaggttcaggaacattactcctacttattacaattggtgtaatattctcaggtgctttttgggaacgtagaacctggtgtagatatctatgtttcttaggcggattatctggaaattattcaagagcagggatgctgcaattacgtggaacaaaagatatatgtgctaaatgtacagcagcacattgttataaagggagtgaaagggcagaaggatgtcctatgtttgaattcccaaaaactatggaagataatgcagaatgtaatttctgtggtaattgtgtaaagaattgtcctaacaattcaattcaaatatcattgcgtccacctactaaagaattatggtttattagaaagccacgattagatgcatcatttttagctgttgtaattatgggtatagtatttgtacaaaacattacaatgttagaaatatgggatggaatgcttgcatggcttgaaaatgtaacaggaacacaaaattatgctattacttttactataacatttattatagctatggctataccagtagcattgttatctataacaggattagttgcaaaaacatttaataaagcttcgttaaaagaaaatttcacgaagtatggatatgcgctcataccattagatatggctgcacatatagctcataatttattccatttactagcagaaggaaaatctgtattctatacatttatagaattatttggagttgaaattcaacatacatcttcagctattttagatgacccaacgatacaagcgtttcagtttatattaatagcaattggaactcttggttcaatatatactgtatataaaatatcgaagaataattatgaatctaaaaaagttagcacaacaatagtatattctattcttttaatattactagcagtagttaatataatgttattctcactacctatggcaatgcgtatgtaatgatcctttatagcttatctaaaaattattttagataagctataatattatttttcttgcatcttataagaagaataaattaatacaaatgaagaaagattagttgatagaggtgattaaaagaaaatgacaattgaaaaaattaagttatttatcagagcttcaagacctttttctttaacagcttcagcaattccagttgtgcttggggaaatattagcattaaaagagcctaattttaatcttgaatattttatactttcgatcatagcaattgtttttctgcaggcttcagttaatttactgaatgatcatgatgattttataaataaagttgatacaaaggaatctcatagttctagcggagttgttgttgaaggcttgctgactttaaaagaagtttatagaagcggtattctattacttattttaggatgtttaattggtttgtttttagcttacaatgtaggcattatgattctcattttagggattgttggagctttatgtggatatttttacacaggaaaaccgttaatgcttaaatatagaggattaggtgcaccattggtgtttataattttcggaccattaatgacccttggagggtattatctgcaaatgcagaagtttactattcagtcattagtaatatcaattccaacagcacttcttactactgcaatattgcatgctaatgatatcagggatataaaacatgacaagaaagctggtattaaaacactgtcaataagtgtaggctataagaatgcacaaatagtatattcaagcttgattatactttcgtatatttcactcatcataatgattatttttaaatatattccttatttaagtttgatttgtttattaacagtatcagctgctgttaaaaacattaacaaattaagaacagctggagattcaagtagtaatatcgcagaacttgataaagagagtggaaagcttcaaggtcaatttggaattcttttaattttatctatacttttagcttatattttatagaaaggtggcaaagttttggagagagagaaaagtaagaataagatcattatttcttcattaattatggctacaatattgtggtttgtaatatttgtattaaaaccatttaatttttggattgaaatgggagtatccatattatcgttagtaatggtagctttgttttctgaaaagaacttaatttcatttagaaatataaagttaagacacatattaatcggaattatttcagcaataatattgtactttgttttctatgctggaaatataatttcgggatatttatttccgtttaaagatgctcaaattgcatcagtttatagcaatagagcacaaggaaattcattacttattggagctctattattatttataatagggccgggagaagaaatatattggcgtggatttatacaaaacaatcttgcaaaaaaatttggtaaagataaaggatatatatttgcaactctattgtacgctggtgttcatataattacatttaactttatgcttgtggtagctgctttagtatgtggaatatattggggatggatttataagaaagaaaaaagcctcgttccaataataatatctcatgcaatttgggattttactgtatttgttttgtttccactaatgtaataagatatatggaaattataaaatagtaattaaaaagcttaattataagaaacataattaatttaaatacttattaggttttataagcgtaaaataaaagaatgtgtggtggttataatggcagaaatcaatgtaacagatgtggaaaagattttttctgttattgcaaagagatatgatatgttaaattcaatattaacattaaatattgatagattatggagaagaaaagcaataaaaatctgtaatattaaggaggggcatcaagtattagatttgtgctgcggtacaggacaaatgattaattatgaatgtaaggcagttggaaaaaatacagcagttatcggtatagattttagccaagaaatgcttaacgttggagcgaaaagactaaatcaatcattaaaggattataagtatgaattaatcaaaggcagtattttagaattaccctttgaagaaaatacttttgactgcatcacaattgcttttggattaagaaatattccagataaaaacaaagcattatcagaaatatacagagtcttaaaaccaggaggaaaagtggtatgcctagaactttctaaacccaatatacatattttaaaaaatatgtacgacttatattttaatcatgtgttaccagcagtaggatcaataggtacaggtgataaaaaggcatattattatcttagagattcagtaaataattttatgaataaaaagcagcttaaagaagcgctagagaagataggttttaaaaattcagaatatgaatctttaacttttggaattgcatccatacattatggcaataaataaagttaaagttatatctaatatatttattataaaatagaatgttaaactatagtaatattaaacaatataaaggcagctagctattagccgcctttatttattttgatgaattaaatacaagtattaacacaaatttgaagcattttatttaatctagtataattaaatatatggtttcattaataaacttatatttaaacttttagtaagtaaagtaaggtacttgattaagaaaaaaaatataggaacttaaccttatcatatatatcaatatttataatagatttaggtattacgtgctttaaatatatagtaatccaaggaggataaaaaagtggcaagaccaactaaatttagaagagtggaatttttcccagaagatgattattttgtaccatgtggaaagccaaaatgtcaaatcgaagaaatagctttaaaagtggaagaacttgaagccatgagattaaaggatattgaggagttaaatcaagaagaatgtgctgaaaaaatgcaggtatcgaggcagacatttcagaatataatagatagcgcaagaaaaaaagtagttacagctctaacagaaggtaaggcaataaggataagtggtggtcattatactacaaagctttgtaaatttaaatgtgcagaatgtgaaacaatttatgaaataaattatgatcaagatagagcggtatgcccaagttgtggatctgataaagttatgtgcaataaaaaagcaggattttgtaaaaattggtgtaaaggaaataatatagagtagtaagttatttaaagttatagaagcctaagcttatgaaagtaaataataatagaccaatataatattgagtctattattattagatatattagttatgacattcgtgattgtgacacgaatctccagaatctataagagaaccttcaagccatttttcagcaactgcttttacatctccagaacatccacgtaatacttctattcctgcgttgcttaaaactcttaccgctccttcacccatattgccagcaagtaaaactttaacacccatatcagaaagcgtagatgctatattagatttgcagccacatccagctggagattcaagggtttcagaatctactatttttttggcttgtgtatcaaccgtgaagattgtgtaatattcacagtgaccgaaatgatcatcaatattgttattacgtgagggtaatgcaattttcataatataaacctccaataagtatataaatgtagcatatgtagcaaatgaaattgttggcatatgctatttatatattataataaacttattaatggcatatgtcaataatataaaattaataaaaaaatatgtaatttcagttaattacaacataagtctaagttagtaaaagctatttatctatatattaggtctttattaaaatgtgactaaattacataaaaattttaataaataatttataatgtataataaaggtaatatattataaaatctcatgcttataaggaaaggacaagctatggaatattttctattatttttagaaggaattataacatttatatcaccatgcattttgcctatgatacctctttacatatcgtattttgcaggagacaatataacaaataataagtataatgcattagtaaattctttagggtttgtattgggatttacagtgatatttacgctgcttggaagtcttgcagggtcttttggaagtttcataaaaactgaaagtaatatcattaatataataagcggattattgttaattgtttttggaatcaattatattgggttatttaaaatatcatttttagaaagaagttcaaagataaatgtgcaaataaaaacttttaagtttttatcatcaattttatttggaatgatttttgcaataggatggacaccttgcgtaggcatattcttaagtgcagctttaatgagtgcagttaactctcacgatatattaaaagggacactaatgcttttaatatacagtataggacttggaataccttttataatatgcgctattttaatagatagcttaaaagatacttttaacttaataaaacgaaattacaaaattataaatatgttatctgggttaatccttataattgtaggaattgcaattatgactggatatctaaacaaattaatttcattccttacaatctaggaggtttttatgaaaaataaaaaattaatattaacagtaacagcaataggttttgcaggatttttagctatatcatatttggcatataactcattaggtcccaaatatgataagaaagatataaacataagtaaagatacttctcaggataaagaagaagagactgacactcctactgtacaagataaaaaagcggaaaaggactttgttgtatatgatgaaaagcttaataaagtgaagttatcagattataaaggaagacctgttatagtaaatttttgggctagctggtgtcctccttgtaaagaagaaatgcctctatttaataaactttcaagtaaatataaagcagaagaattaacagttttaatggtggatttaacagatggtcaaagagaaacaatggataaagctaaaaaatatatattagataatgattatgagatgaaaattttatttgataatgatggaactgcttcaataaattataatattatatatatacctagaactttatttattgataaagatggaaatataattgaagatcattcaggagaaataactgaagatgaattaaaaagtcaagtgcagctattattgagtaaatgagataaacattaaattaaagtattgattaatcaaagaagtaaaatatatggtgattaagtcacagaattaatttgaaaataagactatactttaagtgtaggaaaagaaaaatttaaattataaattggaggagttaattatggctagaataataagcagtaatgaatttattgaaaatgttgagaactcaaaaggaatagcagttgttgattttttcgcaacttggtgtggaccatgtaaaatgttagctccagtatttgaagaagctagtatggaagctagggggaaagctaaattctttaaagttgatatagatgcaagtgaaagaatagcagaaaagtacggaatatatgcagtaccgactatgattgtatttaaagatgggaaaccagtggagaatttagcaggctttatgccaaaacaaaatatactaaataaaattaatgcacatttataaataatagaatataggtttaaattcaggcggattgcaaaaatctacttttaaaagtttcgctttgtttgaataacttttaaaagtgtatgaaggcagatttgcaaataaagcggtggaatatgtttaatccatcgctttatttagtataactgtatctagattattatgattatatattctgtatagcttagctttaatcacacttattcttacatttagcgcaattaggattatactctgaagattctaagtgaatcataatttcggagtaatttagagatttttttatatcattttcaattctatcacatacgtcgtgagcatctttaattcgcatattttcaggaaatactaaatgtaattcgatatacctaattcgtccagattttcttgttttaaagttatggtaattacaatagatactcgaaaacttatttatgctattttgaataattttgatttcatcattagatagcttagtatctaaaagtggattgaatgcagagatcaatagttcaatggcttcttttaatataaatatggcaactaaaatagccacaactgggtctaaaaaattcaacttagttatccatataagaaacaaaccaattcctacacctaatgatgtataaacatcagcttttagatgaagagcatccgcttcaagagctatagagtcttcttgtttagcaaccttatatatttttctggaaaccataaaatttatagcagaggaaataaacataactataaatccaaggccaattgattccacagatccaggaattgttaatttttttactgcttcaattattatccaaatagaagctgatagtataagaattgcttcaattacgccagaaacattttctatttttccatgtccatagggatgtatatcatcagctggtttatcagatattttaactgaaaaaaacgctattatagcggctaacaaatccatagtcgaatgtatagcttcagatattatgcttactgaaccagtagcaagtccaacaattaattttagagttattaggatgctatttgataatagagataatcttgcaactttaacttttgcattcatataaaacgcctccataatttaacatgagttttatcatttgataaaacaaattaacactataatatatttatatgcttgaaaagtcaatagattaatgttgaagtgtgttatcaattgataatgatagctattgtgataagagttagtgttggaattgagattataatgattaaattaatcattagctatggaatagggtataagaattatgctagatttaaaatatataaaaaatatattactgcgcaggtcaatatggcccttttgaaaaaatgattagtaaatttaaagcctggagatagtggctcagatgtttttgagatacaaagaaaaatgaaggaaaaagcttattatcctggaaatttagatggcatatatggagaaggaatgaagcaatatgtaataaaatttaggaaagataatagtattaaagaatgtcatgatattaataaggaattctatgaaaatcttgggatgaccctagtagattaagtatatttaatctactaaagctaaccaattattacatcatcagctgcagttgatttagcagcattattattattattattattattattattggtgttgttgctgttattgttgttattttgtgtagaattagaattcctagattcctgtaatacagttaaatactgttgttgtgaggctattgtcagtagtaaacaacctatacccacaaggaaatttccaataacatttatttcatcagcgtttttaccttttgcaagtgaaatagcaattgcatttgttaaaattaaagaatcttcaggagttaagttttcaaaacctgtcatgacttacacccacttatatgtagtttataattaataactatgatatttacttaaataatatgagtatatgatgtattaaataaataattataatcttcacaagacgtctctaaatctttatgttttaaagtagatgttaaaaattaaaaaatatcttttaatacgaatatttactaaaaaatagaacattcatggaattataacatattatatttttgaaataataaacaaggaagaaaaatatgaataatgatggaatgtattcagtagattattcatctgaaacatcagattataacttagagaacggatacaataataattggacatatcagaattctaatttcaggtctgttccatattctatgctatttgatgaaatggagtacgattatagggctgatattccacaatcatcaactggaaatagcaaaatggatttgaaagactatggaccacaacctttggtaattaacattgataaagctacaaagcaaaataccagctttcgtactgctttatggacaggagagcatttccaagttacattaatgagtatcaatgtaggcgatgatataggcctagaaatccacccagatactgatcaattcatacgtattgaagatgggcaaggaattgttaaaatgggaaaaagcaaagataatctagagtttcaagcaaatgcccgtaatgactttgcaatcattatccctgctggtacttggcacaatgttattaatacaggtacgaaacctcttaaggtatactctatttatgcgccacctaagcatccacgtggaacagtgcatgtaactaaaccttctgaataaatttttttataaaattagaattaaactaatgcgagtctaacctagtaatttatgatcatagggttagacttttttggtttctgtgaaattatatagctagacaatctgtggcattgtatcacttatgggtataaattatgaaaatggcggattagtaaaaaaatctaaactcgcacagtatgattatactgattagtataaacctgttagaattgtgttaaaaaactacaatatatgacaaattagtgctataattacttatattgttgcaatagattagaacataaggggggacacgttgcatgattaaaaagtttaatttagggacaaaaataagcataataataggatcaataattcttgtgtgttatataggagtgtttgcaagtatattagtacaaataaagtctaaaagcataatggatagtgaaactttagcaaaagaaatatctttatcttatgcagcacaaatcacatctaactttgaaaagctagaaacaataggtcaggatttaaggggggcactaaccaatgaaattaagcttaattctcagaatagagatcttgttattgaaattcaaaaagaaatattaaagactgatcctgaaatttttggagttacagttgcatttgaggcgaatgcatttgatggaagagatgattattataaaggcagaaaagagtttgcagaggatggaaagttcataccttatgcaagtagaaatggagatcaaacagtagtattaccagcctatgatgatcagacagatatgacatggtacaataagccaaaggaattaaaaggaacttatattacagaaccaacagtttatactgttaatggacaagatatttcaatggtatctttagctatgcctatattggatgatagtggaaagttcttaggagtaatatctatagattataagctcgatacattagaaaaacttgtattagaaaaaataccactaggaggcacagttgaactaatatctaatcaaggtatttatgtggcaagtggtgaagatccaagcctaaagatgaaagatgcaaaacaaaataatgcaacttgggcaaaagttataagtgaaacttcacaaggtaaagaattttatacttacggaacttcggtaaaaaaaggacaggaagttttaatggtagcagatccggttaacttagaaaatacaaagactaattggatactatgcagccagattccaaaagagaaaacattagaaagctataataaaatatttaatgttattttaatttcagcagttttatcattattaattgttattgctgtaatacatattgtaattaaaagaatgacaaaaggaataagatacgcagaagaacaaatggggttattagctaagggggatcttacagtagaggttgacaaaaaatatgtggacagagaagacgaaataggaaaaatgtttaagtctataaatgagatgcaaaaatcattaagaaatataatatctggcgttaaaggtgaatgtaatgtggttttagattcaataaactttacacaagagaatataattgacttaaataatcaaatttcagatgtatccgctacaactgaggagttatctgcaagtatggaggaaacggcggcatctacagaagaagtaaatgcttcatcagtaaatatgaaatccataataaagactatggaatcaagtgttgaaagcggagaggtaactgcaaaggaaattgaagaaagagctaaaaaacttaaatctgatgctttgcaatcaagagagcaatctagcagcataacttcgaaaatgcaagaaagcttaagagtagctgtggagaaatctaaggcagtagataaaataaatgaattaacagctaggatattagaaataacagagcaaacaaatctattagcactaaatgcagctatagaatcagcaagagcaggggaagctggtaaaggatttgctgttgtagcagatgaaataaggaaacttgcggaaaactcaaaagaaacgacaatggaaatacagcagataaataaagaggttgttatggctgtgaatgaccttaaaggaacatcgaatgaagttattaattttattggaactcaagtgatgaaagattatgacaaacttgtagacacaggggaacaatatagaaatgatgctattgtatttaatgaattagttagcactataggtgaaatatcagatgagctgattaattccacagaagatattataacagctataaatgaagtcgcagaggcaactaatgaaggcgctacaggaacaactttaattgcaaataagtcaaatgaggtagttaatttaacagaagaagttgtagaacaaacacataagacaaaagaatgtgcagataaattattagaagcagtatccatatttaagatatagggaattaacataaaaaaatagaagcttgtaaaggcttctattttttatataaaactaatctactttaaattttgaaacttgtctttgatttaattgggcaccagattttttaactaaatctccataattcctccataattgacttgtataattagttacatagaaaataattaatttataagtgtaaggaggaaattatacatgttttgtagtggttttggagcagcaagctctataggatatgggggaatgtttttagctatgggagttagaatgttaatatttattgcattaattgtgcttgcttttaaattatttaaaaactacaccaataaatcaaatgatgcaatgaaaatccttaatgaaaaatttgctggaggagaaataactcaagaagaatatttgaagagaaaatcagtactttcacaaaagaattaggtttattattaagattagagtggagagatgtttataatttattgtctcgctctagtcttttttataggcttacactataatataatcacaaaaagagagtcgggggtgtaaatgtgaataataaattcaaaatattagttgtagatgatgaacaaaatatattagatgtaataaaggcatacctcgaaaaagacggctttgatgttattacagccatggatggtaaaagtgcgttagatatatatagtaacgaaaatattcatttgattgttttagatttaatgcttcctaaaatgactggtgaagaagtatgcaatagaatcagagtaatatcgagtattcccattataatgcttactgcaaaatcagaagagaacgagaaaatagaaggcatatcgatgggagctgatgattatttaacaaaaccatttagtgttcgtgagcttgtagtaagggttagggcattgttaaggagagcttacagagatttttctccaatggcagatattttgacttttaataacggagatttagaagtagatattaaaaagatggtagttaagaaacaaggcgtggttgcaaatttgacaacaaatgaatttaaaatcttaacagtttttctttcaaatccaacacaagtattttcaagagaaaaattagtggaaaaagcttttggagcaaactacgaagggtttgacaggacagttgattcttatattaaaaatattcgccaaaaaatagaaagtaatcataaggaacctacgtatataacaactgtatatggaatgggatataaattcattccgagtaatgatgaggtaaaaaaatgaaggtatctttagtgaaaaaattgtctttaggctttattttagcagtattgggttcgataattttagcaagtgctatatcaaattatacagtagggaataaatttaaagactacttagttgatgaacacaaagaaaaaatagataatgcagtaaaaatcatagatgacctatatggtggacaaaaaaacttttcacaaataaataatgatgaaattcaaaggtatgctgaattacaggaattatatatagaaattagggatttaaatgataatacaatatatacttcagggaaatcttatttgcagcatagaggaatgatgggaaatggaaacatgattggacctatggctggaatgatgcgtaattattctgggataaacatgggggaatacactgaagaaaattatcctctaaatattgatgaaaaggaagaaggcaagataattgtgggttactttggaacttcttatttatcttctgcatcagtaacgtttataagtacattaaatcactcatttttgatatcagctattgcagctttaatatttggagttattatcagcataatcatttcaagacaaatatcaaaacctttagctaaaataacggaaactgcaaacgaaatgagaaagggtaatttaaatgtaaaggcagtggtaaattcaagtactaaagaaatagttgagctgtctgattctatgaattatcttgtagaatctttaaatagtcaagaaatgctaagaaaaagattaacttcggatatggcgcatgaattgagaacccctttaactacattaaaaactcatatagaagcatttgcagatggaatttgggaaccaaatagtgagagatttgaagttttttttgaagaaattgatagaatgactaaaatgattgatgaccttcgtgatctatcaaaacttgagcagactagtataggattaaataaaagtaggattgatatttctaaagaattagaaaaaattatatatacctttaaaccactttatagcaaggaaaattatgagttagataccagtataactcctaatatagttacaatgattgatgtggataaatttaaacagattataactaacttgctttcaaattcttacaaatatctaaaacctaacggaaaagtaaaagttgaattaaaaaatgaaaatgagaatgtagttatcaaagttattgataatgggattggaatacctgaaaaagatataccttatattttcgagaggttttatcgaagtgatttatcaagaaataaaaagactggaggatcaggtataggacttacaatcacaaaagcgttagttgaagcccatggagggaatatatatttagagagtaaaattaatcaaggtactaaatttactattcattttccgttaaacaattaattataactggtcaaagaagttataatacagctttagcgatgtaaaagaagaggaagataaattttaattataaatgaataaaaaatagaacactttcaaagaataaaaatggaggtgttttattatgcaagtaaatttaacgcaaaaagaaaaaatgttactagaagaccaaaaaagtcatgaagaaatttgtatacaaaaatattcaaattatgctaatcaggtacaagatccacaattgaaacaaatttgcaagaataatgagcaaattgaaaggagccatcttaatacaattaatcagttactaagtggcaatgttcctcagatgaatcaacaacaaggtgggcaacaaaaacaaggtgatgatcaaaatgtaaataaatctcaaagtactacaagtaatttgtcagataaggaaatatgctcggatttattaatgacagaaaaatatgtgtcaggggcctatgatactgcaatttttgaattcaaggatactgaagtacgagatgtattaaatcatatacaaaaagaagaacaaaagcatggagaatctatatttaagtatatggagagtaaaggcatgtataatgttcaataattaaaaaacattattaaaagtataagaaagtttagctttttcaagctgagtttttttgtacttttaataatttgtatttatgttttatagggtaaaattgactacataagactcttagtgataaaatttaatgaaaagttatttggttaaattttattattgggtatcgccagttctattcatttagtattagatagcatgtggttatatcctaatatattgttttggccatacttgggatggaagtttcctgcaagaccagaaggtaattgggtaaatagcgatattgttagacttatcacagatccaacttattatttacctgaattaataggctttgctattattgcatatttctttataagactttttaggagaaggcaaataaaatattttttaaatagaggaaagttatagcgttaatcatgataggtatacttgtggggaagggaatgacttttgatgaagcaactagtaagatagaagattgggaaacatctggtatatctaaacttttagataagagtaaaatgactcaaagtaaatgaaaaagataatattatatttacagaacgttaaaaactcaagtgattctaataagaaattacttgagtttttaattttatgttgtggtgtttaaaaaaccaactgccaagcgagtagttctgactgtatttagtaaaataatatacattgatctagaagtgaaaatttattagaaaatttaaattattaattcgagatattatggtataatacctaattatagtaatttatcttaatggaaggaaaagtataatgaattttgctacctgtcattatatagtgtgtaaatatggatacaattttgaacgaagaaagagacgtattactgcagaagaaagatataataaaacaagaattaaaggaaaagaaacaaaaatttgaagaagtaggggaaaaaattaagactttaaataaacaagtaaagagctttagtgaagaaaagcaggctaatgaaaggatatttagctatttatctcaagatattgagaaatatgaagaatcgttaatagagccctattttggtagagtagattttagagaaaatatggggtttaccgaaagtatatacattgggaaaaaaggtataagtaatagcaaagatggagaagaaattgttgttgattggagagcgccagttgcggatctttattatagcggaactggtggagatgcgtattacaaagcaccacaaggaatagttgaaggaaagctagaattaaaaagaaaatttttatataagaatagtgatatagaaaaagtatttgatgaaggaataaataacatcattataaatgaagaagaaggacaaaatttagttgatgagtttttaaagataaatcttgaagaaagcagtgggaaaaagctaaaagaagttgttgcaacaattcagaaagaacaaaatgaaataataagatggcctaaaaatctgcctataatagtacagggttcagcaggttcaggtaagacaacaatagcgttacacaggttagcttatctcatttatagatataaagaaagcatgagtggagatgaaattttagttttggctcctaataaactatttctaagttacatttcagacattttacctagccttggagcggaagaagtaaatcaaagtacctttgaggaaatggtattatcaaagttaaaactaaaaggaaaagtttataataaggatgaaaaattattaaagataatagaagaagatgatgagaatctaaaaaagcttattgtaaattcaagcaaagttaaaggaaccatgctatttaaaacaatgcttgatagatatatagcattaatggaaaaagatgcgattcatattgaagatattaaagttggaaatgagatattatttcataaaaaagaaataatgagattatatataaaagatctaaaagcttatcctatcaacaaaaggaaaaaggagataaaaagatatttaaatttaaaaataaaagaaagaatagaaagcctattaatagaaatagataatgaatgggaaaagaaaataagagaaataagaagagaaaatgaagattcgccggaaagaagaaaattacttataagtctatatgaagagagagataaaataaaggaaaatgtaaaaactaacggtaaaaaggaatttaataattactttaaagattggaaggatataaattctagagatatctattataatttttataatgatgagttatttgaaacggcaactggaagtaagattcctaaggtattggcagattatatgaaggaagaatttaatagtgattttgaaaagaatataatcgatgaagatgacttgccagctcttgcatatataagaattttacttgaaggaattgatgagaaagaaaaatttaaatatattatagtggatgaagctcaagattatagcccattccaagtatacttagttaatagttttgctaaaggcaatgcgttaactttagtaggggatttagctcaaggtatttattattataaaggattaaagacatgggaagacataacagagcaagtctttgatggaaatgcaacatatattcaattgacgcaaagctatagatcaacagttgaaataattgattttgcaaagaaaacattacaatctcaaaacttaggacttaaggatgctaaaccagttttaagacatggtgaaaagcctaaaatagtaaagatttctagtggagatgagtatatttcagctatagagaaaatcattaatgaagtgcagaaccacggaaaaagaacagtagcaataattacaaaaaatatgttacaaggtgaagaaatatacaaacttctaaaaggaaagagcaaatataattttgaactaatattaggcaaggaaaaagaaatagcagaagatctaataataatcccatcatatttaacaaaaggattggagtttgattgtacaataatattgaatccaagtgaagacaactataaagaaaacattttagatgaaaggttattatatgtttctttaactagggcattacatttagaatatataataataaaagatgaagctacaaatttaatttagagagaatttatctgctataaaagttactggaaaggaaagaacatatagtctaatacattacttaaagttatagaagtttaagttgattatataataaaagattattaacatatgccgtttatatattatgattatattattagtggcatatgtcaataatctttattaagtaaaaaagagaaataaataaatttgaaagtttttaaatttatttatctataagttcatcaatatgaactgtaacataattatcggatttaagagttttaactattttttgcaacggagaattttcatcataggttacattaagtttattatcatcaatattaaaatgtacataatttaattcaacaaatggatgataataaaaactatgaagtatatcaggatcatcattattaagcccatcagttatggatgtagggtctgaattgtgtacatatcctaaaggtgttggaacaaataaatggtagtcatctaaattatatatattgtttcgtgtactgtcgaaaggttcatatataaattgaaaataatcttcaataacgtttctttgaagttcagtttccccataatgaggactttcgtagtaagaaataggaatatttaaagcacttgcagtatcaattcccttttcgactatatcacgtacttgatcaactgtattattcacatctttagtcatttcattaccaggtccacttttttcatcatcatgttgatgagtataaccatgcagtcctatttcaccacctttattaatgagataatctaatagattgacaaatccaacatttgttatattgtcagttgtcaataaatcattatcaatattctcagtaggagatttaaatctaggaatccagctaacatgatatttcattccttgtgaataaaaaagattcgccattaattttatttttgtttgatttttatcactagaataattacctccacatccgaaatcttctaatcttattaaagcaactttatcactataagatattgaaggattttcaggtactgagacgctgttatcaagtaagcttatactattgtttttaaagtcaaaaatagcaattaaattaaaaagttcctctatatcagaaatagaaatatagttaacgccatcattatttatcagatccccacgaagagagcctgtcccagaatttttagtataagaattttcagttaaagaaattttattatttttgttagataataaaattttattatttgaagtatcaatagtatagttgagtttattacaaataaaattgagtggtatatagtatctctgtgatttaagcagcataggaacattagtaatgttagattcatttaaaatatttaaacttatgccattaacctttgttataggtctatcttcgaatttgatttttggagtatatgtacttttaaaagtattatcgggaagtgaactagcatatacagtattgtttataacagttagatctttatctaaaaacttgtagtaaaaaagtggatgaaagaatataaaaactgataaagatattgataatattaaaaaaatggatactttctttttcttttgcataaatttttccgcctctttattaataaaataatttccaaaaaatatactactataagtttgtgacaaatagttgtcataaatatatgcaatatgaataaattattctttaaacatctcttttaagattgatgattctcaacaattagctttatgagtgatggaagatatctaaagaaatagcaaatgtgttatttttagattttttgttctattttcttttttctataataagcaatagttgattatttagagactttaattaattcgcttttgcttatacaaatctttttagaagtatatatttatcataattaacttatttaaataatttatacaaatactaagagttcgaaatagattaagatagttttattactaaacgatatcaaatcatatggctataacatttgaagaactattataaaattttataaattagaaatttaaaagattatacacgcttcataaattaatagtttaagtttaatatgtatgataatatatgaatttatgtacataacaggtagtctaagtaaaaatagactacctgttttaatatacagaaattttattataatattgcacaatatatataggttgcagcattaaccaggataaaaatataacacaattttcaaaagaataatctaaaaagtcatatgtgtgataaagtcacagacaataataactatataaattaaacttaaattaagatatattgcaatgcagaaaacgagattaatgaatatatcttgaagatataaaagaatagcaattttatgatttccaatactagttagttaattaaaaggagagattcttatgaataaaaagattattattgttggtggcgttgcaggtggtgcatctacagcagctagacttagaaggctagatgaaaatgttgatataattatggtggaaaaaggtgaatacatatcttttgctaattgtggacttccatattatataggagaaactattgatgaaagaggaaaattaatagtacaaacagtagaagaaatgagcagcaagtttaatttagatataagaaatttaaatgaagttataagtatagataaagaaaataaaaaggttaaaataaagaattatagaacaaatgaggaatatgaagaaacttatgatattttagttttatctccaggcgcagctccacttaaaccagcgatacctgggataaatgaatgtgataatttatttactttaaggaatataccagatacagataaaattaaatcttatgtagataacaacaagcctaaacatgtaactgtaatcggaggtggatttataggacttgaaatggccgaaaatcttcatgctagaggaattgatattacacttgtagaagcaggtgagcaggtaatggctcctctagatatagaaatggcaagtataatacatgaacacttaattgataaaaatgtagaattgatattaaaagatggagtgtcttcattcgagagtaaaggtaaaaagataatactaagtagcggaaaagaaatcacaactgatatgattatattgtcaattggtgttaagccagaaacaacaatagcaagagaagctaatcttaacttgaatgaaagaggcgccatagtagttgacaaatttatgaaaacttctgacccaagcatttatgcattaggagatgcagtagaagttatggattttgtaaataaaaagccaacaatgattccacttgcttggccagctaatagacaaggaagaatagtagcagataatatatgtgggaaaaatactgaatacaaaggaactcttggatcatcagttgcaaaagtgtttgactatacggtagcaacaacaggtaataacgaaaagatactaaagagattagggatagcatacgagactattcatattcatccaggttctcatgctggatattaccctggatcattcccaatagcttttaaattgctatttgatccaaagtcaggaaaaatatttggggctcaaggtgtaggacttgatggagttgaaaaaagaatagatgtactttcagctgctattaaaggaaattttacagtctttgatttacaagattttgaaccttgttatgcacctccatataattcagcaaaagatcctgttaatatgcttggatactatgcatcaaatattattgaaggatttgagaaaacaattcaatggaacgaaatagataaattagacaaagaaaaatcattaataattgatgttagagaagagttcgaattagttacgggaggttttgataattctattcatattcctcttgggcaattaagaagtagattaaatgaaattccaaaagataaaaacatatacgtaacttgtcaggttggacttagaggatatgttgcttgcagaattctagaacaaaatggaatacggtgcgcaaatatagatggtggtgtaaagacatatctatatgtaaaaagagcagaagaaagcattaaaaatcaatatgaaaataatgaagaaataaaagatgaggtggctgtaatgaaattagaagatctagatataacagaaataaatgcaaatactacgttaaatgcatgcggtctccaatgtccaggtccaataaaaagagtatttgaagaaattaagaagatggaagatggcaatatattagaagttaaagcaagtgatcctggatttacaaaagacataaaatcatggtgtgattcaacaggaaatactttattaaaatctgaatttgataataaagaaaaagccttcatagcatatattcaaaagggaacatcatcagacttaaggaaaaatgcttcttcaccaaatgttgtggaaaagtatggagcaacattggttgtatttagtggagatttagataaagcaatagcttcatttataatagcaacaggagcagcatctatggggaaagaagttactatgttctttacattctgggggcttaatatactaaagagtgcagataagcctagtgtttctaaggatatgatggaaaaaatgtttgacgttatgttaccagctcatcctggaaaattaccgttatcacaaatgaacatgatgggaatgggacctgcaatgataaagcaaataatgaaaaagcataatgtcgataacctagaaactttaataaaaaatgctatagacatgggtgttaaagttgttgcatgttcaatgagtatggacttaatgggaataaaaaaagaagaatttattgatggagttgaaataggtggagttgcttcatatctgggggcaacagaagattctggattaaatttatttatatagtatataatatctgctattcttgatattatatttaaggatagagtttagtaagaaaatggactttgtgaaaaaatacaatatggaaaataaaaaagtgcttaaaaaattccatataaaatctttataggcttcatattattaattgaaaaataaagatatatgaagcttatagtatatttttaaaaggagatgactatcattttagaatataaagttatatttcatatagatgaactaagtaaatggagtatagtcctaaaaaatacaaataatttattggaggctataaatactaacaattttaatattgaaattttagcaaattcagaagctgtaaaggcttatgcttacgataatgaattagatttaaggattagcagtgaaatgaaagggttagatcataaagggattaagtttgttgcgtgcaacaatgcgttaaaatcttatagtataaaaaaggaagatttaatgtcgtttgtagatattgttcctaccggaattttggaacttgtaaataagcaaagtgacggttatagttacataaaaccatgaataatttatagttttaagtattttaacaagcagattatttatttagaaaagctctaatatttattttccaaggtcattccaatgagcataagcctcatttaaagcaagaagtgaactagatttatctctagccattatggcaccgcgaagatgtgagatgcatatattaaattgatttatttcatctctttcagaactaaattgaactcttttggctatttttttccatgaattagagaggttgtctgttttaatattggcactttcccaatttcctgattctatatcctgtataagtagctgtattgattcgggaatgttatcatcattgcctataggttccttcaaaatattgccactaagcatgattaatacaaaaaaaattagtgcaactataggtatcgatattactaaaaattttctcatgataaattcctcctttaatatggtcctttataatcaccaatatcagttacttttaccatatgatcatcatatttgtctatatataaggagccagaaggagttaaggtcgcaataaatacttctgaaacatccttaactttatgaatttttagttgattcataagccatttttcagttttattaagttgtttcaaattttcatttataagaattccatcatatatgagttcagtacttataccgcttggttctttttgaatactcatatccttaggtgttaaaggttcatactctggtttctttagaacagataattggccatttggctcaataattgcaaaatctacttgagacaaatcaaaaatatctttaactcttaatagtcccatgagatctgatgctgtatatttcattttttttaatgcactttccattatcttgccattcataattacaattgtaggttcgccttcgatatattttgcagcgtatctccatttctcggtaatgtactccattaaatatccaagtaaacaccaagtaagcaatccgacaaaatgaggccatgccctgcttgataagtccgtagtaagagttgcagcaattgatccaattgttattccaagggcataatcaaagaatgtcagttgacttatttgttgttttccaagtatctttgcgaaaataagtaaagaaaagaatgcaataatagcacgcacaaaaactactaatccttcattcaattatcaatacctccgatcttagcaggatatatttattattctacttgaatcatattttatactgttaaattaatttttatgtagttccggaagaataaaaggtttttcggaggtagcaaataaatacataaaaaccgagaagggatcattaggacgtgtatggcttatatcaatctttacttttatagattattgtttccacgctatctctacaggaacaattggaaaggcattgatagaaaaaactaaaggaatcaaagaaaaattagccttacaacattgctatcataataatttctgtttactattttggaatttacatatataaatatataacataagagttatttttgatttttaagaaccaatagaaccgatataatgaattactaagttctattgttttttttagttatttttttaggatgtttttaattttaatgaaagcaccttggcttgaaggggatacatatctttcctttggatatctgtcttctactgcttttatgtatttatctataatagaatcaaaattagtggattctgtcagcttaaagtatgtatattgcttgttttctagggaatgtatattatttttgaaataagaatgaatcttcatccaattaaattgttttgatatatttttttgattaaatccagtagcatagcttcctggctctattaatattacaggaatattaacatttttaagttctttaagctcttcgtttaaagacggacatatggattccagtgcaaatttagttgcgcagtatggagataaaaatggaatgggggagcgtccagccaaagatgatacaaaaattatccttcctttttttcgagggatcatttgttttaatacaagttgagtcaattcaattggacaaaaaacgtttgtttcaaaagtttcccgatatatatcagaatccacttcagctactgaacctgaatttccaatggctgcattatttattaaaacatcaatttcaagattagttatcttcaatctatcattactatttaaaatatccaatttaaagctttcaataggaaggttatattttttattgaaagagttaatttcattggcttgttcttcagtatgagttgttgcatagacataatgacctctatttgctaaagcaaatgaagctttacgtccaagaccggaaccacagccggtaattagaatttttttcatgagatcaccttaatttacttaagtatagtatatgatatttataaattgtatttttgaataaaaacttaaaaatgcaatttatatgaatacatttatgtaagagttacgttattattatctctatatttaacaaaaatattaatagagtgaatatatctatagatgaattaaattaatatagcttaaataccgcatgttcacaataggaatttgcggtattttattttaaaactatttaattatgaaattaaaaatacagatgtattatatgtctaataagttagttagacttttgattataaaatggttatttgagattcttcatcaactctttggatagcgccaattattcgtaataaagtaccaatacaagaatatgtgaaaccagtagttatatttatattaggggtaatagtaaagttagtattaccttcttgaatattgttatatacttcgtaaagtctaataaaagaaacattagtatatgaaagaacgacatatatgccaaggcaacttgcaaaagcggctatttcacttggggttggatgtgaaatatcagattgttgttgagtcagactattttgttgctgattttgtgcatttttttgactcttgccactcttctgctgcattatactgtttaatagtagttgtttggcttttttgctgaaataataccaagtatagttgataatatatcaagataagcagttgatatttctatatttaacaattgcaaatctaactcgtcattgcttgttaaaaagtgtatagtactattgtaattttcttgcatacttttgccctaaagattgatatactataatatatttggttaatatggttgatgtgattatacacagctgatttaattacaaatgaatttatcaaaaattttgttttaataattaaataagttgtactttaaaggcgtatgaaagtttagtgaatgaaacataaagatttaatatagaatattttctaaagaaataaacaggtatgattttatataaagaaatcaaacctgtttatttttatttaaaagacaaattaaattataatatatttattttagagagtcagaagtttcagacattaataatagggtatcatttattttaggaactctatcctcattagttaagacagttaaatagtctccaggcaaaataacagtatctcccttaggaattatttcattttcgccacgtctaactgctacaaggagacagcgagatggccattttacatctttgatttgtttaccatctaacttcgatcctatacatacagcaaattccagtatagctttatttatcttatcgccaatgggtgttctatcaccttgattttgcagaaatttttctagtaaagcttcatatataggcttagaagcaagaaggtctgctacaatatatgatattaccgagacaatagccaaagcaagcaaatggttaaatgaacctgtcatttcggtaattaggattgttcctgttattggcgattttactactgaggcgaaatatccagccatggctaagattataaaattatttatgtaaatgctatctaagtgagcaatgtgcataagaacttcgccatatacatttccaattagtgctccaattgtaagtagcggaaggaaaattcctccgggagcacctgagccgaaactagccatagtaaatgaaaatttaataactagaataataactaataatattaaagaaaatttaccttcagttaatgaagttattagttcatgacctccacctaaagcttctggtaataaaagacctagggctactgataataatagaggaattataattctaaattctttttttagccaagcttgttttatatataggttttgcgtctttaaaagaactttattaaaaaggaccccaagaaatcctacaattacacctaatatgattacataaaagtaaaagtttagtggcaatgtagcaaaagctccaaaattaaatactggttttagtccaaagaagctgcttgcaataaaatctgctgataatgcagaggagagtgcagaaagtaaaattaatggtgaaaagtttttatgaacttcctctaatgcaaacattgctccagctaaaggagcgttaaatgcagctgcaagtcctgcactagcaccactagtaataagatatttttcctcaatttttattcttctaaagactttactaaatccttgtcctattgctgcacctaattgaacagaaggaccttctcttcctaatgaaaggccagaacctattgaaaggacacctccaaagaacttaccgagaatgactttccaccaagtcatatctagttccctaagtagaactccttcaacctgaggtattccactaccactaatcataggttcgttttttaccatcaatcccactatgtagccaatgattatcagcagcataatccatggtaatataataatggggttaattgatataagcttataaatataacttaaaagatatcctgcttcttcaagtgctaaacgatatagcacaattactaaaccagtgaccatacctatgcatattccttcaaatacaagttttaatttaaaactatgccaatgaaacaaagtgctataggtactctgttttttttccatttctattcctccaatttatttatatgaaaattatttgctatataattatacaaacatatatatgttatcatatgtataagaacatgttaatagttaatgtgatttttaattttattaaaggtgaataattcataacaaatttgcactagtttataaatataaaaaagactgccttttctctaaaactgaaaaagcagtcaattagttcttattaaatatattataatttaagcttaagttccaattattaattaatagtctttacccaaatattcatatcttcaaaagtgccacatatattgcagttgtttaccattcttcctgtaaatttataattatgcttacttaatacaaagtttatactagggtttatagctctacataaactatataaagtaaggaaacctttagctttaagatcgcattctaaagaatagattacatttgcaagaatccctttacctctatatgcaggagaagtagcgcagtctgttatttcagcatttaaattttccatatccatatcttttcattctaacgttactttttggcgacaaattctttcatccctatagagtttttcaagacctttatattcgtctttcttaaatttatcacatattccacaattcttgcattcatggcttttatcagaaggttcagtataggtgcacaatgtaccttcataatttcttttacaaattaaaaactcctctcaaacgttaacatatttatgagaaaactctaatgaattattgaatatctgttgctattagatttttaataatattattagtatcagaattattttcatgagcatataaatcttttattacctttgataagcttagaacatcactcatttcatagaatccaatcttattttgtatgaaatttattgcatggattgctccagtggcaaaaacttttcttgaaaaggattcatgagaaatcgtaattctatcattttctccaacaatcataacttcatgctttccaacaacaccaccagctcgaactgaattaattggaatattttctttagagatatccttacctaagtaaactaacccatcttttatttcattagctatctttaaagcagtaccagatggaatgtcctttttttctctatgatgtatctcagaaatttgaaaatcatagttattcaataggatggaagccaattttgttaatatcatcagcacatttactccaagagttatgtttggagcatacactatgccagtatgatttctataggctagatttcttattttatctaaatctacttctgaaaagcctgtggtacctattatcatattaatccccatttgcgatattattctagagttttttaaagtagcttcaggagtagaaaaatcgactacaacatctggcctgcaaagtaccagtgtttcctcgagtttattagttccttcaatttttataccaatttcttgaattccaattacttcacctagatcaatatgctttttcaagcttccagggctgcacatggcagctacaattttcatattcctttggttgaatatcatttttgcaatttctcttcctgtttttccaagtccaattaaacatacttttaacataaaaagcctccttttttaaattgctagttaaaaaaataataagctatagagaagtctctatagcttattaagcaataatatttatgggtatactaaaaaaaagtatattagcagtatacaaaaacttctcttcaacgcttacgagattagctgacggattcggattgaagaaaaataaccctacttatcctaaaataagattcaccccaaaaaatggttctcccgctcaaaaagattcagcgttataattattatttttttgtcattatctgtatataagcatatcattctaacatatatatgtcaatatatatatttaaggatatgtatcataatacaagcatatattaggtaagatatgggtttctgcttagtctccatatgaatttaatatttaggaattgtaataaataaattttaatattcttaaaattttgaatatataacatagcagaatggatattaatgtttagtatatattgacgcatatatatgttggtgttagtataattaagtcatagtatatttataaaaaaatagagtgatttctaataatcacttaattatatatggaggttatttatggataacaagcttacatcaaaagaggaattaataattaaaatggaggaattaatatcaaataatgagggtccttttagtatagttgtagcagatattgatgattttaagaatttaaataatttatacggtaacactattggggatgaagtaataaaaaagcttatttcaattttaaataacaatttatcttcaacggacatggtatttagatcaggtgacgaatttaatatattacttgtaaaaaaaggtgcggaaagaagctttatggagcttgaagaaataagaagatatttatcggataatacttttaacttaaatgaaaattctgacgacaatgtttattttactttaagcttcggtgtagcaagttatccaagagatgctaaaaacgtagttgaactttttagagtggctgatagtgcattatttagggcaaaagaattaggtaagaatagaatatgtctttctgaggcagagagtatggtgctaaaatctaattattttactaagactcaacttgatagattatcaaggttgtcaaaagcaactgatagaaccgaagcatttcttcttagagaagccctagatgatttgtttaaaaaatatagcaaatagtcattaagcgcattgagcaaatcttgattattaaattaatgtgtaatataatatataatataaaatgaattaatgtggttagatacggttgggcaaattatataatttgttttcaagcaattagtttctggggtgggaaactctttttttgagttttttcgcctcttttttatggagatttttaatagagccaaaacatttctaaataatatttaattagtattgtattaaaaagaccagctaataatagtcaagttaattttcaaaaaaatagtttttggaaaaagagtatggcaaacaaaccgttttaaaacacgaacggttacagaaattggaataaaattaagcgactttgtttaaagagttattttctaggaacatttgcttatgtattttgggatctctttgctcaaacggagtttgatttcggagaacagcaaaaatgtagtttataattttatgcattatagcgactaaggcgattttaggctttttgcctt

SEQ ID NO: 21 - DNA, 75953 bp, Clostridium beijerinckii
atatattttcaaccagtcataaaatgtggcactatgaattcccatctcatcgcatatctgtataactgctttttctcctgataggtattctttaattcctttcaatttctcttccagagaacatttcgtttttcttgacattaaaatactccctttatagaaacagttttattattttaactgtttactataaagggagcatatcaaatttggattttcgtgggtcttttattttgtatatttagaattattaatagtgaatcgcgttataagtaacatagaatattttaattgatagaaagcagtaaattagaaagaaaataaaaatacctacaagatatcgctaatatatttaatttttaagaaataattgttagcaaatttattcatggttgagaagatgcaatatatgtgttaattgggcaatgtttatgaaatttcttctactaatctatgagttcgttcaaaataagtattaaattttgttgggttcatcatataagttaaaattatcgatactatgcataaacctccaacaattataaaggtaggtataaagcctcctgctaatgttgcaatgaacgaacccgaaagagctccaaaaccaaatccttgatatataattccatagtttttagtttgatttttagaaccgaagaaatcacctacgatagtaggaaatactgtaatatttccgccgaagcaaaatgcaattgaagcaacacatataaagaaaattataaaatctaaatgtacaaagcttaaaacaaatactgaagcagttgtaacagtaagggtaaaaattagtacgtttaatctgccaagtttatctgataaagctcctaatataattcttccagctgtattaaagattgcaaccatagctactgcatttgctgccacagcaggtgtaagtccagctaattgaacaccgatatctttaacaattcctattaaataaagaccgctcatgcaagatgtgaagaatattaaaaataaaaagtacgcatctttagtcttaagcatttcttttactgaaaaatctttttcatttgaattattattagtgttattaataatagaacttactattggagcatcttttaataactgggcaccaataacaaccaatatcatagctataattccccaatataaaaatgcttctgaaacaccattactatatattaaacttccattaatatatttaaatattaaacttccagttccataggctccaactgatattcctgagataagtccttttttttctggaaaccacttaatacaatttgaaagtgatgtaagatatgcaataccatctgcggctccaactattatgccagctgtaacatataacattgttagtgaagttactttagatgttaatattagaccaatccctaagattaaacctgaaattgatataagttttctaattcctagtttttcttgaagtttacctccagctaatgtagcgaatgctaaagcaaaactagttatagagaaagtaatagttactttatttaactgccatccaaatttgtctactagaggctgattaaataaactccaagtataaattgttccgagtcccaattgggcaattactgtacctaaaactattaaccaacggttttcatgtttttcattcatatcgttcatcgctccttaattaatatattaacaagtagattttagaaggtatttacaacactattgaaatttaactttttatgttgtctgtttcattaccatcattataaatcggtgtaatataaaattattctttattgaacgaaatgcatagaaaattacatagaatacatttatatattcataagctgtttaaactcttttatgttacttctgcttacaggtatttgataatctatatcttgaagttttaaattataagtattattaaaccaaggtattatttctcttattttatttatattaacaatataagatctatggcatctaaagaaaatatcttttggcaggctgtcataaaattcagctatacctaagcttactgaatactcgtctttcttcgtaaaaacatgggttattctttcttcagcaacgcagtaatatatatcatctatatttactacaattattttttcgtttttccataaatttatcttattttgtatgttaactttatttaagttgttttctttatatttattaaggtcctccaatttttttagcatagatacaattctggattctgaataaggctttagtatatagtcaaaagcttctatttcgaaagcttctgccgcatgttccttgtaggctgttataaaaactatatatggttttttagaaaacttgcttatacttttagcaagtaacacaccatccaatgaggggatatttatatccatgaatataacatcaacttcgttattttggataaatttaagtacatctattccgtcctcaaattcatctattatttctatattgctataatttgtaataaaatatttaagctcttctcgtgctaaaaactcatcttcaactattatagctttcatatgatcaccttctctttatgtaaaattctattttagttcccttttctaatctttctataataagtccttccccataaataagtttaattcttaaatgtacattgtaaagtcctattttattttcaggcactgcatctttatatatatttttaattgcctcttcacttatgccaacaccactatctattatagagatttttactttttcacctctatcctttacaattatttttactgtgcccgctcccttatcttttaaaataccatgaattatagcattttctactagaggctgtattgtaagacttggtatatcgatatctacattatctacatcatagactatatttaatttatttccaaatctcgccttctcaatttctatataatctttaacttgttttaattctttcttaatatctataaattcactgtttatctctaaattatatctcaaataactagctaggtttattataagttctcttgctttatttggatctattctaataaaggaagttatagcgtttagggcattaaataaaaagtgtgggtttatctgcctctgaagagctttaagctctgctttattagccattgttttcatttgttcaacctttgatacttccattaatgttgatataatttgagaaagtccaacagcaagagcttgtagagaataagttattctatgagaggttttataatatatttttaaggctcctataacttcgttcttcactttaagaggtattataattgcagactttaacattaagcttttatcttgcagtccattatttcttataattattttatcgctatttattgcctctttagttacttcagttattatttcgtgtccaatgttgtaatattcttttccaactccgatataagctaatatattttttgtatcagttattgatactgcgtcagcatcaatatcatctcttatgacagtgcatatcttatttagagaatcactatttatatttctaaagtaagggagagtcttattagctatatcaagtgccagttttgcttgtctagcagctattttctctttatcgtcctctatactttgaattaattgaacaataaagcctacactaatttgacctagtatcattggtaatgctattttagatactatatcaatgcctaaagaaaaaggtctgcttaataaaagtataagaatcattgtaatggtttcagaaaacacccctgctattattccagatatccatctatagtttcgttgaatctttctgttaatatatccagatattattcctgctgttatactgcttataagacatgggattgaagttataccccctacatctattaaatatctatgtacaccagatagtactccggctacaattccaactactggtccaaatattatacctccagatactatagttattgtccgaacatttacgagagagccttcaacattaagtcctgtataattagctattatggcgaatagagaaaatactatacaagcaattaaatagtctcttttactataattgtccctactaaatatttctctaaagcctccaaatcttgttataacaaataaacacataagcagtagtgcgactctatctacgaattgaactaatatgttatatacgtaattcaactagaattcatctccattcattcattaattagtatagaataagtaatatcattttaattataatatagaataaggaagcagtcgaaaaataaaatttatggtggatttaaaaggtggtgtatcacctccaacatgaaacccacgaccacctgtatgtggcttaaatagctgcttacagttggtcgtgggtttttattgtcactggtagtccataaatcatgaattttaattagatgataatacaataagctacacagaagaaggaattaatctaaatattatttactaaaacagtattgaatttgaaaacgtcatatctatggtgcgttttcgaatattcgaaaatcttaccattttctaaataacatattttctcaagctctataataaagtcagactctgtcaaatttaaataaagtttatcgttagagttagcctcatcaccttttatagagatgtgggcgctttgaattttaaatccaagttcatttgttatgtaatcataaatagagccttctaaatggtgttcttttagtccaggtataacataaataggcatataagtttcttctagtatttgtgggtcattatccacagatcgtaatcgtaaaattttatatatatattcatcggtgatgttaagtttttctgcaatttctttaggtggtgtgataatagaaaaatctatcacagttgattttagatgctctgtactaaattttttagaataacctgaaatattatctaattctatagtagtcctgttggacagattttctttaacgtaagtaccagagccctgtcgtcttattagcataccttcttgaactaataaatctaatgctttagctattgtaagtttactgcaattatagcattcagctaaagaatctccatctggaattttttcattggttttataaatataattatttatcttattctttatatcttcatatactactttgtatttaggcggcatatataatcttcctttctcaattgtttccacacatatattatatatcagatataaataaaaatatactggtatttatatatctttttataaaaggtatatatcttttgaaaaaaggtattgattatttttgaaaggacatatataatcataattgaaaatgttttctgctcgagacgagaaacataatatatattaagatgggagttacttatgaaaaaattttatgaatttccagaaggattctggtgggggagtgcctcatcagcagagcaatcagaaggcaaaggtaatactgataaaggaaaaactatttgggatcattggtttcaattagaaaaaaacagattctatgatgaagttggaccagatattacttcagatttcttctataggtatgaagatgatatcaaattaatgaaggaacttggacataattcatttagaatgtctatttcgtgggctcgattatttccaaatggagatggagaagttaatgaaaaagcagttgaattttataataatgtaattaattcatttatagctaatgatgtaaagccttttattaacttatatcactttgatatgccgttagtaatgcaggaaaagggaggatgggaaagtaaagaggtcgttgaggcatatgtgaactatgcagataagtgttttgaattatttggagacagagctgagcattggtttacatttaatgaacctttaggaccagtacttggagggtacttacaagattttcactatccaaacataatagattttaagaggggtgcacaagtagcttttaatacaattcttgcacatgcaaaagccattgaaagatttaaaaaacacaatctaaaatctaaaattggagtaatattaaatcttagtcctacttatccaagaagttcaaataagtatgatgtggaggcagcagaatattgtgacttattttataatagaagcttcttagatccttgtgtaaaaggcgaatttcctaagaagttagttgatactcttaaaaaatataatcaaattcctatatatacagatgatgagctaaaaataattaaagaaaatacagctcaaattttaggaataaattattatgaaccaagaagagcaaaggcgagagaaaatgctgttaatcctaattctccatttatgccagaatggttttttgatccatatataatgccaggaagaaagtttaataattatagaggatgggaaatatacgagaaaggaatactagatctttgtaatgatgttaaagaaaattatggaaatatagaagcttttatatccgaaaatggtatgggtgtcactgatgaagaacgttttcttgaaaatggacaaattaatgatgaatacagaattaattttattaagggacatttaaaatatgttcataaagcaattgaagagggatgtaatataaaaggatatcatctatggacattcattgattgttggtcatggatgaatgcatataaaaataggtatggtttagttagtttagatttaaaaactcaaaagagaacagtaaagaaaagtggagagttttataaactgttagctacaaataatggttttgaagaataaaaaagggggaatattgatgaacaaattttttgaaaaactagggaaagcatcgcaaaagttaggtggagaaatacacttgagatcacttagagatgcatttgcatcactaattccattcattattattgcaggcttaatgattttcattaactatgttgttattgaaccaacaggatttatgtctaaaataattaatccagcaacattaactacttggcaagatgttggaacatctattaataatggtactttaaatttcttagcagtattgctagcgggtgcatgtgcatatcatctagcaataaataggaaatttgaaaatccaatagcaccagcgcttctagctatttcaatatttgttgttttattaccatttgtgatttcaactacacctgtaggagttaaagaggcagttaaagttgcaggagttatttcttatagttccactaattcaggtgggatgttcgtaggtattataacgtcactattatcaactgaattatttatgtggttatctaaaaatgaaaaacttaagattaatataggtggagaagcagtacctccagccgttacaaagtcttttaatagtttaatacctataatgattactattctaatttttgctgtagtgtcatttgcaataaaacaactttttgggacagatataaattcactgatcttaaaaacaatacaacgaccattggtagctctagttactagtttaccaggatttataatattaatgctgttgtctaatttattatttgcaatagggatacatccaggaggggtaattgcgccaattatggatccagtattatacacagctatgaatgaaaatatgactgcttttgctcaaggtcaacctatccctcacataattagcatgtcatttaaggacacatttggagtaatgggtggatcaggtaatactattgcgttattaattgctatattcttattctcaaagagaaaggattatagagatattgctaaactttccacagcaccaggtatatttaatattaatgagccagttatatttggtttaccaatagtatttgatttaacactaatgattccatttgtattagcttcaccaatttgcttaactgttgcatacttagtgactgaggcaggatggatgtcaccagtagtaattcaaacaccttggacgactccaccaattttatcaggatttctagcaaccggtggagattggagagcttcagtatttcaaataattatgattgcacttacagtcttactatatattccttttttaaaggttgcagagaaaaaacagattgaagaataaatagaaagaatataaaaataaaagggagatgttttgttatgaaaaaaatattattagtatgtaatgcaggaatgtcaacatcaatgcttgtacaaaagatgattagagtggcaaaagaaaagggtatagaagtaacaatagaagctataccttcgacagatttatctcaatgttggcaaagtgctgatgtaattttactaggacctcaaattggatttatgaaagacagtgtaaaagagacagtagaaaataagatatcagtagaagttattagtatggttgattatggcagaatgaatgctgacaaagttttaactttcgctatagatttaatgaaataaggtggtttaaaatggaaggaatggagttaatagctttcaatattattagtaatgttggaacggcaaagagtatgggaatccaggctttaattaaaggaagaggcggaaatgtagaagaggcagaaaaattacttgaagatgcatccgtgtttatgagagaaggacataagtcacatgcacaacttatacaagaagaagcaaaaggaaataagcaagagttttcattaatacttatgcatgctgaagatcaattaatggcagcagaaataattttatctttagctaaagagatgttatatatgcagaaagaaataaatgatttaaagaaaaaatagtaaaaagccgaggatttatcccggcttttaataaaataagcttataaaaagtttggaacgaataagaaataacaattttaagtaagcgcgcaattaaaaaatatcatagaagattttatttaatcaaatagttttgttaatattttaggaggtcaagatgaattattatttgggaattgatataggaggtaccaacttaagagccgctattttagataatgaatataatttaatagataaatttaaaatagataatatcgttgaaaaaggtgcggactataatgtagataatttaataaaaataattagggaaaagtggaatacatataacattcaggctattggtgtggcatgtccaggtcctttagatataagaaatggagtaataattaatccgcctaatttaaaaggatgggaaggatttgaaataaaaaaatactttgaagagcgttttaaattacctacaactgtaaataatgatgcaaatgtggctggatattgtgaagctaagataggaacagctaaaaatgctgaaagtgcatattatattactctatcaacaggagtaggtggaggatttgtttataaaaatgagataattaatggttttaataacatagctggagaagtatgcaacatgataataaatgaagatgaatatagtcatgcgggcttaaacgctgggggattagaagggcagtgcagtggagtaagtatttctagaattgctagtaagaagttaggacaggaactcacggccaaagatgtttttgacagagctaaggatggagaagtaaattgcagagaggttttaaatgagtggtctataaatttatctaaagcaattgctaatataataactattgtagatccagaagttatagtacttggcggatcagttatattaaacaattctaattacttagaaaaattaattaatgaagttaagctaagagtatttaacaatattaatgtaaatattaaattggctaaaataggtgatgatgcaggattgcttggagcggggattctagcatcttgtttaaaatgatagatataataaaaataaatgcagtattgaagattaaagagaagaagtatataaaagaatctactagggattaatgatatgttctccttaaggtagacagttagataaaaatttttattatggacaagttaagaattttatattaagtgcaggtggtggattttaaagattatgcttcgccttcatcataaaatccacgacaacgaactgcgccctatctacttgacaggtagcagttcattgtcgtgggttattttaagtgtcaaaagataaaattaatagtgggaatgataagagtataaatttaaatattacaatttattttaagatgacattgaattaatgaaaataaatgtgaaaattaagttaggggataaatgatttttaaagaaccttagccgagtattaggtctcccattaatattcctacaatttgcttttgagaatttagaacaggtacagatattgcgatacaataattatttgtatctacagaaatataaggctctgatttgaaaaaatttccttcaattgcttctttaaagtatggcctatgagaaaagtttacgtaaacttcattttcagtataatctaaagttatagcttttcttaaaccatctttttgcattaaagcaaaaagatcaaaatatggatactcagctatcttttcttttagtatttttgtagcactattatagtccatatcccgtaaaatatcatttttagataagtttatgagaatttctaatccattatttatatactggtttgttttatcatctatagtataatcttttgcaaaggaatcaatatgtccttttaaattgctattcatatcagctaaagcggatgcagaagtggaaatattgattatagagtttaattgctcttcggaagcagcagcaactttttttgtagaatctgatatagcagtggaaacaatttcgatatcatcaatgaatctacctattttatctatcttgtttccttgaatatcaattattttatttatattttttactgaaattagcgtagcttcatttttatctttaatagttttcaatttatcttttgttatacttgaaaattcaatattatcatttattacttttacctcagtagccattgattcggatatatcttttattatgttatttatgtcacttattatattttttatatcctttgattgttcagaggatattttagcaagtttttgtatttcggttgccacaactgcaaatccttttccttgttctcctgctcgtgctgcttcaatggatgcgtttagcgctaacaaagttgtattttcactaatactgtttactgcatctgaaatactttgaattgtatacactttgtcgtatagtaatttagttttatgtgctaaattttcattagaaagtgcagaattattaagtttttgtattagttgatcataaatttcatttgttttatttatttcaagtgtcatgtaataagacatatcttcaattgaacttccgttatttattatagatttattttcttcaacgatttctgcgataaaattcttggcttgtactatatcattggtttgattttcaacaacagtagatatttgatttattaccgttgtcgtattattggcagcgaattcaacctcttttgaatattttcctaaatctttgcaataatctattaacttatcattaagtgttgcggtttcatttataaattttcttatatataagataaatgtatttatatttaaagaaaactttttaaaaatccccattctgtttaaagttaatgtttttgttaaatcacctttagatatcttttctaaatgattacttattgtatataatttttgagtatttgatttaaaaattattgcgactagtattaaggttattaatactgatgtaattatagtaactataaacatactaatgcccccttatgtaataatatccgactaaaactatatgtttaatatatattataataaatattggaaattgtaaacatatttttcttaaatcattttactttaaataaagtgaggaaatagtatatagtaaattttgtgtcaaaatatcgaacgattaaagcgtgtattagaattacattgaaaaattatatatataaattgatgaaatgattaagagtaaattaaaattgccctccattttgcacgaaatcggaggcagttcaactaaaaaattagaaatgcaaattaatatacatttctaacttttatattactatttaatattgattctttttcttaaataaaatagcctgatcccaaatgacatcataaggtgctggaccaactaatgtttcttgatttaaatatagtctaaaggctataaatgcttcttgatagttattaactccgtagcatgccccttttggatttcctgtactataagggataatagctacacaatcgccacaaccttttctggccattttatacacataataattatttgatacttcgcaatctttaggaaaaaattcatttgctgatccttcacaatcaggcgagtaaataacactaacaccgttaagttttttagcaccatagaaactagaattatagtaaactgcttttccagtttgggtgtgattaactccgtaggtgattacaaaatcatcatcagatgttaattcgaaattgtttgttcggaggtacaaggcatctctactttcgcctagtacattcacatccattagaattccttcaaagctttccataacccaaatattagttttaagatctatagcttcatagtcattactataatatttttcaagaatcttataccttaaataatttaaatcatctctagcatgtggtagtagattaaattctgttttgcatgtttcacggattttaagtgtaggtactggccaagaatggttgtttttaattggctttttaggtgtaattcgaagtacatgccagtatttgtccaaattatctaaatactcttgtccaatgtctctattttcccatattgatgctctcatgagtattgcaaaggtatccttacctctttcaagtcctaagttgacaagaccctctggtatattatcattattcatgatatcggaactaaatccagaattaattaaagccttccgcacttggtggttaatatattggtcagcagttgtaataataattgtagaactatcatagggatatcctagtgttccatcaggtgtattttcagtgttaatattatagttattaatagtatcacctaggctgccaaatattatatggtattttccggtttgattattacctacagtagtattatcactataatcttttcctattttgtttttggcaaagaaaagaaaacttctgaaactgtagtaatatgctttaggtggtgtttttccgattaaaacaatagcctcatcaggacgtaatttgtaggaaactccttcttctataaattctatagaagactcttgattaggagaaggtgggattagagcaagagcatatggagcacctgcattatttcccaaagcagtattgactaaaccttcgctgcaatattttaaaatatctacatattttaattctccttcttgaactatacaaccttgatgctctaatgaattaatgaattccttaacttttttttcattgttcttatcacaattacaataattataatctttatgcattttgctactcccttttttctttgattcttttcatttgttatttattattatatgctgaatgtttaaagtgggtgccataacagacaggattgtaactgaccaaataaaattagatacaatgccagtgcagaaataaaaaaagttatgaaatgcaaggatataagtaatggccaattcaaattgaaatgcgattattgtagtgaaataaagaaaagttaattttataaacaaaggcattaatatgtaatatattgaggatcaaaatgagattaaattcagtgttggattttaaaggtagcatttcgcctccatcatgaaaccaatggaaactacaatttggattttcgttagtttatttttgtattttgaagatgttcagttaaaaattatgagctttagaatacgtttaaactattttttggaaatttaaatatttggacagctaaccaatatatttaaattattgattttttaatatctatatgataacatgacatatatattaaaaaaatgacaattattaatgaaatatagtaattgagagctatgaagaattctttttatgtggatattttaagaatttcgagctatctgtgcagtcgaccaatttaaactaataagttcttttttgattagtttaaattggcctttattatttataaaaattatataaagaacaatatttttaggggtggagtatgagtaaatttgggaagaaaatattaggaatgatgttggttattttatcatctatagctataatattagtttcagtaaatctgattatgtttgaaaaatttaaaaaggaacttaggcaaacagttactcaatgtatttcagatttaactgtttctattgatagagacaagcttgaaaagcttataaaagagcaatcggatgacagtgtagaatatcaagatgtattgaaatcaatgagtttggctaaatcaaaaagtgttgcaaggaatttttatacacttgaaagagttcaagggacacaagctaagtttttagtagatgtttcagttgatgcatctgaatttttagaagactatactatggatagcgtgatgaaagaagcttttaatgataaagttatagtaacaaatgaatcgtttacagatgagtatggtacttttatttctgcttatgcaccaattaaaaattcagaaggaaagattatagctattgctggtgtagatgtagactcaagcatgtttgaaggtatgagaagtgcattgctaaatgcaacaattctaacaatagttattgtgagtattttagcttttgttatgatttatttatactctaagaaattaagtaataatattgtaaaaatacaaagtgtcttaggtaaaatgagtgatggtgatttaactagtaatataaatataagaacaaaggatgagattgaggatatagctatatcaatagataaggttcagaattctttaaaagctctgataaacgatgtagcaattgtatctaaagatatgaatactgttaatgatacagtaaatgataaagtgaagcatctaaataatgatgttgaagaagtttcagcaattacagaagaaatttcagcgagtatagaagagagtgcagtatctgcagaagagatgtcaagaacttcaaaggaaataggaattatagttaattctatagctgaaaaatcacaatacattgaagagaaatcaaatcaagtaagtgaaaaagctaaaaatattatgggaacttcaaaaaataatcaaaaggaaactgaaaaagtgtttaaagaaacaggtattaaattgaagcaatccgttgaaaaagctaaagctgtggagaaaataaatgtattatcggaatctatacttcaaataacttcacaaattaacttacttgcacttaatgcagcaatagaggcagcaagagctggagaagctggcaaaggatttagcgtagtagcagaagaaataagaaggctggcagaacaatctaatgaaactataaataagatgcaaaatacaacgtcaattatattatcttcggttgaagatttaactaataattctaataatatgcttagtttcatggaaaacagaatattaaaagattacgaaactttagttaatgcaagtcatgaatataataatgatgcgttatattataaagaattttcctctgagttaggtataacttcgaaagaacttttattatctgtagaaaatatactagaaaccatagaaaatgtagcagatgcatctaatgaaggtgcaaggggagtttcagatatagcaaataaagtcggaaatataactactcaatctaatgatgtattggaagaggcattaaaatctaaaacaagttcggaaaaactaaaacaagaggtatttaaatttaaaatttaaaaaatatgacaacacccacaaaaatctgaaattaggattttcatgggtgttttattttataacatagttttgctattacactgttgtgcaagttatcactttcagcaaaattttcatagtcctgcgaaataagaatgtttctactttcggtggattatcgtataaatctaaattcaatattatctactgcattcagaagcttcacctgttagaatatcaattccatgaggaagggctggcagtataacttctagattttctacagcgccttttggacttccaggtaaatttactattaaggtacttttcctaattccgctaacagctcttgaaagcatagctttaggagttatttttagtgaagcacttctcattgcttcagggataccaggcactaatttttcgataacacttgttgtggcttctggagtaacatctctctttgaaaaacctgttccaccatttgttaagatcatattaatacctaaggaatcgcaaagatatattagttcttcttttatcatttcaacttcatcagggattattttataataatctacagaaaacttatcacttggtagaatatcttttatagctggaccagttagatcttctcgttgattgttgtagcctttatcacttatagttaatatagctgtacttatcattttatatttacctcctgcgggaaaatttatattaataaacatttgaatttaaatattatactatagtttagttatagattaaattaataatatcaattataagctcattgaagaaaaaatgaaagacttaaaataaacgatgattagttagaaatatgtcgaaataaagctttaaataaaaaattcaatcaacattcagagttgactaaaatattatgacaaggtaaaatttatagaactggattttgttaataaaataggagatttaaatagaaaatgagtgctataaatcttgaattgcaagaacaaattaaaaaagttacagttaaaattataaagcattatagaggtagagggccagaatatgttaaagtgaaggttgattcccttgacacaataactttagagataaaagggatactttcaaatcttagtgaaattttggttaatgaaggtgctgtcaatatggtagcagattattggaagataatgaagccccatcttgaaaaaaatttccttcaggaagtgaaagatatattaaaaaaagactttacttatagctggaaaatttgtaatatagaaaacgataatagaacagttgttataacaataaaattaatagattaaaattagaaaagttaataaattaaggttggattgaaaagaaaaatattaggcactagaaagaaaatatgctagtatacttacttgttattttttgatagtgccgagtttatgttttagcttttaaataaaccagtactaaggaccgttgaaacaaacagtctttgtactggttttttgttttttttagataatatttgatttagtgattgaataattaaggcatatgatgatttattattttttgattatgcctaaaaaggagtgtattagaatatggaaaagaaagtgttaacggtgtgtccttattgtggaagtgggtgcaatttatatcttgtagttaatgatggaaagattgtaagagcggaacctgcaaatggtgataataatgaaggaaaattatgtttaaaaggatattatggctgggatttcttaaatgatcctcaaatattaacttctagaattaaaaagcctatgataagaaaaaatggagaattagaggaagtttcatgggatgaagctattaaatttacagcggaaaaccttatgaagataaaagctaaatatggacctgatgcaattatggggacaggctcagctagaggtccaggaaatgaaccaaactatgtaatgcaaaaatttatgagagcagttattggaactaacaatatagatcattgtgctagagtatgccatggaccatcggttgcaggacttacttattcactaggtgatggcgctatgtcaaattcgattccagaaattgaagattcagacgttttatttgtatttggatataatccagcagaaactcatcctatagtagcaagaagaatagttaaggctaaagaaaagggtgcaaaagtaattgtgacagatcctagaaaaacagatgttgtaagattgtctgatttatggcttcaactaaagggtggaactaatatggctctagtaaatgcctttggaaatgtgctaataaatgaagatttatatgatcatgattatgtagaaaaatacactgaggattttgaaaagtataaagcagaagtagaaaaatatactccagaatatgctgaaaaaataacaggtgtaaaagctgactatataagaaaagcaatgagaacatatgcaaagggtagaaatgccacaatattatatggtatgggtgtttgtcaattctcacaagctgttgatgtagtaaggggtctcgcatctattgcccttttaacaggaaactttgcaagaccgagcgtaggaatcggaccagttcgtggacaaaataatgtacaaggaacttgtgacatggggacaatccctaataattatccaggatatcagcttgtaacagataagaaagtacaagaaaaatttgaaaaggcttggggtgttaaactttcagacaaaaatggatactttttaactcaagtgcctgaattagttcttaaggaagataaaataaaagcctactatatatttggagaagatccagttcaaagtgatccaaatgcagcagagcttagagaagctttagataaaattgaatttatagtggtgcaagatatatttatgaataaaacagctcttcatgcagatgttatcttaccttcaacttcttggggagaacacgatggagtttatagttcagcagatagaggcttccaaaggataagaaaagcagtggaacctttaggggatgtaaaaactgattgggaaataataagtgcagtagcaacagctatgggttacccaatgaattataaaaatacagaagaaatatgggatgaaatgagaagcctatgtcctaagtttgcaggagcaagctacaaaaagattgaagaacaaggaattgttagatggccttgtcctacagaagatcacaaaggaactccttatttatatgaaggaaataaatttacgactcctagcggtaaaggaaggttattcgcttgtgaatggagaccaccagttgaattaacagatgaagaatatcctttaagtttatcaactgtaagggaagttggacattattcagtaagaacaatgacaggaaattgccgtgcccttcaaaagcttgcagatgaaccaggatttatacaaatgagtattgaagatgcacaggagttaaatataaaagatcaagaacttgtaagaataacatctagaagaggaagtgtactatcaagagcacttattactgaaagagttaaaaagggttcaacttttatgacatatcaatggtggattggtgcatgtaatgagttaactaatgatagtcttgatcctatttcaaaaactcctgaatttaaatattgtgcaattaaggttgaaagaatcgaagatcaaaaatcagctgaggaatatataataactgaatatgaaaacataagaaagaaaatgagaataacatctgaaaaatagtatatatgttgcaattcacaattacagctaaaattcttttaatatttttaaaattatgctgaagaattatttttgcaatatatatattaggaatttaaaagaaaatgataaggcacaagcaaaaaaatagataagtatgcttgtatattttacttcatatgatgagatatgtttaccaaatagggccaatcaggtgaacattatagggaggaaacagcaatgattagtgtagaagaagctttaagaataatttcggaagaatctaaggccttagaatgtgaagagaaggatattttatcttgtttaaataaggcattagcagaagatatatattctagagataatcttccaccatttgataaatcagcaatggatggatatgccataaaaagtgaggatactgatttatatgaagatggagtttcaatagagcttgagatagttgatcttataaaagctggagagtttagtgataaagaattaaaaaacgggcaagcaatgaagataatgacaggagcaccagtgcctaaaggtgcaaatgcagtaatacaaattgagaaagtagaagttcgtgaagatactctttatatttctgagaaagttaaaaatgggtgcaatgtaataaaacttggtgaagaaattaaagtaggagatattgctttaaggaaaggaacactcattaggccaactgaaattggagttttagcttctttaggttatagcaaaattaaggttcatagagatccagtagtagcaatacttacaacaggggatgaacttgtggatataaatgaaactcctaagtttggacaaataagaaatagcaatgaatattcactaaaagcattaattcagaatttaggattagaagctttatgcctaggaattgttgaagataaaaaagatactttaaaaagtaaagttaaagaagcattagaaaaatcagatatagttataacttcgggtggtgcttctgttggtgattttgattttgtagaacaagtattgaatgaaataaatgctgatataaaatttcaatctgtagctataaagccagggaagccaataagctttgcagtcattgataaaaaactattttttagcttaccaggcaatccattatctgcaataactacctttgaagaattcgtaaagccagcttgtgaaaaaatgcttggtaaaaacatggagagtgataatactttcccagttatattagctgaagactttaaagaaaaagaaggcagaagtaagtacatatatgtaaagataaaagctgagaacggaaagttatatgcatataaggctggatctcaaagttctaaccagttaattactatgagcaaggcaaatggaataataataatgccagcaggaattggatataaaaaggcaggagaagttttaagtggaaaattcatctttaaataaattaagtgaacttaaagtaatatctatagttgcaactaaatctggaacagggaagacaacattaatagaagcattaatacctatattaaaagaaaaaaactataacataggagtactaaaacatgatgctcacaaatttgaaattgataaagagggaaaagacagctataggtttgtaaaagctggagctgacaaaatggttatttcgtcaaaagaaaaaatagctatgatagaaaagctaaaggaagaaaaagatcttgaagaaatactagaactatttgtaggtatggatttggtaattatagagggatataaaaataatggatactctaaaatagaagttcatagaaaagaagtagattcaaagcttctatgtgaaaatgaaagttcggatagaacgaaatttttagcagtagctactgatgaaaagctaaatctagacatagaacaattggatatcaatgatgtgaataagatagcagaatttattgaggataaagttatttttaaagtgcgcaaaggagaaagaaataatggaaaaaacattagaatgtaaagtttttaaaatagaagacggaattagtaaagcagatgtagatgaacttctagttagagaatacccactaacaatttttcttaatggaaaaaaattagctacacttttatgtagcccagaaaacttaaaagctttgtcagttggttttttaagaacagaaggtttaataaatactagtgatgatataatatcttttaatttaaatgaagaaaaaggaattgcagaggttgagactaaaaataaagatgctgctcgcgaaagctttttctctaagaaaattgatttagaaagtataaaggatcaatcaattgatggaattgataatttcttagattccttaaactgcaagcctgttgaaagtgatgctaaaatgcatactgaaaagatattcgaatttatgagaacaaatttagattattcggatgtttttaagaatacaggaggagttcactgcgttgcattatgtgatagcaatgaaatgcttgtagtatatgaagatgtagctagacataatgccttggacaaggttattggagaatcacttatgaaaggcatattccttaaggataaagcagttatacttagcggaagagtctctcttgaaatgatactaaaggcggcaaagctagagataccaataattatatctaaatcagcgcctacaagtctttctgtagctcttgcaaaaagattaaatattaccttagttggatttgtaagagggaataaaatgaatatatatgctaatggatatagaattatgaaataattcaccgaaatgacaggtactcagttgtttcggttactgagaataagttgaggatttctaacagtagaagttgcaccatttctgcatgctcctaaagacaagcttcaggacaagcgaaaatggaacaacttctacagaagaaatgccagcaacttgttctctaatgtaacactacacaaaagagtacctctcatttctggtatgtgtatatttcaaaatataagtgaaatttaagttgtgggtatatttatgattttgggaagatactacataagtctatgtttaaatttggatagctataagtattaggtacaaaccccaggaatattagatcaatatgtttgctattttatgtcatacggcgtttgggtggtctattattttcttgggagtgccttgagcgtacaaaggagtgaaattaatatggaaaattacaattcttttattgtgggagatgctaataagtgcgttgggtgtaaggcttgtgaaatagcttgctttaaggctcataatgaatcagtcactgttggaaatatacaaacaccaataatttctagaatacatgttattaaagagaaggactttacagttccggttcaatgtagacattgtgaaaatgcaccttgcgcaaaggtctgtcctataaatgcaattaaaaatgaagataatgcaataataattgatgaagaaatttgtataggttgcaaagcatgtgcagtagcttgcccgtttggagctattgaaatgggaactaaatataaggctggaaaagcagttatgcaaaatttgcaaaaggaattatttgaagaagtgctagaagagaaagaaacaaaggttgcatataaatgtgatttatgtaagaaacaaggtgaaccagcttgtgtaaaagcctgtcctaaagatgctcttaaattattcgatgtcatagaagaaaaaagaataagaaacataagagcggtgagcaacttaaatatataactaaccgaaattgaatacatgtttattccgttggactaagaaaatttcactgaatgtcactaaatgtcaggttgcatccatttcagtttgctcctaagacaagcttaggacaaaccaaaatggaacaaccagccattaagtgacattggcagttcattttctaatgccaacttcacaaacatgtattcaatttctaggcgagatatatttttaggtataagtcgaaaaattagtttggaatttaaatgggtgattttaaatttcaatgaaacactacacacaacatatcacttatttctagtgtagatatatatttaaggaaatataaagtttttgatatatattataaaagaaaggaatttagtttatggatattggttttgtaaatattgataaagagttatgtactgggtgtcagcaatgtgttgaagtatgccctgtaaatgcaatacaaggtaaagcgggacaacctcaagagattgattatgatgtttgtgtttcttgtggacaatgtatacaggtatgtaattcttatgcatttgaaaatagagaaaacagtcatgcaatagaagagaaaagaagagatagagaattacttgaaagtgtaaaggagccagtgtttgcagcttttaacaaaggaaatgcagctaaggtgaaagaggctttacataatgaagaattatttactatagttcaatgtgcaccagctgtaagagtttctttaggtgaagaatttgggcttaagcctggtagtttaacggctggtaaaatggcagcagcattacgaagattaggttttaacagggtttacgatactaactttggtgcggatttaactataatggaagaaggcagtgaacttataaaaagggtaacagaaggtggaaaattaccaatgtttacttcttgttgtcctgcatgggtgaaatttatggaacaaagctatccagagcttataaatcatctttcaagctgcaaatcgccacaacaaatggctggaacaatttttaaaacctatggtgctaaagtagataaggttaatcctaagaaaatatataatgtagctataatgccatgcacttgcaaacaatttgaatgcgatagagaagaaatgcaagatagtggttttaaggatgtagatatagttattactacaagggaatttgctcagcttataagagataagggcatagattttaaaaacttaaaggacgaagagttcgatttaccacttggaagttatactggagctggtaatatttttggagtaactggcggtgtaatggaagcagcacttagaagcggctatgagatgcttacaaagaaatctattcctaatttggagcttaattttgtacgaggcagtgaaggaattagggttgcagaagtgaaattgccaaagataacattaaaggtagcagtagtttcaggtttgaaaaatgtagttcaaatacttgaagatataaaagaaggaaagtgtgagtttgattttattgaagttatgacttgcccagaaggttgtgtaagtggtggtggacaacctaagtttatcttggatatagatagaagaaatgccttggtaagtagaaaaaaaggtatctataaacatgattctgaacttgaaataagaaaatctcatgaaaatccttttataaaaaaattatatgaagagtttttaatagaacctcttggtgaaaaatctcatcatctactacatacaaagtttgtttcaagaaagaaggaggaaatataaatgaataattttgttatagcaaatccaaaaaggtgtataggatgtagaacttgtgaagctgcatgtgttgttgcacattctgaagaaaacatacttgtacaaagtaaggataaggttaattttaatcctcgtttaaaagttattaaaactgcagatgtaagtgctccaattcaatgtagacattgtgaaaatgctccgtgtgctaatgcatgtccaaatggttcaattataaataaagacggagtagtgttaataaataaagatacttgcataggatgcaaatcttgcgcaatagtttgtccttttggtgccattgatataatagttgaacataaagatggagagaaagttattcaaaaggggttaatgtgtgataaagacggaaagctagaacataaagaaagattagttgcaaacaaatgtgatttatgtataggtagggaaaatggtcctgcttgcgtagaggtatgtcctacagaagcattaagattagttgaatctaaaattatagatgaagacatttcggaaaagagaaaaaatgctgcagctaatttagtaaatatattataagtgtatgaatgtggaaagttttaaaacagcagtgatacttgcaggtggaaaaagttcacgaatgggttttgataagcagtttttaagaattaatgaagtgagaattatggaaaagttaattcatgaactaagtaaagaatttgaagacataattattgtcacaaataagccagaagagtataaaacagcagaaaacggaataagaataattagcgatgaaataaaagatattggtcctctatctggaatctatggtgggcttaaagaaagtaagagtaaatatgtatactttatagcttgtgatatgcctaatgtaaacttaaagtatattaagtatattaagaaagtgcttacaaatagtaaagcaaatgcttgtgttgctaaaagggagagtaagtttgagccttttaatgctttttattctgtagatatattgcctaaaattgaaaaacttataacacttaataaaagatctatagcgggattaattgatattatagagcccctttttattgaagaaaatgttttgaaaaaatatgattattcttttgatatgtttatgaatcttaactcaaaagaagatttagaaatatataaggaacaatcaaaaaaataacaagtccatttgccagtctactttccatcatactgcgtcggcaaattgacctaataggcccgctatgatggcaattcatctccttgtctgatgaaaaatagccatggtaactttggagttgttatttattttcatgttcctaatagaaagaataagcaggaggaaaattatgtttgattcgtatggcagaaagataaattacttgagaatatcagtcacagatttatgtaatttaagatgcaaatattgtatgcctgaaaaaggaattgataagatgtggcataaagagattctaactttagaagaaatagaagctattactcaaagctttgttgaattaggtgtagataaagttaggataactggaggagagcctttagtaagaaaaaatattttaaagttaattaatggcataggtaaaatggacggagttaaggatttagctatgactactaatggaattctcttaaaggattatgctaaagatttaaaaaatgcaggtcttaatagacttaatataagcttagatactttgaatgaagaaaagtattcaaagataactaaggttggcaaaatcaaggatgtacttcaaggtattgaagaagctaaaaagagtggacttgctccgattaaattaaatgtagttttaataaaagactttaatgaaaatgaaatagaagactttataaatttaacaaaatatgaagatatagaaataagatttatagagcttatgccaataggcactttgaagcattggtcatctaataaatatatttctaatgatacagttttagaaaaaatgccagaattaatagaaataaaatcaacagatatttcttctccagcaagatattataaacttccaaatgcaaaggggaaagtcgggcttattaatcctatatcatgtaagttttgtggaaattgcaatagaataagattaacagcagatggaaaactaaagtcatgccttcactcaaactccgaagtggatttaaagaaattgcttagagatggtaaagatataaagacagtgattaccgatactattaaaagcaaaccaaaagaacatgaattagagaacggaaattatattaatagagaaatgacagcaattggaggttgattttatggaatttactcattttaatgaaaaaggaagagctcatatggtgaatgtgagtgaaaaggatgagacaaagagagttgctattgcaagaggatcaattaaaatgaaaaaggaaactgtagatttgataaaagatggccttattaaaaaaggtgatgttttatcagttgctcaaattggcggaataatgggcgtaaaaaagacctcggatttaatccctatgtgccataatatttttataacaggatctgatataaattttaatataggtgaagaagaaatagagattgaagcaacagtttcaacagttgggaaaacaggcgttgaaatggaagcattaacagctgtaacaactgcagcccttactatatatgatatgtgcaaggctgttgataaggatatggtaatagaaaatgttagattaataaagaaaaccggtggaaaaagtggagaatatataagggagatttaaataaaatgatggctaaagtattatcaataaatattagtgaaaaaaaaggtgttataaaaacccctataaaagaaggaattttcatagaagagcatggcttaaaagatgatgctcatgctggaaaatggcatagacaggtaagcttattagctcaggaaagcatagataaaatgattaagatgggaataagcgacttagatgctggaaaatttgcagagaatataacaactgaaggtattgttcttcatgaattgcctgttgggacaagattaaaaataggagaaacaattcaagaagtgacacagataggaaaagaatgccataaaggctgcgctataaaaaatcaagttggcacgtgtattatgccaacagaaggaattttcacaagaataataaaaggcggagttattagagaaggagattctatagaaattttatagtggctaggcatcagataaaagagcaaaggaatttattcaagaatattgagaaaagctaaagcaaatccatttgcctaaggagatcgttattttgaattttgcggacaaggagttaatatcccttgtatccacattaaaacccactaccatttgtaatggacttgaatagcgtcctacagatggtagtgggtttttatgagtaagggtattcaatttttagtctcttttcttaaataaagtaaaaatacctatgacaataaatattataggaataaaatattgcgaagcataagatcggatatatttataaatatcgctatctataaaaacttgatttaagatagataagattccaagaataattaaaaaggaacccaatattacccaaccttgtctgttaattcttccgttccatgtaggagttacgctgtaagaattttctgtgttaacgtaattcttaaaaataaattcagaatcaggaacatattctccacgtttaattttgtttgaaacagcaaatgtatcaaaaaaagtataaaaccatatgcaaattttaattaaatgagataagaagccaagtcctataaaagacaaaataggtccaataagcatatataagaataaaacttggactccctttttgattagtccatgatacatatatccaacgccaggaatgcaggcagttataaaagtgagaaaactatttctattgtccatattttcactctcctaattgttttataaaattaataatagaatgttgattaatttcagtaactacagctttgtcaaaaaaacgtgattcaaagtttgtaatgtgtacctgaagactagtaatactaagaaatataataaataaacccgcagcaattaaagcgtaggaagggattagatcatttcttttagaaccaggaagctgctttttatgaagtttttgcattagttttttattatagtcatcagatacagttatatttttaaaggaattaataattatagtatcaagattatctcttttgttctgcataaaatggaacctccgtttcaataatactttttaatttgtttttagctctataaattctcccttcaattgtttttaaaggcaagtttaatatatctgcaatttctttttgagttaatccgatataataatatagtacaagcggggttttcaaatttagtggcaaagattgaatgctttgccgtataaaattttgctcgtctatatcctgagtagattccttagaaaagataaagagaccagttaaaaaattcttaatgcttctttttcttgtataatctatacattttgaagttgtaattttgtataaataagtggaaaaggaactctcttctctaaatttatcaatattattaaatacgcttataaaaacctcttgagataaatcttctgcctcataataatcagaggtataggaatagcataaggagagaattctttttttataaatgtctaccatgtaaataaaagcattttcatctttggttttcattttttcaacgaattcttgctcctccatttcttcactctccactatttattttaatgattccattatttaatttagctttaactacgccctcaccagtaccgatatttttagaaattccagagttgactcttttttcatcatttattttgcatgtaccatggtttatatctgtattgattgataagtttttgtcttttgagtctaaagagattgaaccattattcatagaaatatcaatatttttacataaattattgtttaaatctattttaccattttctaactttagagacgaattaggaatgtcaccttgtaaatcaaattttccattagatgcatttatatttagagcatcaagtcttatatcactattactatctacattaaggttagtcccctttatagaaacatcatatccttcaggtaaatagatagtggctttaattgagtctatatcatcatccacaatttttagtgtgtaaccatttgaatcagttattggattcaattcataatcctttgaagcattatcttgctttacatataattcagtatctatagttattttattgtcagttgctttttctatattcagtttaccatttactgtttcaaaatttaggttactaccaataggatctaaagtgatttttttatcaatagattgtaagtttttacttgtaaagatattatcaaagaaatttgtatctaaattaaaggaagaattactttgttttatattattataaatgtctatagatatatttgtgaaaaagaaaactattattataagaaaaacgagaccacttattcgtattctttcattttcttttttgactaaagtgtaatacaaaatttctatgcctattaagataataattattggccaaaattttatgagttttcttcctaaatctggattgttagaattaatcataatccaaatgcctaaaagtataaaacagatagcagaagttgttgtacctatttttcgcatataaaaatcctccatgaattttattttcatatatttagacgtaagagatatatataatcccacgtttaaaataaaaaaaattaaatatatatagaatacacctttgccaatacctatatagagtatatatcagagatgcgcatggggaaaattattatgaacgaaattgttaaaagcttgtaatctaatgaaataatgactttgtatgaaaaattaaaaatatcataggaggctttttaatgtcatgaaaaagaaggaaatagaataaatgattatgaaatggttaaattgatagaagaaaagctttgaaaatgatataatagcagtaagaaattagaggaagctaggtgagtattttatgttgtatcatgcatcgggagaagtagtagaatttccagaagtaagaaaaagcaaatatactaaagatttttcatggggattttattgcacaaataattttgaacaggctaaaaaatgggctaaaagaaatagagagcatgctacagttaactattatacttacagagaaaataagaatttgaatatattaaaatttgaaaagatgacagatgaatggctagattttattgcagcttgcagaaaaggaaatattcatgattacgatatagtagaaggcccaatggctgatgatactgtttggaattacgtaaatgattttttagctggtgaaattactagaaatattttttgggagttagcaaaatttaaatatcctactcatcaaattagttttcatacattgaaggcattggattgtcttaagtttgagaggagtgaaattataaatgaatgatgttgaaaaagataatttattttacgtttgctcgcttatagagtatataggaaggaaaactaaaaatagaagatcaactatagtaaaaatgataggaaagaaagaactagaaagacagttagaacttgcagaagttaatcattgcttatcatttgaggaagtgtcagatgagataatagaagagtttgatattaaagaaggggattttgattcagtaggtttgtgcaaatatactgttccaagttttcaagctataggtaaagaatatcagagattaataattgatgttctttcagaagaaaataatgtgatagatgtgctatattcggtatttgaatcatttattagtgatgaaatatcagactttaactcatcggtatattatagtagtccagaatatttgaagtattcttatttagaaggcaaattattagtatgatcggaaagatgattttaataaaaattgtatgacttgatttatgaataaatcattttgatgttatattctagatatagtaattgcatttgaacaagaatctttgctgtttttttataagtcagtattattatactattattagaatacgtggattaaagcttgtatcatctagcaaaaattatattaaaggattaaaaacattaggattacatgatttttaattttattgtggtgcttatttataattgaaattgaatctatttttaaagttaatattacaaacggtgtagagctgtcaaaatgaaactcatgaagatttataatttagattttcgtgggttattttgcttacgggttttggagttaaaacttttctttcatttatgttatactaattataattaatatttaggaaattatgggtttgtattacaaataaggttgttaatataaactgtaataccatatgaacaacagcataatatttactttggcgagatatatacataagttcagatcttagttgatatagatttcaaatttaagaattcaacttattggatgaatgtatttacaaagttgctaaaactttgagttcatatcttcactagaaatcataaatatatttgtggagaaaacatttgaaaatgagctgctaaaggttgttagctgtgggttgttccattttagcttgtcaaactgaaagttggagtatgctaaagtggttacaacctgctgcttagaaccttcagcggtattttcatagcttttcggaacaaaatatttatgttttcggtaagttatcacataaatttagttttagagttggatatctatctatgcttataagaattttaaaagatctaaatgaagattttagttgagaatatttttattagatttatattatagataagaggtataacatgaaccagtttgatgagctattgtggaaaaatgaaatagaaacaaataaaacagtgtcaaaggcgatgcgtattgttttgtatttttgctttgcagcaggatttttaaatttgattcatgtatttgatgccgtgcagaatgttatggtaaaaatgaatgtattacttataattcctcttttgttgccaacaattttggtagatatatttgaacttaagaaagcatggacaaagtatttaatacttacttgtgctgtgatttctacaggaatatgctatacattattaacctttcaaacagttttaatgtttgtcattccaacaatattagcttctatgtattttagaaagaaacagcttatagtagtaattattgaatcagtatttaatatagtgatggctcatttacttagcttttattttttgatggaaccatgggttgaaccctttactggattaaaaaatataatgctatatggagctgtgccaagaatacttcaatatttatgctgtggaagtttgttttatatattatgtaatcgtacttctggactcatgctcaattatcataagtttataaaagataaagaggtttttgaactagaaaaatctattgctctgcagaagataaaatatgaggagcgggagcaggtaagcagagatatacataatagcgttggtcatacaataatggcagcgattatgagtttggatgcagcagaagcagtttacaatatggattctaaaaaagcaattgaaaaaataaaatttgctaatataagaatgcgtgagagtctcgaagccattagaaaagcagtacgtggggtaaacacaaaagaaaatggacaaaccatagaagatgtgatgaaattaataaatgcaaatgttgcgaaattaaaaaaggattttaatctcaaaataagaactaaaattgattatagtgaacagcaattaagaacgcagattattagtatcgaaagaattgacttcttaataggagcattgcaggaactagttacaaatagtgtaaagcatggaaatgcaacggctattattgttattataaatgtagatagaaataatataaatataatagttcaggacaatggaacaggtatagaaagtatgagaaattatgaggaattattggactctggatttggaattaaaaaaatcagaaactacttaatttctataggtgggattttaaaaatagaaaatcaagaaggacttctggtaattctaaaaattccaacaagagcaggtgataagaatgaataaaattagaatattgatagtagatgatgaaaaacttcttttagaaagccttgagttaatcctatctatgaatgaatcttttgcaataacaggattagcgcatgatggaaaagaagcattagatattttaaagaaagaacaagtagatatagcattagtagacttaaatatggaaggaatgtctggacaggaattgatattaaaggtaaaagcagcatatcctaagattaaaatacttgttttgacaactttttatgatgaagaaaacattgtgaaggcagtgatacatggggcagatggatacttattaaaagatgcaggaacaaaagtcattgttcaaggaatttttaatgttatgaatggccaaagcatgcttgatagcaaagtaatgactgcattagcaaatataatgtcaaaatgctcaaatgaaaatacagataaaaacaaatatcataacgttgacttattaaaaaatttaactgaaagagaaatagagatttgtcagttgctttcggatggatatacaaattctcaaatagcagagttcttatatatttctgaaggtacagtaaaaaattatataagtactatttatgataaaacggaaataaaggataggacaatgttagccttaaagcttgcaaaaatattttcttaataattaaacatgaccagagtcatatgaaaataatgactctggttacttttttatgaatgatattttagttattctataggaaataaggtagaaatgaggaaaaagaaatgaagagaaataaatcagttaaagcatttggaattatttttgtgataaccgcattacttatttttattaatcttattccaactcttagcttaaaaacatcaaatatgcacattattgaaggggaatgggtgaatgtttattatgaagatgaagaagcagcagctaaggatgtttttcagttagctaacgcaagagctggtgaattagctaaaaaattaggatttagtgaaaagcaaaatattaatatttatatttatgaccatcagtctacaatgcaaatgaaaaaatatgggctaatagggccaatgttagggctagactggtatattggtgacaatataggaacgaatgttatactaacatcgcctgcaaatccaggaaaggtccatgactatgataataataagcaagctgctttacatgaaatggttcatgcctatgtaagtatactaaatccacatattagattatggttaactgaaggaacggctttatatttgtccaatgcagagcctttttacaaaagatatgcctataatatgcacattccaactttttcagaaattaagactagcaatccagttgaattttcaaagatgggaggttacacctttgccaatacctatatagagtatatagataaaaaatatggttgggaaaaattaatgcagataattaaaacagaagattatgaaacggtatttggaaaatctgatgaagatatatacaatgaatgggtggattatattaaaaattattatcaatgaaatagttaagaggttgtgaatggcttataatccaattgagattatggctttttggggaaaaatagaaatattatagaaagcatttttatgtctatttaaatatgtatccttgtacattgcatggatatacaaggggcgataaggtaaatagcttgtataaaatacagtaaagtttataaacaagactttactgtattttcatagcttttcggaatcaaaatatttataatttcggtaatttaccacatgagtctagttttaaagtcggatatcgatatagataacacaatcataaactatacttagactatgaagtatctcccaaccagaaatgagtaatatacttttgtggaatgtttcattggtaattttgatggatgtgattctttggctataagttgttccaaatgtgctagttcaaagtttgttctttgaggctagcactttgtgtgcaactttatagccttagaatcacccgtcagaattgcctagaaactggaacaaaagtatgttattcatttcggcgagttatatacataagttcggtcttaatttgcaataaataaaatactagaaaggagaaacatttttatggaacaggcattgaaaatgagctggtaaaagctcttaattgtaggttgttccactaatgcttgtcacaatgaaattgggagcaagctttagtggggaaacctgcaatttagcactttcagcgaaattttcatagtcctgtgaaataacaatgtttctcctttcggtggattattgcataagtccaagtcatatattgtttatctataaataaatttaaattattttattgttgcaatgttttttaatttttcagtggagctggttatttctccaatggaagcagttatttcttctgtagcagcagcctgtgaatcagcagctaagcttgattctgatatttcactttctatatgtaaaattgattcttttatttgagacataatgtctgatattttcttacctgactcactactaagtagtgctaattttttcatttcgtttgcaactacactaaatccacggccagcatcacttgctctagcagcttctatagcggcatttaacgctagcaaattagattgagaagcaatattttgaattgatataagtattgaatctatatcttctaactttttattagtagcttttgtataatttactacgttagttatagttgaggccaatttttgagaagaacttgctatttcttcaagacccgcattagtttgctccatagaattgaaaatgttttctgaagaatcctgaataattgcctgcttttcaaggctttttgcaacaccaacagctccaaagacatttccattatcatcaataagtggatagcatataccctggaatacaaatccaaatatctcttttggtaaaatatttgaagtaactctcttagtcctcatagcttcaaggtatggatcaccttcttggatcctatcgtttacacttaatttcattggtattttttcattaggataataagctataaatttttcagtgtctgtaattgatatggctatatcttctctaagcatgtctttaagtaatggaagtacatcttttagtgagttgattatttctctgttcatattatctccccttataattaattagttatttcatattatacaacataattatacaaattccataaataatgtaataaaatgaaattttttgtataaaatgcagaaatattagttttacatatagataaactaattataagttagatttacaccaagaaatatatctcaactagaaataagaattatgcttttgtgaaatgtttcattagaaactggaataacagcataatacctatttcggcgagccatatacataagttcagctcttagttggaatatttacatatgatgcattatttgaagttccattaaatagtcatactttgaggaaacagataaatctaccatctttgagactaaaaaagctgtatcatcaagtttcatattttttatatcagcatatttagttatgttgtttattgcagacatagtgttttcttctgaataaataaaactttgattaatataacgaccttcacgcaaatttttaaattttaactgaggaatttttttctcagagaatacaccgaaacctttgacatttaaatttttagtcttcatatattcggataaggagaataataaacacatagtattatgttctgtaatatctatattagttatattagttatatgtctatttacatatttatcgatatcataaatagaggtgttgagctcaagataataaaagtttctgctcattagatattgttcatatatttcaatttttttgggagatttctttaattcttttatatcagatatcatactatctgtaagctgttttgaatattcgatagcagctatctttttatctaactgttccttatgagactctaaaaatgttaatagtttatcataatccttattttcatcaagtatatttttgatatcttctaatggaattaacagagttttatttaaatatcgaatcacatcgattataaaaagttgatcataactaaaatatctatatttagtgtctggtgaaatatagcaaggttttagcaaatttaaatggtcataatgacgcaatatcttagttgatatattcatatagcgagatacttctccgattgtatatagatttgtcatttttttcacactccactattgactttaccattatggcaacgtttatattaatagtataaagtaacttttgtacaagagtcaagaaaattggaggttaacatgagtagtataaaagtcataatagataatatagaattatgcgctgatgaaaataaaacaattatgcaagtagctgaagatgctgatatttatattccacatctttgccatcatccagatcttcatgatgttggaggatgcaaattatgtgtagttgaaatatcaggaaaaaatgatatacaaacagcatgtacaacgaaaattgaagaaggaatgattgttaaaacaaaatcagaaaaacttgatgagatgagaagattgtcaatggaacttatgcttgctaaccatgtagacgattgtactacatgtccaaagtatttaaaatgcgaattgcaatcattaattcaatatttaggtgtcagtacttcaagattaagaagaactcttaatactgttcttgttgaaacagaaaacccattaattattagagacttaaaccgatgtgtagcatgtggcagatgtgtaagagcttgccatgatatcagaggtgttggaattttagattatgataaaaatgaagaagatagaatttatgttggagttaaaaatggattatcattatcagatgcaaactgccgtttttgtggggcttgtgttgaagtatgtccaacaggagctcttcaagataaaaaaggtgtattcaaagatggaaatagagatgatgtattagttccatgtaagcatgaatgtccagcaggaattaatgttcctaaatatgttcgttacataaaggacggaaattttgatgaagcagcagcagtaattcgtgaaaaagcaccatttcctaaatcattaggacttgtatgtatgcgcttttgtgaatctgcgtgtagaagaaaagatataaatggagcagtttcaatacgtgaattaaaaagatttgcatctgaaactgattcttataagtggaaagataaatcatttaaaaaggataaaactgacaagaaggctgcaattattggatcaggaccagcagggcttacaacagcttactatcttgcgaaacttggacatgcagtagatgtatatgaaaaactcccagtggcaggagggatgctatcagcaggtattccagattatagacttcctaaagaagttgtagaatctgaaatagatgtaattcgcgaagcaggagtaaatattattactaacagtaaggtagaatctttaaaagaattaaaagagaattatgatgcagttgtaattgctataggaacagataaaggtgtaagaattccaatccctgggtctgatttgaaagatgtatatgtaaatattgattttttaagaagagatttgatagagatagacattgaaatgaagaaatcagttgttgttttgggtggcggaaatgtggcatttgattgtgcaagatcagcaaagagattaggagctgaaagtgttgcagttgtttgtttagaaggaaagggaaacatgactgctagcgatgaagaaatcgaagaagcaattgaagaaggaattcaaatttacaatagcagaacttttgtgaaaattgaagacaataatgggaatgcttcggggatagtatgtcaggaagttgaagatttccactttgatgaaaataagaaattaatattaaatatcaaagaaaactcagaacatttaatcaaaggtgaaatgataatttttgcaacaggccaaagagcagaccttggagcatttgaagaaattgagcttaacggaagaggtctagtaaatattgacgattgttataaaactaatgaagatggaatctttgctgttggagatgcagtgacaggaacagcatctgtaattcaggcaatagcaggagcaagaaaagctgtatcaagtattgataaatatttaggtggagatggagttatagatgaagtcttatcatctgaacagcctttagatccaatgataggaatggaagaagattttgctaaaaaggaatgtagtcattataaatgtgttccggttgataaaagaataaataattttaatttaatgacagtgggatttgatacaaaaactgcacaatgtgaggcttctagatgtcttcaatgtgatttgcgtccaaaacttacaaaggcaaaattctggactgaatataaggtgaagtaaaggtggtgaaaaaatgctagcagaaaatataaaaatatcaggacatggaataaaagatactaatctcatagatagatggcaaagcagggaatgggaagaattagcgtgtctttttattgatgataatagtcaaagtgaaaatataagatatttattagaacagcacataagtaaggttattgatggaattaaaatatgccaaaaggaattaggaatagagaaagttaaaatttatcttagtgaatgttatagtaatttcaaaatgcaattagaatcatatgaaatagaagtagtgctagttgggaataagaaagcttttgaaaaagatgcatttaatgaaataacattagtacataatgcagaaacaatgtatgcacttaagaattcattggaagaaaattatatccctaaaaagattatttcaatagctggagatgttaaaaatcctggaatctatgaaattccgattggaacatctttaaggcaaattataagtgaatatggcggcggaactgaatctgaaaaagcaataaaatttgtgcaggtaggcggaaatacaggtgctgttttcacagaagaagaattagacactccattcttatattcaaacttgatggaaaatgggacaatgttagaagtatcaaaaatagaagtttataatatagatacgtgtgttgtgaattgggtaactcaaaaaatgctagataacagcaaagagacatgcgggaaatgcgtatattgcagggaagggatttaccaattatacaaaatcattaaggatgcaactgaaggaaaaggtaaagagagtgacattaatttagctatccagttaagtgaaacaatcaaaatcggaaccttatgcgatttcggaagaactgcttctaatccattatatacagctattaataaatttagagatgaatttgaaaagcatattgatagaaaaatttgtagtacactaaattgtatagcttatgctaattattttatagatccaaagctttgtaatggctgtggcgattgtatggattgtcctcaaaaagcaatcaaaggtggaaataatctaattcatataattgatatggattgttgtgataaatgcaaaaaatgtgaagagatatgcagcgtaaaagcagtaaaaagatatggctcagtaaaacctaaattgccagcagaaccaatagaagttggaagttttgatgaaggtgctttaggcgaaaagaaaggccttggacttggaagaagacgaagaaaatagctcataatcaaaaattaatatatatttttaatcaataattaaatttgggaggtaacaaatatgcgtgaaatggaatcagatgtaattatcgtaggtggaggagcatcaggacttgcagcagcaattgcagcagcagaacaaggagctgaagttatagtatttgaaaaagcaaatactactggtgggtgtgctaatatggcaatgggtcttttaggagtagagactaaaatgcaaaaggaaagacttgttgattgcacaagagagggagcatttcaaaaattcatggattatactcactggagatcagatgcaaggcttgtaaaaaattatatttataaatcagcaagtacaattgagtggctagaggctatgggtgtaaaatttgcgctaccatcaaaatatttcccaggttcagaagcaacttggcatattgttcagccaaagacaggagcacctggacttagagcagctgcaacaatgattaaagcaatgacagacagagcagaagaattaggtgttaaaatctgtttagaatcaccaattcaaagtttaataaaagatgatggtgaagttataggagtagttgcaaaggataaagatggtgaaattgaagcatatggttcagctgtaattattgctacaggcggatttggagacagtcctgaatttattaataagtatacaaaattcgaatggggaaaagatttattttcgtatagaattccaggacttacaggtgatggaatcagcatggcatgggatgctggagctgcaagagatagaatggatatggaattagttttctttgcacctaatacaggtggatatgctccaattgaacttccatttagacaaccaaatcttttcgtaaatctagatggtgaaagattctatgatgaagcggtagttgaaaatccagtattctcagttaatgctatctgtagacaaaaaaaaagaacagctttctctattatagacgaaagtataatgaaagaatatgagaaaaatggcttagacttaatcaatgttgttacttctaatataagtatggatgattttaaacaagaaatgaatgatcttattaaaaatggaaatgatgttttatttatagcagattcaattgaagaattagcagaaaaagcaggaattgataaagaaggtcttgcaaagacattaaatgaatataatgaatgttgtaaatcaactgatacattatttaataagaatccaaaatacctaaaaccattagttggtccaaaattctatgctttaaaatttgctccaagtgcatatggaagcttaggtggaattaaaatcaattataagacagaagtaattgacaaagaagataaagtaataccaggattatttgcagcaggaacagatgcaaactctatctgtaatcctgactatgtgtttgtacttccaggaaatactctaggatttgcagtaaattcaggtagaatagcaggagaaaatgcagttcaatatataaaagaacactttacagaagaatagaaaagcttaactgcttttgtggtggatttgaaatagtataattcatctattatagataggcaacatatagtttagaatcatgtgatgatttaccgaaatcataaatattttgattccgaaaagctatgaaaatatcgctgaaggttctaagcagcaggttgcacccactttagcatgctccaactttcagtttgacaagctaaaatagaacaacctacagctaagaacctttaacagctcattttcaaatgttttctacacaaatatatttatgatttgcttaaagttcaagcaattttgtaaatatggttatctaataagttaaatatttaaattggatatctataagccccatgaaaatctagaatttagattttcatggggctttcttttaaaagatttatagaaatactcttattgataatattgattgattctggaatgcctagtatttcttaaagtccaatttagtagatcctacataaaaagatcgttgtacataagtagttagtgaaaagtataaactcttaagcaaacatgataaaaaagtgaaaatatatgatatttattttgccacttctagaggtaaataagcgactttgtttgcgagatcttatgttatataatacaggtgtaaacgataagaggaaggaggaaagagattagatggataaagaaaataggaaaaaacctaagcatcatgttgcacccaaaacaggttttttaaatgatccaaatggattagtacaattcaaaggaacatatcatgctttttatcaatggttagaagaagttacaccacaaggggcaaaatgctggagacattgtgtttctaaagatttagttcactgggaagacaaagggatagcattaaaaccagatatgtggtatgacaaaaatggatgctattctggaaatggaattgtatttaatgaaaaaatctatctgttttatacaggaaatgtaagaaaagaaaatggagatagagaaacttatcaatgtttagcaacttcagaagatggaattacatttcaaaaacatggaccagttatctatctgccagaaggatatacagcacattttagagatccaaaagtttggaaagacgaagaagaagatatatggtggatgatagtaggggcacagaccagtgaaaagaaaggaaatgtagcacttttttggtcagaagatttatacaattggaattataaaggcaatttgcttccagagactatgaactggggatatatgtgcgaatgtccagatatgattcgccttggagaagagtatatcttaattgtcagcaggcaagagaagaagatagaaaatggaatagaaaaagatagctgtcatgcagtatggatgagtggtgaattttcaaaagaaaaaggaacatttacaccatataaagaaggaattagagtagatgaaggatttgatttttatgcacctcaatcttttgtagatgaaaataaacgaacattatatatgtcttggatggggggcggtgaatatgactatcaaatgtcacagttatctgtaaacgatggatggcttcacagctttacatatccaagagagttcatatataaaaataattggttatatcagaaaccaattaaagaattacaatctttaagaaatgataaaattgagaaacatatagaaaatgaagaaataagtctagaagttagggattactataaagagatggaattcattttagatgatgaaaatgaatttaattgtactatattaggagcgcttaaactacattacaattccaatgataagatattaaatattaaaagacttaattggcttacaggagagtttgatgaaaaatacttaaatgttaacgaaagtttaaaaatgcttagggtatttattgataactcatcagtggaaatttttataaacgaaggggaaaaagttatttctagcagagtgtattttcaggataatgatatccgaataaattctaatggaaaattaaaactaaatttgtggaattacaagggggaaaatataaatgagtgataattatgaaaagatcgctaaagaagttattgaagcagtaggaggcgcagataatattatttcggcggctcattgtgctacaagattaagacttattcttaaagatagacaaaaagttgatgataaagtagttgaagagattgataaggtaaaaggatttttctttacttcagggcaatatcaaattatttttggtacagggactgtaaataaggtatttgaacaagtaagtaatcttggcatatctggtacatcaaaatcagaacaaagccaaatggtagcagaacaaggtgacaataaatttaaaagagcaattcgtatattttctgatatatttgtaccaatcataccagcaatggttgctacaggattgtttatgggacttagaggcgttttattacaacaacaaatattagcaatttttggattaacaccagaaagcattcctagttcattattaacatttactcaaatattaacagatacagcatttgcatttttaccagttcttatttgctggtcatcatttaaaaagtttgggggaacaccaatacttggtattatgataggacttatgcttgttagcccatcacttcctaatggttgggcagtagctcaaggaacagctgaaccacttgtgttattcggtcttaagatgtcaggatatcaggcatcagtattaccagctttctttgcaggatttattggagcaaaatttgagatttggcttagaaaaagaatatcagatacatttgatttaatacttacaccatttttgacattacttgttacattaatttttggattattaattattgggcctattgctcatgaaattgaggtttctcttgtatacgttgtaacaatgttatttacattacctcttggattaggtggattaatttggggaggaatatctcaattaatagtagttacaggaattcaccaagcattaagtgttgttgaaattcagatgctggctcaaacaaactggaatcttgtaaatcctataggttcttgtgcaatagctgcacaggctggagcagcatttgcagtaggtatgaaaactaagtctaaaaaaataaaagctttatcttttccatcagtaatatcagcacttttaggaattacagaaccagctatattcggtgtcaatttaagatttgtaaaaccgtttataatgggacttgttggtggaggtgtaggtggatttttagcttcactatttaaacttaaagccactggtatggggatatctgctttaccaggaatgctcctttatttaaataatcaatttccattatatatattagtaatagcgatttcttttggagtagcctttgcgctaacattcatgtttggatataaagataaagaagagcagtaagagaggaagcttatgaaaaatgaagagataaaaaccctgttatctaagatgacattggaagaaaaaataggacaattaacacaaattagaacaagttattattataattctaatacttcagcaacaggaacgatttctaagcttaaatttacaaaagagcaaaaatggatgataggaactgttttaggtaaattagatgcaaagatgatgtttgaaattcaaaaagaatatttagataataaccgtttaggaattccgctactttttatgcatgatattatacatggatttaagactatatttcctataccactagcgctttcatgttcatgggatgaggaattaatagaaaaaactgcaagagttgcagcaagagaaggcagttcttcaggatatcaagcaacattttcgcctatggtagatatagtcagagatccaagatggggaagagttattgaaagttttggagaagatactcttcttaatagtatattcggagtagccatggttcgaggatatcaaaatggtgatttaaaagatccagataccttaatttcttgtgtaaaacattttgcggcatatggagctgcagagggaggaagagattataatacagttgatatttcagaatgcagattgagaaatgaatatttcccaccttattacgaagctataaaagctggagcaaaatcaataatgtcttcctttaatgtattaaatggaataccagctactgctaatacatggctcttgcgcaaaatattaagagaagaatggggatatgagggtgtcgtgatctccgactggggggcagtaaaggaactaatacctcatggcacagcggaaaatagcatagatgcagcaaaattatcattaaaagctggaatagatattgaaatggctactacagcatattttgaagctttaccagaactatgcaaagataagagtatggaaaagctattagatgatgcagtggagagaattcttttacttaaaaatgagtgtggattatttgaagatccatacagaggcatttcttatgaaaaagaaaagcaaacattgctatgtagtgatttcagaaaggtagcaagagaagcggcttctaaatctgcagtgttattaaaaaattccgatgtattacctttggagcgtagtaaaaatgtaatattaattggaccatatgcaagtaattcatcaatattaggcccatggtctttagatggagaccttaatgatgtaattacaattgaacaaggattaataaataagaatatcaggcttgaaggcgtagaaacgacatgctttaatgaaatttcgaaagaaaaatcagaggaaataatagaaaaagctaaaagagcagatgttattgtattagcattaggagaagaagaagaaaaaagcggagaagcaggatgtgttagcaatataactcttccagaagctcaaataaagcttttacgttgtatgaaaaagttgaacaagcctttgatagttcttctaataaatgggcgtccactagatcttactaatgtaatagaagaagccgatgcagttttagagtgctggttcccaggaacagaaggtggaaatgcaattgcagatattctatatggtgattataatccaagtggaaagcttactatgagctttccaagaggagtaggtcaaattccagtttattataataatttagcaacagggagaccaaaagaattacttaagaacgaaaaaagatataagtcccaatatttagatgtcccaaatgagccactatttccgtttggatatgggctgggatattcgaagtttaagtatgataatttaaatataagtaaaaaagaattaagcaaaaaagagcgaatatcatgtagtattaatgttactaacatcggaaagtatactggtatagaaacagtacaattgtatatgagagataaagttgcagatatttcaagaccagttaaacagctaattaaatacaaacaaattataattaatcctaatgaaacaaaaactgtagagtttaccatcgatgaaaaagatcttcgctattggaatggtgaaaatcaatataaaagtgatgaaggattatttgaatttacattaggaaaggattcttcagaaggaatttcttttgaggtaagattaattagctagaatttaagcatttccctcattatttatggtgagggaaattctttaaaaaatatttttaagaactgttaaaatatatatctattttttcatgtgacctatctttcgtatataatatagtaaagagtcttgtacaacaaatatatggaggaaaaaatgcataaaacatattatctaatgttgtagcaaaaaaagatgattatattataaaagtggaggatttatgaaatcaagacaagtaattatgcttagagatttattacataatgaatatgtgcgacccaatgaatttatggaaaagttaggtatcagcttaaggactgtcaggatggaaatacatgagataaatgatatattaagacataaagatatgaggataaactcgtcttcagctagaggttattttattcttaagggagagagaactcagttttatgaatttttaaataatatgattttgagtttgaagaaggtagaattgccagaaacacctggagaaagatttttatttacttttatatatttgacatttataaaagagcctatttcagttcagaacttagcagatattatgtatgtatcaaaaacagtaatgataaaaactctaaaggaaattgatgaatatttacgaaattttaatggacttaatattgaaagaacaaaaaaaggcatctatttccgtggaaaagaaagaagcataaggcatatattatctgaaacattaaattataaaacatttggatctattttaatgtataaagttttgaaatttcagtttggagagtcatatagcaaaatatatgaaattttgcaaaaggaattaccggttattttatataaaaataatttgattctaattgataaatcggtagaaggatttttgttagatttatttataatgatatatcgtaataaggcaggattacttttagaaccagaaactagtagacagtatcctcaagtatttgaagatattataaatgaaattgagggacttttaattcaaaatgatattagaatatctgagtgtgatagaaactttttaaaagattgccttttaactaaaagagtattatatgatgaatgtgttaaattggagccaagaaaagaaatcgcggagttaacagaagaatttttatcgatagtagataaaaaatataattgtagctatttaaaaaatccagagttaaagaaaatgttaagcatacatatagataaaatgctttatcgttcagaacaaggacattttgagcacaatgcatctataagaaatgcaaaggaattatataagcttcaaacagaaatggcagatatattatataaactaatttttgataagtatggttataagattcaagaagaagaattgggttttattatactttatatgggagcttttgcccaaacaaaaataaaagcaataataataagtgatattggacaaagtgcagcttcgagtatggcaaaacaaatcaataattactgtggtgataaaatcgaaataataggaagtttctctttgaattatataagacagtactccatagatgtagatgtgatttttactccaatacgattatttaatgttacattaccaagtaaaactaagattatttatattaactatgtattgcaggaagaaaatattaagagaatacaggaatttttaataaactatcatggaggtgtaaatgaagattaaacttatagcattggatttagacgggacagtattaaacagttgtggttatataagtgacaaaactcttactgcaattaaaatggcgattgaaaagggagttcaggtggttttggcaactgggagaagtgttggattaatatgtgatgagataaaatcaatagaggaaattacatatgcaatatcttcaaatggagcggctgtagtaaatttaagaaaaaatgaaatagttttttctaactttattactatagatattttaaagaagataattaaaataattaaggattatccaatcgttgttgagttttattctaacgggaatgcttatatagatgaagaggtttttataaatcccgttaaatatggattatcagaaaaatgcttaaatcttatgtcagacagtcataatttaataaagaatattttttcggtagttgatgatagatcagaatgtgaatggataaaatgtgtagaaaaaataaatattccatttttaaaagatgatatgaaaaatgaagtatataatagtttgttatctataaatgataaagttaaaataacctcatctgtagaggataatcttgagattaacattcatagcgcaaataagggggctggtctggagaaactaactgaattgctagaaatagatttgaaggaaatagctgctattggagataataataatgatatagagatgcttcagatggcgggaattggcattgcaatgggaaatgcaagtgaagatattaaagctaaagcagatttcattacactagacaatgataaaaatggagtggcagaggcaatattgcgaattttagataaaaatttgcaatttagttaacttatatattgtatttatgattttctaagtggtgcaaaagtctagagataggaattagcggtgcaataaatatagaaaaaagtagtttataaaaggaaggctggaaaatatgtttaatttatttaataggacaaagttcaaaatagtgtcaccaacggagggaaaactaaagccagtaacatctgtaatagatgaggtatttgcgtctaaagctttaggtgacggttttgcaattgagcctaaacaaggtgttgtgtattcacctatagttggtgtagtatcaatgatttttccaactttgcatgcaataggtctaaaagcaaataatggagctgaaattctaattcatgttggtattgatacagtcaaactcaatggtaaaggattcaaaacatttgttagagaagggcaaaagataaaaataggtgataagcttttggaatttgatatagaagaaataaaagataaagttccatcaactgatgtgatagttatatttactagtggcgagatatgtgaactggttaatggcgatatacaggttgatgcaggacaagctaacatagtcaatattgttaagtaaggtaatgagggataaaagttctgtgaaatagaatgtttataacggatatggaactaaattatgcgtattcgattttaaagattatgctttgggctgtagataaatttgtgtaaaaacgaaatctatctacagcctcttttattgatatatttttatttttgattaggctttagtgcgttttcaatagcctttaaaattgttttactgctatttgttgctcctgaaacagtatctacttgtaaactttgtgctttaactaccatgcttggaataacttctgcaggcttgcctctatcggttttatgttctagtaaatctatattttcaatcttgtggtttttaactgtaactgaaacttttgcgctaattaaattaacatcatatgaaccaatatattttccatcggaaatcttcgataaatctacgttgttaattgttaatcctctaattgttgtttgataatttctaacagagattagatattttcctccaacgatgataactgtgataacaataagacaaactacacctaataatattttctttacatttaacatataaaatacatcctttactttttaatagattctaataaaaggctaattccatcttctgttaaatttataatatttctttttcgcataataatattttatcataaatttccaaattattgggtttgagactttaaagataaattattgttgcatttttttattatgattaagaatagctagaaattagggaattagttaagttcttatacagtttattagcttatggattctctatacataatatgaaatatttaatttattttcatgtgccttatatgattcagttataatatgattagtctgaaaatgaaatagaatttgtacaaaaatgataacaaatatattttgatataacttataatcaaagtgtaaatatttacaaagcggttatagtatatcatgaaatgggggaaatatgagttcatatatttttgaaacaattgagcatgaagagaaatatccagcaaaggtgtttgtaacatcaattgaacattctagttttcattggcattatgattatgaattaattttagttctgaaaggatccctaatagtaaatgcaagccccaagataacggttttggaagcaggggatattgtgttattaaattcaaaagcagtacatgaattacaacgtactaaggaagagaatttatgcttatttattcagatgaatgagaatttattcaaaaatacaaaagatgataatagatcgtattatttttacttaaacagcaagcttaatgataaaaagcctaagaacggatatgatgcatacgttgctaatgctgctaaaattggacttgaaagtcagagtgatgaaatatttaacacttatagggtaaaatctttagtttatatgttaatagcggacttatttgaattcacattatatgatattcatcaaaaagctgtagatttgaaagaaacagaaaacacagaattgctcatgcaggtaataaactttatccaaaaaaactgtacaaaagatacagtattagatgaactatataaatttataggattgtgcgagaaatcagtttatcgtttcttaaaggcaaacattggattatcacctaaagatttagtacttagcagcaaaatagaggcttctaaatatatgcttaagttttcaaacaagtcaattagctttatagcaaatgattgtggcttttattctgaaagtactttttacagagcttttaaaaaagaaataggtgtgacccctgctgaataccgaaaaagtggggcaagtttaaatgcggatcctaatgtacaaggctatttgcgttttgattttaaagaatctattaatttattagaaaaatattgtaaaggagatatgtaaaaatgaaatgtactaaattaaaaagattatcttatactgaaaaggcaaaggaaatagttaactctttaactttagaagaaaaggtttccttaatgggtggaaatgttactcttaatgatatgctctctgatttgagagatgctgatgagcaaaaacattataatagttatccttatccagcaggaggaatagagaagaataatgtgcctcctatgcttttctgtgatgggccaaggggtgtagtttgtagtgcaggaaaaagcacatgttttccagtatcaatgcttagaggtgcaacatttgatacagcattagaagaaaaaataggtaatgctataggtaaagaagttcatgggtataaaggtaacttatttgcaggagtatgtattaatcttccgtataatccaggctggggaagaagccaagaaacttatggtgaagaatcttttcacttaggggaaatgggacgagcattagttaaaggtgtacaagacgaaaatgtaatcgcatgtgtaaaacattttgcttttaaccaaatggaaatttccagatttaaggtaaatgttgaatgtgataaacgtactgagagagaagtatttcttcctcattttaagaaatgtgttgaagcaggtgcagcagctattatgagttcttataatttatacaaaggaactcattgtggacatcatgattacttattaaatcaagtattgaaaaaggaatgggattttgatggatttgttatgagtgactttatctggggagtcagagatacggttgaagcagctaatggcggacaagatatggaaatgtgctgtactcagttttttggagataaattagtagcggcagtaaaaaacggacaagtaaaagaaagtaaaattaatgaatctgcattacgtatcgtgcgtacattgctagcatttgaagatgcttattcaaatgaatatgatgagagtttaattggatgtgaagatcacattaaacttgcacttcaggcagcaagagaggggattacattaattaagaatgaaaataatgtattaccattaaacaaagataaagcaagaaaaattgttgtgttaggaaagttaggcgataaggaagtaataggagatcatggttcaagtcaggtaagaccagcttatgttataacaccattacaaggaattgcaaatgcagcacctaaagcgcaggttgtatattataatggcgaaaatttggaacatgcaaaagaattagctaaagatgcagatgcagttatatttgtagttggatataactatgacgatgaaggtgaatatatatcagaagatgaatttgaatcttacacaggagcagtaggtggcgatagaaaaaattcgttaggtcttcatgaaaatgaaattaaattaatacaggaagtaggtcctgttaacaccaattctatagccgtgttaattggtggaaatatgataatgatggaagagtggaaagaaagcgttggagctataatgatggcatattatccaggtatggaaggcggaactgcaataggagagattatatttggagatgttaatccaagtggaaaactaccatatgtaattccatttaaagaaagtgatcttccacaagtaaattgggatacaacatctcaatggtatgattactatcatggatatacaaagttagaaaaggaaggcataaaaccatctgtaccatatggatttggactatcttatactaagtttgattttagtgatgcaaattttgatgcatctgatgatagtgttatcgctaaatgtactgttaaaaatataggaaaaatggcaggggatgaagtcgtacaaatgtatgtcggattcaaaaattcatctgtagagagacctgtaaaattgttaagaggttttgctcgtgtaaatttacagccaggagaaagcaaggaagttacaataacttgccctaaagaggagctttgctggtataatccaaaaacagaacaaatggaattagagaaaatggagtatgaggcgtatataggaagcagcagcgcagattcagatctacacatgggaaaagttacattgtaattgtctcaaatacaaatgaaatgacagagtgaaaagtattagtttaatgatagttaatattagttggttgattagttaatattaactgtacataaaaatataattactttactctgccatatcaagtcatatttttataatatataagttttaattagaattcaatgctttttgaataggaattattgaaaactcaaaaaaatttcagcatttattatttattgataaatgtgcatcattaattagaacatatatattcttggagtaatcgtttaattactttatatattgagtactatgaaaggaatgagtatttttatggaagaaaaaattaatttaaaagaaaagattttttattcaataggcgatgtaggatgtaactttgtgtatgtgccaattacttcttttttgatgatatattatactaatagcgttggacttggagtagcagcagttgggacactaatgctgattgcgagacttttagatggtgtaacagatttatcaattggagcacttattgataaaactaatacaaggtgggggaaaacaagaccttggattttatggagtgcaccatttatggggattggtttgatattattgtttaatgttcctatggggctcagcaatggtggaaagctgatttatgcatatatcacttatatatttttagtgtcaattgtatacacggcctcaaatttgtcatattgcacattgctatcaagaatatcaagtaacatacaagaacgttcagttttgagctcaattcgatttgtttttgttatttcatttactattatattatcaatgattacaaatccattggttgaaaagtatggatggtcaaaacttgcagttatttatggaataatttcatgtgcatttctattcataacatttgcatttacaaaagaaagaaatcaggatgaaaagggagaaaaattcaagttaaaagtaggaattggttccttgatgaaaaataaatattttttacttatagcgattatgtttattattatttatacagatatggggttattttcaggagctactctttattatacaacttatgtattaaataatgctaatttaatggggatgcttactttagcactttatgcacctatgatagttggatttgcacttttacctaagttcataagtaaatttggtaaatggaaagttatgatgtttggatttctagtgaaattagtaggtgttattattatggcaattaatcctgcttcttatgagcttgttatggcaggaagcattataaaagggtttggtatggcgcctctaatagttggaattttcgcaattgttgcagatgctgtagattatggagaatggaaaacaggaatacgtgcagatggattaattaacagttgtgtaagttttggaatgaaattagggggtggccttggtactgcaattctcggatggattcttgactttggaaaatataatggaacagctgctgtacagacaggagctgcaataaaggcaattaatatttcatttatatactcaggaattgtatttaccataattggattaattgtaatgtattttataaatatggacaagttttcaaataaaatggtaactgaacttaatattaagaggacttctaaatctatagaattaaattaatttatcaaatgtcttaaagcgagatttagttaagtcaaaaaataagttttcttgcttaaagaacttgtgcattaatagttaattttatgtaattttgttttgaaatatttatgtatagacccttgttataattgctatttagaaacgcaattataacaaggatttatcataaatatttttttgttttttaggaactccttatgaaggcaagatcttcaaaaaatataatggaaataattttatttaataagtattaccacaaatttcaagataatgtcccctaatgtaaggttgacaaattttactgatgaatataaaataaataccgacagcaaatgaaaaacattatcatttgaatataaaaatcaaataaatattaattcaataaaatacataacaattaggaggattatcatgaaattaaaaggaataactacgattattcttgcttgtactttattaataacgggatgctcaagtggagcggctaaaaatgaagataaatctaatgtgggacaaagtgcgactgtaacgtatccacttactattaaacatgcttttggtgaaacagtaattgaaaaacagccagaaaaggtcgttacaatttcttggggaaatcaggacgtaccattagcattaggagttgtaccagcaggtgtatctaaagctaactatggaaaagcagatgaaaatggtttattaccatggacagcagaaaaatataaagagttaggcgtggacaaacctgttacttttgacgatgtagatggtttagactatgaagctatcagtaatgctaagccagatgttatattagctgcatattcaggaataacacaagaagaatatgatttattaagtaaaattgctcctgttgtagcatatcctaaacttccttggcaaacatattggcgtgatcaaatatcaattaattcaactgcaatgggtaaaaaagatgaaggagacaaattggtttcagatttggaaaagcaaataacagaaaaaactagtgagtatcctaaacttaaaggcaaaaaggctgttttttgttactttaatccagctgacctaggtaaattttatatatatcttccatcagatcctcgagcagcatatttaactgatttaggattagaattaccagagagtgttaaaaagctagcccagacttcagatagttttgctcttgaaattagttcagaaaatattgataaattaacagatgtagatgtaatagtaacttatggaaatgacacgttagtaaaacaattgcaatcagatgctctacttggaacagttccagcaataaaaagaggatcagttgccgtaatagaagatggatcagcacttgcagcatcttgtactcctactgccttatcaattcaagcaacaataggtgaatatctaaaaataattggagaggcagcagataaagcataatgagatttagaaagacagtaggaatatatttaggtagtatttttttactaggtatatgtgtagtaatatcactggcatttgggtcaaaaaatataggaattagccaagcaataaatgatttattaaatagtgacgatacgtcttttgctgcattagttgttcgagaacgtattccaagaacaatttttagcattatggcaggagcttctcttggaatatctggagctcttatgcaatcaatcactagaaatccaatagcagacccaagcattttaggagttaatacaggtgcatctttatttgttgtaattggaatagcattttttaatataaattcagctaacgagtatatctggattgcactagttggagcaggaatcacatcaatatttgtttatactatagcttccattggcagcggaggtatgacaccaataaaacttgctttggcaggctcagctactagtgcagttttaacctctttagtaagtgtaataatacttcctagaagtgaggttatagatgcatatagattttggcaggtcggaagtgtaagtggtgcaacttgggagagtattgacttaatgttaccatttttaataattggattaataataagcataatatcagcaccagcattggatattttagctttaggagacgaggttgcaactggtcttggagtaaatataggaattattaggattatatgtgcaattgcaggggttatactatgtggtgcaacaacagctattgcaggacctataggatttgtaggtttaatgattcctcacagtatacgtctcatttttggctcaaatttaagaggtttagttccaatgtcggctattggaggagcggtgcttttaacaatttcagatgttttgggaagagtaattggaagtcctggtgaacttcaggtgggaattattactgcatttttaggagctccaattcttattatcattgcaagaaaagcgaaggtgagggctatatgataaaaactactcactctatgataaaagaaggttatataaaaagaaaaaaacgcatgattagcgttaatataattctctttgctttaacaataagtctttgcggagttatgcttttatatggtaaaactaattattcattaagtacagttataagagtgcttagtggggaagagatacaaggagctacatttactataggaaccttgcgtttaccaagaatgctctgtggacttttagcagggttagcctttggaattgcaggaaacacatttcaaactatgcttagaaatccgctagctagtcctgatattataggaataagttcaggggctagtattgcagcagtgttttgtatattagttcttcatatgagtggaagcagtgtttctatagcagctgtaatttctggaatcttagtttcaacacttatatatattttctctaaaggcacaggattttcaggcggcagattaatacttataggaattggaatgcaagcaatgttaaatgcccttatatcatttttgctagttaaggcttcagaacatgatgtttcaaaagcactcacatggttaaatggaagcttaaatgggatgagtatgaaagatgtcccaggcttacttgtggtcgttattatatttggagttattattttatgtttaactaatcaccttcaaatattagaattaggagatgaatttgcaacaatacttgggattaaaataaatttaataagaatagcattgatattaagttcagtatttttaattgcttttgcaactgctattacagggcctatagcctttgttgcatttttatcaggtccaatttcagcaagacttgttggactaggagcgccaaatgttttagcatcaggtttagttggagcattattagtacttggagcagatatgattggccagtttgtatttagtacaagatttcctgtaggtgtaattacaggaattttaggagcaccatatatgctgctgcttctaataactataaacagaagggggcaagcataatgaatgaaaaacaacaattgcttgaagcaaaaaacttagtaactgggtatgaaaaaaagattatagttgatggaattgatataactattccaagtaataaaatcagtgttattattggagcaaatgcatgtggtaaatcaactttgctaaaaacacttgcaaggcttataaagccaatttcaggagatgttgtaattgacggcaaaaaaataacttcaatgccttctaaaaaattggcacaagttttaggtttacttccacaatcaccagtagttccagaagggataacggtctgggatttagtttcaagaggtagatttccatatcaagcattcttaagaagtatggatcaaactgattttgatgcagtagaagaggcacttgaaataatgggaataacagagcttgctaatcgtagtgtagatgaactatctggcgggcagcgacaaagggtttggatagctatggcactagctcagcagaccgatatacttcttttagatgaaccaaccacatatcttgatattgcttatcaagtagaaatccttgatttattgacggatctaaaccgcaaaagaggaactactatcgtaatggtacttcatgatataaatttatctgccagatatgcagattatatatttgctcttcgaaagggaaaattaattgggaaaggtgaaccatcaaaggttataacttcggaattaatcaataaagtatttggactagattgtgtggtaatacaagatccagtatctaattcaccttttatagtcccaagaggaagacatcatgttaattaaacaaatcctcgacaatattaattgtagtattgtcgaggatttattattatctagaaaattatatcgctggacaatcatgtgatcattggggttccttaggggattaattatgagaaagtcttatttggaaggttgccttttaaaagagaataaagaaatatttacttggtagggaatttaaaagactaatcttatatcaggatgaatctgaaaaagtcacatgttgaattacatattaatgaaaattgtatacttctttttgtgaaaaagtatagggaaaaatatgagcgtacttgtcttcttaatccacagtagtctaagcaaaaacttgtatcattcttgtatcattatgttagatgtaaagtcaaaagatggtactaattatataaaagttcatattataaaatataacaagctttgtgtaaaaaaatacattgtttttatataaggctaatttacaaaagagggtgactatatgaaatgcaaaacaaaattaactggaaaggtgatccgtccaaatgatcctgaatatagggaagcacgaatgaactggaatccgttcactaacgcatttcctagtgtatttgtttttgcaagggataataaggatgtagaaaatgcagtcaaatgggcccgtgagaatgatgtaccaattaggatgcgaagcggcaggcatgctctagcaaaagatttttcacaaacaaatggtggaattgtaatagatactggtctaatgaaaagagtaaaggtggataaagcaaatttaattgccacagttgaagcgggaatacgcgttggtgttcttgtgaggatgctggcaaaggaaggtttccttgctccttttggagatagttctactgttggtataggcggaataagtactggtggaggaattacggctatacaacgaacagcaggagtgatttcagataatattttagctgccactatagttaatgctgatggtgagattatgcacgttagcgaaaaagaaaacccagacttactatgggctattcgtggaggtggaggaggtaacttcggtattataacctcatacacatttagaatacgtcgtgctcctgctgaagttgggatatttcaaataatttggccttgggagcaattagaggaagttattgatgcatggcaaaggtggtctccatttgtagatgtaagacttggtactatattggagatatattcgaaaacaaatggtcttctccgttcgcagggattattccttgggactaaagcagaactgaagaaattaataagacctttgatagaagtaggatgtcctttaaaggtagttattgatggggttacactaagtgaggcaatagatttctgggctccaaatgaacctttcttcgatgaacagaagagtacgtggtcatctgcctgggttgagcaaactctgcctgaagaaggaattgaagcgataagaagcttcttagaaaaggcaaaaggaagcgaatctaatttctttttccttaactctggaggcgctatgaatagtgtaaatccgaaggatacagcctttttctggcgaaatactaaatattatttggaatgggatgcttcatggattgaaaaaggtgaagcacgagagaatattatgcttgttgagaagacacgtgcaaggttgcagccgtatataacaggatcatatgtaaatgtaccagatttatgtataaaagattacggtcatgaatattatggtgataattttgctagacttaggagaattaaagctaaatatgatccggaaaatgtttttaacttcatacagagtattccaccagctcgtaattgtgattatgatcatagaaatgaaagatagcagcataatccattgctgtagctaactattgattaatctgtataatttatttttagtcttaactaaaaatatgaaatttaaaatcgcacattcctgtaatttttgtttaattgatgaaaagatcgagcaatacttcagatcgaaagatatagtgtaaactttatttttaataacggatggatcataagataattagattgtatcctatagaatagacgataaaaaagtcaactctatagggtattttagtttataaaaacctcagtcatttggacttcagaagcacatgaaatatttaaattatctaaatatgacattagatacctcataaatttcttttaaaacgtatcatatgatacggagtctatagtgaaagtataatataatacttataagaagtaaatgagaatgaatttcaaaggaggggcgatatgaataagttaggaatagacattggttattcaactcttaagtatgtttacttagatggtaatgataatttaattgaaagtaattatatatttcataaaggaaatataaataaatattatagtgagttaattgagaaggttaaagtaattaataaagaatcaaatattgttattgggataacaggaagcttatcatcaagaattaatttagataaaagatatcatattaataacagtatttctcttattgaaggagctttatttaaaaataaaagcgttaaatctattattgaattaggtgcgcaagaaacaaaatacattacagatatagacgttaagaatgttaagttttttatgaatacaagctgtgcagctggtacaggttcttttttagaagagcaggcttcaagattatctatagatataaaagatatatcatcttatacagaaaaagctacagaaattccaaggatagctggaagatgcagcgttttttcaaagactgacatgatacatcatatgcaggatggggtaaaagtagaggatatattgcaaggattatgccatgcacttgttagaaattataaagcaaatgttcttcagaaaaataagcttaataaaccaatcatgctttctggtggggtaatacataacaaaggagtagttaaagctctaaaggatgtattaaagttagaagaccaagacattataattgaagaaaattttgagttattaacatgttttggtgcttgcaagatagcagaagaaaaaggattaattatagatgtaaataaacttagctcttctgaaaaattaattatagaaaagcctaaaaatagcttatttgaaaaattagataaattcggagtaaatgatagtttaaataagcatacttgtataaataataatttaaaagaaggttacttgggcgttgatattggatcaacaagtatcaattttgttgttattgatgaagctaacaacgtgattgattatatttatacaaaaactaatggaaaaccaaaagaagttgttactgaatattttgatatattaagagaaagattaggacaagactttaaattcaaaggaataggtacaactggttctggtagagagtatattggaaaattaattaatgcagatttaattgtaaatgagattacagctcaagcagaaggagctataaatgtatgtagtgatgttgacaccatatttgagattggtggtcaggactcaaaatatatatgtatagaaaataagttagtaaaagactttgaaatgaataaaatatgtgcagcaggaacaggagcatttatagaagagcaaattaagaagcttggaataagtatcaatgagtttggaaaggttgctttagaaggggagaacccttgcaatttaggggatagatgtactgtttttattgaaggtaatataggtaaagcaataggagaaggcgaaagtattgagaatatttcagctggacttgcttactctatagtaaaaaattatttaaatagagttgttggaaatagacctattggaaataaaatattccttcaaggtggaattgctcataatcaagcagtagtaaatgcatttagagctttacttaataaagaaattatcattccagaattctttagtgttacaggcgctttaggaacagcagttttaacaaaggaaagtataaagaataacgagaaagataagaaacaaaatagtagtgtagattattcaaataaaggtgaaaaattattcttagacggatatataactgataaggatgctaataaaaaaacaatagggataccaagagtactatttcttaataaaatgttcccgatgtttaatgagatatttaaaaaattaggatataatgttttactttcagatgcaactaatgaagatataataggccttagccaggaatattcgtttgaagaaacatgttttccagttaaattaataaatggacatgtagcatggcttctacagaggaaagttgattatatattcctaccacatttatacactatgaagcatgcaggttcagatgtgagagaagattatgcatgtgtgtatatgcagacttcaccaaagataattgaaagcgtgtttaatttggaagaaaaaaatataaagttaatatcaccaacattatcatttaattttggcaaacaatatatgattaaaaccttattaagcataggaaaagatcttggaaaaaacaaaatagaaacagcggcagcagtaatgtctggtatgaaaaagtttatggattatgagaaaaatcttgaatcacttggatctgatgttttaaagaatataggtgaagatgaaaaagtatttgtaatgataagcagagtatataatattgttgatccagcattaaacatgggtatagaaaatgaattgaaaaaacgtggatataaagtacttcatttaactcatcttgaagcttctgaaatgaatataggagaagaatattctaacatgtattggccttttggacaacacataataactggagcaaaaattataagaaaccataaaaatttatatccaatatacattactaatcatggatgcggaccagatacaattcttactcattattttaaaaaggaaatgggaagtaagccttatctgcatatagaagtagatgaacattcttcaaaagttggagtaattacaagggtagaggcatttataaattcaattaaaaattgtgataataatggccttttagaaaataaagttgaggaatctgctgaaggtaattgtagtaaaaaacttggaatggttaatgaagttaaatttgataataaacttcaaaactctaagaatgaaatagaaactgaaaatgaagtgataattccatatatgtatccatatagcaatatactaaaagctttcttagaaagaaaaaatacaaaggttacaatattagaacctgtaagtgaaagcacaattgaaattggaaagcaattttcaagaggaaaagaatatttttcattaactggtttaatatcagaggtcataagtaaagttaaagaaagtgaaaaagaatatacattatatcttcctacagatgaaggaagtgaaacctttgggcagtatgggaagcttatgcaatataaagccttagaatgtggaagaaaactaaatctcgaagcgccatttatagaagattacttaggagataaagattttggtctagaattctttaaagcattggtaataggcgatctaattaatagattacatgaaaataaaaaagaacaagctttagatgatttaattaaagcaataaaaaataataatatgacagactcatattttgataagaaattagaaatcctaaacaatgagatattaaaggaaaataaaaagaaactgcttatagtgggagaatctttggtagtgcataaagattatttaaataataatctcataaaaaggctaattgaaaattatgatgttgtaaagcagtcatttgcagaagaattatatatgctatataaagattttagcaataagagaaataagactaataaacaatattttaaattagtagatgaagctaagaagattattaataaagttaatttgattctagaagaaaaatctccatttaataaggatattgatagtcttaatgaaatactaaaagataagcttccaaattatgcaggaggaagtggaagatatagatttgctaaattgctaacagcagaaaatgttgatgggattattgttgtaagctcaatgtatgaaaatacagctacaatattaaaaatattaagagaaaaatataaagaagaaataaaaattcctatattagatctatattttgatagcaatataaacaaaaataatgaagaactaatagaaacatttatagcttatctgtaaataaactaaatggatcttagagttatggttataatcaccgaaataacagggattctgttatttcggtttctagagaatttcactgtggatttctaacagtataagttgtaccaatttctgcatgctcctttgacaagcaaatgacaagcaaaaatagaacaacttgtactgaagaaatcctacagcaaaattctcaatgaaacactgcacaaaagaatccctattatttctagtatggctatatatataaatcaatggagagaggttgtttacctacatataaaaatgaaaaggagaatgtaatatgcaagaattaattaagaatatagaaaaatcaaaggcaatagattttgacagcttagtaagctgcaaggaaggtcaaatagaaactgttacaatggctcaaaagaaaggtgtaggacttactgcattagcttttggaaagggtgaaggcgttgggcctcatgcagctaaaggtgatgctatgattgttattcaagaaggagtagctactgtaaaaataggtgatgaagtgatggaagctcacaaaggtcaagtggtagttatgcctgcaaatattcagcatcaagtaactgcaaaagaagatatgaagatgctattaatagtagtgaaagaggattaagcttatgaaatatttaagaaacatcaaaccatttgaaccaataaaaatgaaagatatgataagtcattcaggaaatacaatagcaagtaaggctttagtagataatgaaaaacatgaagttagattcttttcgtatgcaaaaggagaaagcatagataaggaatattatcaaatggagtcgttatttattgtaatagaaggggaagctaaagttgtttacaatgaaaatgacgaatcagtaataagcgaaggtgatatttttgcaatagaagctgatatacaatacggaatggaagcattaactgatgtaaagttattgaacatattaataaaagaataatttttataaaaagttataaattaagaaggcaaggctagattttagtcttgctttttatgtcttagatatgttttgaattaatattaaagattgatgcttattagcgagatgattttaagcaacatatgttatatttttgtgtgcacgtatgggcacgtgttataatcggtgaaagttcgcaatggggactgataatgtcaactattaactttaatggagatattccataatatatttaaagttagaatctaaaattattataataattgaacaagagacgttgtaaaataatacaaaatatatagaaactacccctgtgccgtgaaacacggtgcaggggtaattatttgaagaagtaaaaaacgaagccaatggttgagttaaatcatcttgctataacataacttcagcagcagatgaagagttctcgtttaaaaatgcatatgaatatttatgtaagccaattatgtaatttttactccacttcattatttccttttgcattagaggagtaaacaatgatgaaactcctggattttcaaatgaatatcttaactttcttatttccatattaagttttctgtgacacattttaagttcagaacagttgtattttgtttgggttatttcttcatcaaaattattatttgcataatattcaacagagtctaaagcttttaaaatttcattactatccttttccttttctaaagcataaagaagtttattaactcgattaaataattctttatgcttattgtcaatagcatcaaactccatagaaaaactagtattaaaattaaaattcataaaaacacacccctcataaattaatatttttatatttatttacctataatttaaaattctcaaaaaattaaatagttccttctttctgaagaatatattttaatttgaatttcaacaaaatacatcaatataagtcataaagtattcattgttatgattgaaatttgtatatttttgattgctatatgtatatcgtgtcaaagaatgtaataaatttaattggagtctattaaaaatatatattgtaattaagtttctaaatttgagtttaaatcgaacacctgatttgctaaagactttaagtaaaaaaatataattttatatttcagcacacagactgaaacttaataaaatttaaatgatttataattgtaatatatgttattatttagttataatgtcagaatattttaggagaaataaaaggctgtagcaatgctaaatttaggtgatttataaaatatttttaatagaaaggacaaggcaaaatgaatgaaatatttaggcaaataccattgtataggttcatcatgttctgtaatgaaacaactatggataaggtggttctagattgtggtgcaggagggaattgtccaccgttaagcttattttcagaatatgggtataaaacatatggaatagaatttgatattaatcaattaaaagaggctaatatgtatgcagatgaaaaaaatcaagatttaaatattgaacacggagatatgagatatttaaaatttggagatgaaacatttagctttgtttattcgtataattcggtatttcacatgagaaaagaagatgttttaaaatcaataaatgaaatgaaacgtgtattaaagcctagaggcttactttttgtgaattttcttacgataaaggattctcgttatggaacaggtttagctattggtgaaaatcaatatgagcaaatggagagaaacactcctgtaatacattcatattttgaggaatgtgagccagatacatattttgaagatatggaaatattgcataaagaaattagggtattagaaagaatggatgaaggtgaaaaaataagacaaggatttgttgattatattgttaagaaattatagatttagtggttactattaatttaatgatattcttaagaaaataaaagatgatggggagtttagttatgaaggattttgaaagtatacttaaatattataaggaagaattgaaatggaatccgccatttgctgatgcactttctaaatattcgccagatggcttaagtggatatttggcaatgcgtgaatcaattgaaaatggacatcttcctaaaaaaacaagagaattgatttttactatattggatagtttagatgatgaagtaagtggagcaaaggcacatgctgttgcagctgtagaagcaggtttaactatggaagaattagtagaagcatatgtaattgtaactattgttaagggaataaatgtactttgcaaaacaggaactcaggcaattaaagcagcggaggaaaggttagaagagataaagctagctaaaggagaggaataaaatgaagttttcaaatccaatgatagttgtttctaatatggagaaatcaaagaaattttattatgaagtacttgggttagaggttgttgttgactttggagcaaatgtaactttgaatggtggtattgcattacaaacaaaagatacttggttatcatttatatgcaaacagaatgatgaaattgcttttggtggaaatgcagcggaattatattttgaggaagatgattttgacagctttattcaaaagcttaacactctctcagatattaattatgtacatcctatgatagaacattcttgggggcagcgtgttgttagattttatgatcctgataagcatattatcgaagttggagaaaatatggtcatggtcgtaaaaagattcttaaatagtggtctatccatagaagaaacggctattaggatggatgtgccagttgattatatagagtcttgcttaaaatagatataaagatagcgatactacttatacagttaactacctctattttttagataaactaatatttcactaaagctaattaatactctagtaaagttaattaatatgacatgatgctgtcaagttttatgctgtattattatacaaaataggaggtgtagttatggagcaatatgaggataaagaaactttcataaatgaactaaaaaggacagcaacactttttataaaagaatttgatgatgtggcagaaagtgataagaatcttattatagaaggaatagatagaacccctgaagaaattatttcatatcaacttgggtggatgcagcagcttaaaagctgggaaagtgatgaattggctggaaaggaagtaataacaccagataaagattttaagtggaatcaactaggaaagttatatgaaagattttatgctaaatataatgactattcgttatcagagttaaaggaaatatatatttcaaatgtagaggatattattttatggataaaaggttttgatgaggatcagttatttaatccaggaggcagaaagtgggcagagtcaacaccatctaattggccagtttggaaatggattcatataaatactgttgcaccttttaaatcttttcgcagcaaaattcgaaagtggaaaaaacttcgtgcagcacaggtataatccattaagtaagtactgcatagtaattaataatagaatttatcattgaaatctgtatatttttaaataagtttaagtcgaatgatattcaagttttcttaatttaaatgtgaattagcctctattgtttgttataaaaggtaaacttataataaatttatcaaaaggtattttcaagtctaaatatcggaggtatagaattgaacgaattaaatataggggaaacaattttaaagttaaggaaagagagaaaattgactcaagaggaattagctcttatgattggaatttcagcaggagcagtaagtaagtgggaaaatggaaattcaatgcctgatatttcaatattagcacctctagccagagctttaaacacatctattgatacattattatcatttcataaagaactttctgaagaagaagttaataatataaaatcaaagctcacaaaactatttcttaatgaagggtatgcagctggtgagagagaatgtaaaaggtacctaagtgaatatccaaacagtatttgtttaaaagtcgaagttgcaagtttgcttaacacataccttatgatgtctgaggatgattcagaagagtttataaaagcaaaaagacaagaagctttagatttgtttaagaaggtagctgaaagtaaggatcctaaatatatgcaaatagctgtgtttttcattgctcatattaatatgattttgggaaattatgaagaaagcgaaagagcacttaatgaacttcccaaaagcttagatccagtaactctatacccagttattcttgaaaagcagggaaagaaagaagaaattcaaaaattttgcagcaataaattattgaattatctaaataatagtatccttatgctaattataatggcgaagacatcaaagaaagaaaaagattatgaaaaggcaatactttatttagatacatgccataagattcaggatatgtttcatattggattaggttcagctgcatataaatatgttgaattatatattgaaattggagataaagaagctgctgccaaatggtttaaaacatatattgaagaagttatttctatgggatatgactacagcagcaatccttattttaataaagttgaattagaaataaaacctgaagaacaaaaaataattagaaagaaaatgcttaaatcaattattgataatgaagaatttaaagtcttaagtggaatttcggagtacgaaatggctattaaagaaattgaaaaagccattcttagcagctttcaataggactatatttgatttttgtaagggattcacataagttcgattttcattgcttttcggaattaaaatatttatgatttcggcgagttatacgcataagtatagatcatagttgggttatctgtaatagagcatttttattagggggatttgagatgaattggcttggtatattaccaattttaatgggaataatccatttaatatattctatttggtgtaaagataaaattacttactacaataaaagatttgcaagaaaaacagaaatgacaattataaaaccaagagaattttttaggatgcagttaaaatttgtaatattaaattcagtgtatcttgctgtggctggaatagtaataattacttttaatatttctaatatttttgttatattatcaattggaggatttcattttataaatcttatattagtaatacaaagtaaaatgaaaggttatacctactatgaataatgcataattagcaagtatattaaaacgtaattataatgattacaatataagggtttacccttaataagcatgtgagaattcttgaggaggagaagttttgaaggtatcatttactattggtttaattattgcgatagttgcgtatatagcaggatttttaatgaatgattataatataacattaaaaatatctggtttcttaagtgctttttgtattgttatatgtggaattttaaatggttcctttattagtggcgataaatacctagctaattatctaagtgaaggaaaagatgagaggaataaaagaacaaaaatagtaaattatttattggtcatactaatacctaatattgttgtttgcataatagtgttgatgcttataagtttccgtcattaagatataaaattatgaataaataaattttgaaatataaaaaagacactatttctagtgccttttagtaaaaggtaacacttgaattaccaacgactatgattaaggaaccataatcaaatggctttaaagtgtgttcagtggattcggcttctaactttaccatttccttcatggaataatcagaatcaagtataaatataatagccttgccgctaggagaatcaattttaaccgtcataggagtacttattaataaatttgaatctcttgcattataaattccttgagaaagagttttaccagattgactataagcgctggttgttaatgatgtaactaatattaataagaaagcaaataatgctgtacgaaatctcttcattaaaaatcatccacctttcttaattaaacggtataattaattgatttattttattatgtgaaaagttaatatatatattcagaatagatatttatttaataaaacaaaaataagcccttgaaaataagggcttattctggtggttcacttttaatgaaattaaattactactatcttacgagagtagtatatgcgtttcataaaaaaatattcaaaactataatattgtaaataattgttaggttaaataaataataaaaaagagatagcagggtaatctaaaatgctatctctttaccatagttgaaagttaatacttcaatgataattatttgcataagttaaatgaaatattcaccaatattaaaattttttcatagagtggatttaataagttttatttattccccattaaagttaatattaaaatttaatgaattaatataatcctcgattttactttttgaattaagacttattttatatgaaacagtaaaaactttttctaaaaaggtataatatatctttacaa

SEQ ID NO: 22 - DNA, 73972 bp, Clostridium beijerinckii
tattaatattatatactatcaatttagggaggggtctgctttgaaatattttaattaagtatataatagattcaaagtgggataagatatgaagaaagaattaactccaaatgaaattattttttgtacttcgtgtacagataacattaaaaaaagtaatattaatagagtacccgaatttacatctactttaaatagaattaaaaagagcttgagtgttgaaaaagaaggatacaatatatattacgtagattcattttcaaaagagaaactagagaatttaatagagtgtgttgaaaatatatatgaaaaacttcctgcaccaaaagacatttgctatgtaacatcacaagaacaactaaatcctactgcattgtttttaccaaatggtaaaggaaatatattaaaagaaatgattgatgatataaaagagaaatactttgaatgcatagtagagttttatagtagttcttcagatgaggaaaaggaagatattattgaagaaataagtgaaaaaaggaataattatataacaaaacttatggattcagcaaaaaataagaattttgatgttaaagcaactagcggaggatttgtgtttattcctttgaaagatgaaggcaatgagatgactcaaaatgaatatgacagtctcgaaagtaacactcaagaaagtatcgaaaaacaagcatcaaaattaaaaaaagaagcagaagaaattctagagacattaaaagatattgaaataaaatcgattaagaaacttaaaagtatatacaaagattttataaaaaagaatatgcagagtcataaggatgatttattattacaatttatttcccaggatgatgtttataaatatcttcttcaaatgtatgatgatatagaagaaagagtagttgagtgttatactattaatttggaagatgatgaagattgtctaaaagatatattctctaattataatgtaaatgtaattgttgataattcgaccatagatcatccgagagttatctatgatgaagatcctactattggaaacttaattggtaccattgaatatagaaacaataacgggggatatagtacagatatatctttgatttctgctggtagtttgttaaaggctaatgaaggatgtcttatattaagattaagttcgttaataagtagtggtgtaagctactactatctaaagaaatcattaattcatggcaaaataaactataattatacgaagagctatttagaaatgatatctctcgcaggattaaagccagagtcaattcctattaatttgaaggttattttaataggagactatgagagttttcagatattatatgataatgatgaagattttaaacaaatattcccaattaggatagaagcggataccgaattaaaatataatgatattactaaaaattctattgaaggattaataaaagaaaagataaaaaaagataacttattgaatataacagatgatgctcttaaggaaatgattaaattccttgctagggtcgcaggtcaaagaaataaaatatctatagatgattattatataaataaattactgcatctatccaataataatgcaaaagaagataaaagaaaaaatatagaaaagcaagatataattgatgtagcatatgaagatgaaaagattttggaagatataatggataattataaaagtaaaaaaatattgataacagtaaacggaagaaaaacaggaataatcaatgggctttctgtagttggaaatggatcctatagttttggtaagcctatgaggataacatgcttatcaaatataggagatggaaggataatagatgttcataaagaatgcaaaatgagtggaaatatccatgaaaagtcgattggaatattgcgaggactattaagtaatttaataagtccttatgaaaaattgccagtagattttcaattaagttttgaacagacttatggaatgcttgagggagatagtgcttctgtggcagagataatatgtattctatcagctttaagtaagaggccaataagacaaaatattgctgtcactggatctataaatcagtttggagaaattcaggcaattggtggggccaatgaaaaaattgaaggattccatagagtttgcagcattattgataaaacagatggaaagggtgtcttaattccaagtacaaatgccgatgaattaatattaagatatgaagttgaagatgatgttagaaatggaaaatttcatatatataccatggaaactttagaggatgctattgaagtattaatacttgatgaaggagaatcagtaaaaagtttctttaaggaaatagaaaatgaaattttaaaatataagggtggaaaaaagaaaaagtaattattggcttatctaataagtcaaatctttaagttagatatctataagaaaataaaatagaggatgatcttatgatatatatttatatgagtatatcgagattatcttctattttttatgcattaaataaaagcaagagattcatttaatatttgataattatgtagtttaggtaattatcggtatctttattttatatatccttaatatatgtgatataggcggataattaagataatgagttataataaatagaaaaaaatgtaataaatagtttgacgttgaataaaatagtatgttaaaatatggtaaaagatgaaatgagggaaaagaggaggtgaacgtagaatatcttaaaacttaaatatataagtttaaaactacattgtgagatattcttaattaatatgtatttaaaatttgagaaacaaaaaaatattctaataactactcttagtggtgaactagatcataatagtgcagaggaagttagagtaaaaattgatgataggatagatagagataatatagaaaaagttattttaaatttttcaggagttacttttatggatagttcaggaattggagctgtcttgggtagatataaaaaactatcgaacaaaggggggatgctttgtattgcagaacctaataagaatgttaatagaatttttgaactggccggattgtacaagttaattaaaaattataatactgtagatgaagcagtaaggtgcatttagatggaggggttatcatgtctgacaataaaatgagcatagaatttgtaagcaaatctgaaaatgaagcttttgcaagagttgcagttgcagcttttgttgctcaattagatccaacaattgatgaaataaatgatgtaaaaacagcagtgtctgaggcagttactaattctataatacatggatatgaaaatagagaagatggattagttagaattgaagcagaaattaatgaagatcaagtaactatagcgattattgataaaggaattggaattgataacatagagcaagctatggagccattatatacatcaagacctgatttggaaagatctggtatgggattcactgtaatggagacatttatggatgcgttagaggttgacagtgaaaaaggtaatggtacaaaggtggtaattaagaagaaatttaacgtggtaagttaggtgaaataagatggaaaaagaggatttaaaacgagaggattataattatgataagaatcccaagctgttagctctagcaagaagtggcgatactgatgctatgaatacattaatagaaatgaatttgccattggtgtcatctataagtaagaaatttctaaataggggatatgattatgaagatatatttcaaataggatctattgggttagttaaagctattaataatttcgacttaaattataatgttaagttctctacttatgcagttcctatgattataggagaaataaagagatttttaagagatgatgggatgataaaggtaagtcgtaatgttaaaagccttgctagaaagatacattttcagaaagagattttaacaaaaaagctcaagagatcacctactatagaagagcttgcagattatgcaaatgttgataaggaggagattttatttgcaattgaatcttctaatagcttacaatatttatatgatacaatacatcaggatgatggagctccagttcttttaatagataaactaagtgagaaaagtgcagatgatgaaaatcttattgaaaagatagctcttaaagaagcattaaatagtttagataataaagctaagcagattataatgttacgttattttaaagataaaacacaagttcaagtagctaaaatgttaggtataagccaagtgcaggtatcgagaattgaaaagaaggttttagctgaaatgcggaaaaaattagaagaataaaatttgctaattacacattggtaagaaaaatgataaatataaaaaagagttattatagaatatgtatttgtataattttttattaaattagatcaaatatatattctattttttttataaaatatatgccaaaaaataacacgattaatcttaataattttgcaaatgatagatatacaggtaaaaaaggagagtgatcatcttgactaataataaagaagtaagtgaagaaagcataaagcaaaaatataatgatatggccaatgaagccattccaaaatcaaagatacttaaagattgcttaaaagcgtttttagttggaggattaatatgcgatgtaggtcaattgatttacaatattgcagcaggatttggaattgcagaagaacaaataatgaatatggttcctattataatggtatttttaggggctttgttaacaggtactggagtatatgctaaattagctaattttggtggagctggtactgttgttccgataactgggttttctaatgctgtagtttctccagcaatagagtttaaaaaagaaggatttatatttggagtcgcagccaaaatgtttacaattgcgggaccagtattggtatatggtattggtacatcagtaataataggaataatttattatataattgcaataatttagatcaaaaaaggaattggaattttaagatggggatatgtatttttttgataaataatcgagttgcttttaattcaaaaatgtagaggagtgattaatttgcaaatgaagaataaaaagataggaaatcaaactgtaaaattagataatccacccaaaataatatcgacgcattctatagtaggccctaaagaaggggaaggaccgctaagtgaatattttgatgatatattaaacgatgacatgttaggaaaggaaagttttgaaaaagccgaaagcgagatgatgtttacagctatatcgcaagctttaaaaaaagggaaccttaaagaaacagatatagattatttattttcaggagacctattaaaccaaattatttcatcaagctttgcagctagagaattcagtattccattctttggattatacggtgcttgttccactatgtcagaatctttgagtttagcgtcaataattatggacggaggatttgctaaatacgtggttgcagctacatcttcacattttagttcagccgaaaggcagttcagatttccgcttgaatatggatctcagagaccagccacagctcagtggacagtgactggatcaggagcattagttttaggacatgaggggaattatccggaaataacatatgtgacaacaggaaaagttaaagattatgggcaaaaagatgctaataatatgggagcagctatggcgccagcagcggcagatacaattgtaaatcattttaaggatacaggaagaaaaccggaagattatgatattatagctacaggagatttaggcgtaataggaagagaacttgctgataaattaattgaagactttggatataatattagaaatcaacatatagattgcggcgaaattatatttgataatgaaaagcagaatacattgtcaggtggaagtggttgtggatgttcagcagttgtttttacaggttatttatataaaagacttatgaaaaaggaaattaaaagagtattattagtttctacaggtgcacttatgagcactacgtcttctcttcaaggtgagacaattccaggaatagcacatgcagtcgctattgaaatgaattcaaattaagtaagaggaaacttataaataaacgagatgttagattataaaaatcttttgtttgaaaggaatgaaaagtgaatgaattatataagtgcattcatagttgggggcattatttgcgttataggtcaaatattaatagacgtcacaaaattaactccaggaagaatcttagtagtgtttgttgtgcttggagctatagtaggtgcttttggatggtatgataaattagtttctattggcggagcgggagctacagttccgttaccgagctttggaaatgcattagctaaagctgcaataaaagaggtagatgaaataggattattaggagcttttacaggtggaattaaaggagctgcagcagggattacagcatcaatattctttggatatcttatggcactaatctttaatccaaaaaccaaaaaataaataaatttaatatggaaaaataattgagcccaatgaagattattatagtagaaatgcttaaataaaattaacttttataaatatgtatcgaaaatatatataagatattaaagttttgccttttaatgtctttaaacgtataattatactataaatgaatgtatatatataaaaatgaaaaatatagtataataaagaagttattaatgaagtaattagaatggtggggtttttttggaaaaatactgcaataactcttgggctcaaatagttgaattactaaatagtaatgttcaaagtggacttagtgaaaatgattgtgaagcattaagattaaaatatgggaccaataagattgatttaccaagtggaaataaaatttataaacatatactaaatgctttaaagcaaaaatctataattataaatttgataattacaataattttattcgtatttgaacattatttatttggtataataacagccttgatattattattaaatttaattttaatagtaatgcatactataaaaagagataaagaaattggagctttagaaaggctgaattctgcagatacagtagttattagagatggagcccagaaaattataaaatctgaagaattagtaatgggcgatatagtaaaaattaataaagactctgttattccatcagatataagaataataagtgctaatgaaattaaagttgacgaaaagagtataacaggagaagcattttataaggagaaatttgaaagtaagatagtaggaaatatattttctttaacagatatgaaaaatatattgtttaaagggtctataataaaatcaggtagcggactaggtatagtaatatccactggtaattctactcagttaggtagaatgcttaccatgcttacgtatgcaagtaatagaaaacataattttgggacaatgatatctaaaattttagaaagatatttattaatttatttcctaggaattataattataggatcatattttgtatatacaggacaagatgcaaacaaaaattacatatgcacagctttatttgcccttggttgttttccagttactataatcgcgaaattagtttttaaaaatataattaaaagctttaggaatgaaaatatagaaataataaatttttcagtatttaatttaattaaagatgttaatattttatttttagataaagttggtgcaataagcaaaaaagaaatgatagtcaaaaaactatttattaacgataatttgatatcgactgaagatccgtatgtaaaagagacaacctttgataggatagttgaaatatcattagtatgtaataacgctatttataatccaagtgatgatagtggaaaaggagagttagatgagcttgcttttctaagttatgctgctagaaaaaaaatctacaaagctgctatagatagtaggaattctaaaattttagatatacctatggattctgataaaagattctctacagttgtaagtaaatttaataacagatatagagctaatactagaggaaacgtagatgatgttttagaacaatgtacacatgtcatgatagaaggtatcgagaaagagattacggatgaatacaaagcaaaaataaaggaagttgatatgaatttatctatagaagggttaataacagaaggttttgcgtatagaaactttacttatgaaccatctaaatctgaaaatatagaaagcaacatggtctttgttggaataattggattggaaaatccacttgaagagaatctcgaaaatacaataaatcgaattaaggataaagcaatagtaccaatattatttacagaagaaagtaaattaagtgctataacaaatgcaaaaatggctaatataataaagaataataatcaggtagtagcaggaatagaactggattctttaaatcatcaagaattaaaggatttgctttgtagggtaagggttttttgcagagtaaatccagaaattaaatcaaagattgtttcattatttataaaagatggccataaagttgcaactactggtgaaacgttaggcgatcttccagcactcaacttatcaaacgtaggaataggtaagggaaaagcatctacaattgtaaaaaaggtatcagatgtatatattaaagaaaattacctagatgggttctttaaaataagagatttttccagagtatttgatggcaatatagatagaggattcaaagtatatttcattgctctattctcagaacttctaactttagtaggaagtattataatgggacaaactggaagtttagaatttggaaatgtggtaacgataaatggagttttattcattccattatcattaataatattacttaaaaaagggcgagatattactagaaatgaaatgatagttagatcatttgttctaagcataattacaatggtttcaatttacaaacttggtgataaggaagcagcgatagtgacattaactatattatcaattggaattttattatttacattgtttaatagcaatatttctgtaagaaaattttctaacgaattgattatgcctgttatatcattgttagtaattattattgccgtaattagtatgattctaattaatggaatattaattagagatataataggaatagaaatagctgcatcgataatatttttattaatctttgaaattttagctagaaagtggcaaaactcattaatgaggtgagttgatgttttctaaaaaaataggagatgtaggaaatccactaatatacatatttttgacgcttgcaattagttgtattttctatggaatgaataaggaatttagggggcttacaatattcattgtagccttctttttcatatgcatattttattattgtggtttcagtttctttgttattatgattatcttttttgttgttggaattttaattaattgttcctattataaaattccaagcaaaatagacggcgaagtaaggataataaaaataagcaattatggtgttataggaagctatgaaggtaagagtattacgataagaactaatgataagaatttaagcgtaggtgaaaaatataaaattataggaaaagttgatggcatacaagatagatataatgggatagttggggaagtagagcctaaagtattgtataagattaatggagacttgataacaaagctttatgagattaaaagaaatatatatttgcggttagaagaaaatttaggaacaagaaaggcagggctaatatcatcaattgcttttggttattgcgattatttagattttgaagacaaagatgacatgaaaaactttggaatcatacatagcataagcgtttcagggttacatgtagctatagtatatggttttataagaatttttgttgggagaaatttaggaattttggtaattatgatatatgttgtatttacaggactcaattattctagtataaggtctttttttatgcttgcatgtgtagaaggtggacgtattttaaaaagaaataataattcaatttctgctctgtgtttctctgcaacatttttggttctttatgaaccttatagtatttttaatatatcttttcacttatcttatttagctactttgggaatagcaatgtttaataagaagtttaacaatacattatataaattgaacattaaattaagagaagcattaagtttaacattaagcgctcagatatttacgttaccatatctaattttaatttttagggatttttcagcaaattttattattggaaacttaattttggctccatttgtagatcttatggttattacaggaaatgcattggtattgacatatacttatactcaattatttgatttttgcagttatataaacttgaaaataataaatatgtttgattgtattctaaattatatggagaacttttcattgccaatgttttatggaaatgaaaatgtagttttcttctatctatttttaatgtttagtgcttactttgtgaataaaggatataaaaagtttgtttatcttcctcttatagctatttttataattacaattcagatatatagtccaattccaagtataaggtattataaagaaggtgctattttattttcttataaaggtgatagaatactaatgtccaataaaaatcaaattgatttaaatagactttctaaatcagcacttgcaacaaaatattttagacagagaagtatgattattatgaatggaatttataaaataagtttcaaaggaaaagattacgttctagatactggtactaaaaaatatctattaaaagttacaagtgataaaactcaacatgaagagtatgatataataaattttaatgataggatcactaataacatatttataatagacggaatattagtataggtttatagatttatattagaattaaattagaagcacattttatacgaaaggaaaattaaagtgattaattacgaagtttatgagcaagagattgaaaaaggaaatataaaaaatggatatatattttgtgggttagatgaagaatttattaaagatggaataagtctgattataaaaaagaatatagctgaagaatttatggatcttaatttaataaggatagatggaatgaatacaagttttgatgctatcatgaatgcgtgtgaaacaatgccattcatgggagaaaaaaaagttgtggttgtttataggtctaattttttacaggacaaaactgattcgtcaggaactaaaatatacaatgatattaagagctatatatcaaatttacctccatatacagtattaataatgtattatttattgaatgataagagagatagaccaaataaaaataagaaattagctactattggtaaatcattaacaatagtatattgtgataaattaaaaagggacaaatatttaaagaaagtatcggaagtatttaaagagaagggaaaacaaattggaagaactgagttatcttatttctgtgagaaagtctataataattttgacattataaaaagagaagctgacaagcttatatcgtattgtggtgaaagagagataaaaaaagaggatattgatatacttatttcaaaatcaagtgaggatgatacttttgatttagttgaattaatagctaccaaaaaaattgataaagctatagatactatgaaggaaattttatataaatcagaccagcatatgctgataataagtgctattcaaaagcatttcttgagattatatgagataaagataaaacttagcaatggaaaaaaagtagatgattttatgtcagactataggttgccgcagtttgtttgtgaaaaattaataatgcagacaaataaattcacagaaaagcagttatcagagttaattaagctttgcgttaatacagaaacaaagttaaaatcaactggaatagataagaatatggaaatggaattccttttaataaatacacttacagttaaaaaataatatttattaagaatataaaaaaataacccatctacttagatgggttttaagattatgccatagagtttaacttagcagctaatcttgatttctttctagcagccatatttttatgaacaactcccttagtagcagccatatctaatgacttaacaactgatgtaaataaagctttagcttcttcattattcttagcttctatagcagcttcaaatttctttatagtagtctttaaagcagacttaatcattctgttctttaaagtcttagtttcagtaactttaattctcttttttgctgattttatatttgccattcttaattcacccccttaaatttttatagggtctctgcagtttttggggaaatctgcgtacgagttcatattcaacaaaccttattatagcatcagaagttatgtaattcaagtattaaattcaaagaaaaaggaaaaataagactgagtaaatttataaagaggtgttggtatgataaatgtaagaacagatttagtacttgaagcgagagaaatttataaagaaagtcacaaggatgaagtagatatagatggaatagaagttatagaagaaagtgatgatgatattaaggtaactacagtaaaggtaaaaaatgatgaaggtgctaaaaaaattggaaagccaaagggaaattatataactataggaatgccagactttacagcatatgatggtgaaactatggatagagtttcacaagtagtatcagagattctgcaaagattaattaagattgatacagagaaaacagtattagttgtaggacttggaaattggcaagtgacaccagatgctttaggtcctaaagtgacagaaaagattatggtaactaggcatttacaaacagttatgccagaagcaattgatgagtctgtaagacctgtttgctctatagcgcctggagtgcttggagttacaggaatcgaaactgtggaaataattaaaggcgttgtagaaaaaattaaaccagacctagtgatatgtatagatgctctagctgcaagaagagttgaaagagtcaacacaacaattcaaattggagatactggaatatcgccgggtgcaggagtaggcaataatagaaaacaaataaatgaagaaaatttaggagttaaggttattgcagtaggtattccaacagttgtagatgcaacaacaattgctaatgatactatagactctgtaatagattcattaataaataattcatcaagtggaaatgaattttataaaatgttaaaatctcttgataaaaatgagaaggaaagactcattaaggaagtgatgtcatcaaaagcaagtatggatatgatagttacacctaaggacattgatttaatggttaattctttatcaagaataatagccaatgggataaacatggcagtccaacctaatatggatatggatgagattaataagtttatgggttgattattaataatttatttcttgaaatttagaatgagaagaaaagatctcaaagtaatttgaattattttgggatctttttattttagattgattatcaatgtatattttaatctattctaatttttaaatagatagaatgatatttattagaataattatgtaaatccgttaatataaatataaaaaagggcaagggggggattaccgtgatatatatgagcagaagaggaaaaaaaggtgaaattaataaaaggataaaagcaaaacctaacattaatataggcttaataatcctcattttaattataggtgtatttttcataagattaggtaatgttttaaaaaatagcaaggaaagaggagcatttgcctatgttcaattgttaaatctaggaatgccgataatagaatcccaagtttatgatgaaggaacctatgctgaaaataaactttcattaaagaatgtttgttttcaagtattaggattaaataatcttagctataaaggaataattcaaaatgaacttagtttctttggtgatggagaaagttctagcaatactgaaactaattttagttttaatccgtttcaaataagcgaagacagtatatcaaaagtacaagtaaacactgatagtaagaataccccaatatatgatcctagcttaaagaagacattggataaatctaagccagaagtattaatatatcatagtcatactacagaaaattataatgcatcagaaccagatagtttaaatgaagataccaatgtagtgggagtaggcgatgttcttgctaatgaattagaagagaattatgggatttcagtcatacatgataaaaccaataattgtatttcttataatgatagttatacaagatctggagaagtggttgataaatatttaaaacaatatggagattttaaaatggttatagatctgcatagagattccgtagaagataaagctgcgacaacaacagaagttgatggaatgagcgcatctaaaataatgtttgtaaatgctgaaaatagtacgagatatcctaaaaataaagagcttacagagaaagtatttaataaaacatctgaattattcccaggattacctataaaaatattaacatatcatagagggaaaaatgcatttaatcaaagtaaaagtgacggatgtttactttttgaaataggatctcatactaatacaccagatgagtcaaaagttacggcagaatgtatggctagagtaattgcggaagttttgaataagaaataagtataaagttaaatggaaaaggtttggaagttatattgagtgcatatgaaaaattagataacatgcaagtttgatttttagcactaagtatttaaatagatatttcaagttgagatttaaatataatcttgatggtgaaaattaaagaaaagattaggaatctaaagctagaatttagatctctagtcttttctttattttaatttattaatacataatattgagataattggtgagtagattgtttgactgagaaagttgagggtgaataatagtttgactatatggaaagaatctaaataaaaatcaaaaaataaattaaaaagggtgtttcgacattgaagaaaattattaaaagtaacattttaagaagaatatcaccaatgatttttatattatttattatttttattggaataattaaaatagatatgattaatactaaggcattatctcctcttgggaatactaatgaaaattataaacttgtaagcaatgaatttggagaagatttctcgaattttatcaaggataattcatttcttaaaatttataaagaatctgaaaaagatgttttagttaagataggaagtaatgattttaggataaataatcaatcttcttttattaaaaaaatagaggatataattgaaagaataaaaccataatattagttaaattatttagttgattttaaaatatatatagggcatattagacatagagcattgagggaaagttttgatagcctttctttatggatatatgttataatttagctgatttaattataacgggggtgaaaggactgtttttcgttaaggataacagttatgcgtatgaaaagtgaaagacaaaaacatatcagaaatttttcaattgtagcacatattgatcatggtaaatcaacccttgcggatagattacttgaaactacaggaaccttaactaaaagggaaatggaagagcaagttctagataatatggagatagaaaaagaaagaggaattacaataaagtctcaagcagcgaggcttgtatatagaagagacgatggtgaagaatacattcttaatttaattgacactccaggacatgtagattttaattatgaagtttcaagaagtttagcagcttgcgaaggagcgatattagttgttgatgcaacacaaggtattcaagcccaaactttagctaattgctatttagcattagataatgatttggaaattgcaccagtaataaataaagttgatctgccttctgcaagacccgatgaagttaagaaagaaattgaagatgtaataggaattccagcagaagaagctcctactatatctgctaaaacagggcttaatataggtgatgtattagagtgtgttgttaaaactataccttcacctgatggcgatgaagaagctcctttaaaagcattaatttttgattcttactacgatagttataaaggtgttgtatgtatagttagagtgatggacggaagagtaaagattggaactaaaattaaattgatggctactaataaagtttatgacgttactgaagtcggagtgtttactccaggagtgcttccaatcagtgagttaagtgctggtgatgttggatatgtaacagcatccataaagaatgttagagacgcaagagttggggatactataactgaagctaataggccaaccgaaacagcacttccaggttataaacctgctataccaatggtttattcaggaatatacccagttgacggagcaaagtatgatgaattacgagaagctcttgaaaagctacaaataaatgatgcggcattaagctttgagccagaaacatctattgctttaggttttggatttagatgtggattcttaggattattacatatggaaataattcaagaaagagttgaaagagaatttaatttagatataattactactgcaccatctgttatatataaagtaatcaaaactgatggagaaacattagaaataacaaatccaactaacctaccacctttgacagaagtggattatatggaggaaccagtagttaaggcatctataataaccccaaaagactatgttggagcagttatggagctgtgtcaagatagaagaggtatatacatagatatgcaatatatagaagaaaccagagctgttgtaaattatgatataccattgaacgaaattatatatgatttctttgatacattaaaatctagaactagaggatatgcatctttagactatgaatttaaaggatatattagaactaaattagttaagttagatatattattaaatggggatgtagttgatgcattatcaatgatagttccagaggagagagcttaccataaaggaagaggaatagctgaaaagctaaaagaaattatcccaagacaattatttgaaattccaattcaagcagcagtaggatctaaaattatagcaagggaaaccgtaaaagctatgagaaaagatgtattagctaaatgttatggtggagatatctcaagaaagaagaaactacttgaaaagcaaaaagaaggaaagaagagaatgagacaggttggttctgttgaagttccacaagaagcattcatggcggtattaaaggtagattagttagtataagtaatataaatatagaatactttatacatgtaaattatatttatttaaagagtaattctaaaaaactagcgaatgtataaaataaaaatatattatttttgaggaattatttgtataatattaattagtattatacaaataattattttaatgccggtttgggaggggtttgaatgtttttaaatgagttaaagaaaaatgaaggaattgcatttatgcaattggttaaaatccttgcaaattcagacaatgtttttgcgaaagaagaaaaaaatctttacaatgactatctagaagagctaaatataaatgaaagtgaaatatcagaatcagatctaaattctgtatgtgaaactctaaaaggttcgtctaatagatgcaaaaatattatttattttgaattaataggccttgctcttattgatggagaatataatgaagaagaagttgaacttttagaaaagctaggtgaagcgttgggtataacacgtagtaagagaatagcatttgctaattatttttacaattttgttgatgtgtatggtttctctgttgtagatgcagaaagtaaaattgccttattaaaagaacaggcagaaaaattattagtatagatagtttttgatatgaaaaaagtatgatgtatattatctaaaaataaataataaagaatgaatgataaaagcgagaatatctattgaaatttaaattaaaggtgtacacaccttataggtttaaatgaagggtaaatgctcctctagttattcattctttatttttgctttattttatcaagtaaaatatttaataatgtattggaggaaaaattaatgagggatatatctttatatatacatattcctttttgtaaacagaaatgtttttattgtgattttccatcttattcaggaaaagaaggattaatgaacgaatatatagaagcgttaagtaatgaaatattacaaaaaggaaaagaatacagaataagtagcatatttattggaggaggaacgccatcctacttgaatgacttaagtctagaaaaactactacgtactttaaataaattgaatttgaaggatgattttgagtttacagtggagtgtaatccaggtacattaaatgaaaaaaatctaaatattatgaaggaacacaatgttaataggattagcatgggattacaatcaacaaaaaactctttattaaaagatattggaagaatacatagctatgaagaatttgaagaaaattattttcttgctagaaagctaggatttaataatataaatgcagacttgatgtttggattgcctaatcaaactattgaagattgggaatgttctttgcgaaaagtagcagaacttgaactagatcacatatctgcatatagcttgattatagaagaaggaactcggttttataaattatatgaagaagataagttgaatttacctgaagaggataaagaacgaattatgtatttgacaactaaagacatattgaacgggtatggatatcatcaatatgaaatatctaattattcaaagaaaggcaaagagtgctttcataataaagtttattggaaatgtgatgaatacttagggatgggggtgtctgctagttcatttatagataaaaaaagaagtaaaaatatggacaatattaaggaatatattaaaagaataaataataaagaaagtgtaattgaagaaattcacgtaaatgatattaaagatgatatggaagaatttttatttatggggcttaggatgattgaagggataaaagtagagaaatttaaagagcgatttaataaagatatatatgaagtgtatggagaaatcattgaaaaaaatattaaaaaaggattattaattaataattcgggaaatctatatctaacttcgcatggcatagaaatatcaaactatgtaatgagtgatttcattttatcttaatggattctcttatgaaaagtttaaagaaagattaagcgcaattataaaaatatattacatataaaaatggagaaaataggagatataaagagctaagttaacaaaattgctttattattaacgttaggtagctataataaatataaatagaattgacaaaaaacatcataaataatatattaaaaacatagtcattagcactcgaggttaatgagtgctaacaaaaagaggtgaggttatgagtattgatgacagaaaaataagaatacttcaagctattatcaatgactatattcgaacaggagatcctgtaggatcaagaactattgctaaaaactataacttaggtattgggtccgcaacaataaggaatgagatggctgaccttgaagatatgggatacttagaacaacctcatgcttctgcaggaagaattccttctagtaagggatatagattatatgttgatcagcttatggataatcagatgctaacagttgaagaagatctaaggataaaacaatatataatcgattcggcaatgcttgaagtagataaaatagttaagcaaactagcgccttattgtcagaacttactaaattaacttgtgtaattgagacaccatcagtaaaaaggagctttataaagtcaattcagctgattaaagttgatgatcataatttagtatcagtttttttaacagatactggtgtcataaagaatcatataatgaagctaaataatagggttcctgaagttgaaactttaacacgaataaatgaagttataaataatagattggtgaatctttctatacaagaaattaatttagaagtaattaataacttaaaaaaggatctaggagcctatgaagaaatattcaatgctttattgcctattttatatgagactctaaactcggcggattctacagaagtattcatggagggaactaccaacatatttaattatcctgaatataacgatattgataaagctaaagaaatgctatcgcttttgaatgataaagaagctttgatggagctgtttaatcctcaagacaatataacagtcagtataggggatgaaaactacaagccacaagctagagattgtagtataatatctgctgaatattcctttaaggataggcctattgggaaaattggattaattggacctagaaggattaattactcaaaggtaataatgattatgtcagaagttataaaagagcttaataatatattgagcaatccaaaatagatgttagatttaaagagaagaggtgtgtgttagatacatggaagaaaatagagatgttaaaaatgaagaactagagaaagaagaaattgcagatgaagtagcagaaaaggataatgagacccaagaaagtaatgatgcagcagaaacaaatgaagctagcaaagaggcttcagaaaatatagaagctgctgaggaagatcaagaagatttagtaaaaaatcaagaagaggaaaataagaaattgagagaagaattagatgcgacaaaagatagacttttaagattaacagctgaatatgataactatagaaaaagaacagctaaagaaaaagaaggaatatatagcgatgcatatgtagatgtattaaaagagattgttcctattcttgacaatttagaaagagctgttgcagctgatggtagtattgaagacttgaaaaaaggaattgaaatgacaataaagggatgcaaagattcatttgcaaaacttggtgttgaagaaatagatgctactggagaatttgatcctaatcttcataatgcagtaatgcatatagaagatgaagaattaggtaaaaatgtagtagcagaagttttccaaaagggatataagaaagatgataagataataagacatactatggttaaagttgctaattagaaataggaacaagtttcttattaagatatataaatagaattcaaaaataataaactgaaaaattcaagtttaaataaactaataaagttttaggaggaaaatatcatgggaaagattataggaattgatttaggaactacaaattcatgtgtagcagttatggaaggtggagaaccaacagttatagcaaactcagaaggtgctagaactactccttcagtagtatcattccaagcaaatggagaaagattagttggtcaagtagctaaaagacaagcgattactaatccagataaaacagttatttcaataaagagacatatgggaactggatataaagttgatatagatggaaaacaatattcaccacaagaaatttctgctatggttttacaaaaaataaaagcagatgcggaaagctatttaggtgaaacagtaactcaagcagttattactgtaccagcttactttaatgatagccaaagacaagcaactaaggatgcaggtaagattgcaggccttgaagtattaagaataatcaacgaaccaacagcagcatcattagcttatggtttagataaaacagattcagctcacaaaatcctagtttatgacttaggtggtggtactttcgatgtatctattctagatcttggagatggagtgtttgaagtattatcaactaacggtgatacaaagcttggtggagacgattttgatgagaagataatgaaatatattgcagatgagtttaaagcttcaaatggaattgacttaatgcaagataaaatggcagttcaaagattaaaagaagcttctgaaaaagctaaaattgaattatcagcatctcaacaaacaaatataaatttaccatttatcactgctgatgcaacaggtccaaagcatatagatttaacattaagcagagctaagtttaatgaaattactcatgacctagttgaaagaagtattgaacctatgagaaaggcattagctgatgctaaactttcattaaatgatatagataaaataatcttagttggtggatcaacaagaattccagcagtagtagaagctgttaagaactttacaggaaaagaaccatctaagggagttaacccagatgaatgtgttgcagttggtgcagctattcaagcaggtgtattaactggtgaagttaaagacgtggtattacttgatgttactccattaacacttggaattgaaacagcaggtggtatagctactccattaatcgaaagaaatacaactattccaacaaagaagagtcaagtattctcaactgctgcagataaccaaacatcagttgaaattaatgtagttcaaggtgaaagacaaatggctatggataacaagtcacttggacaattcacattatcaggtatagctccagcaccaagaggaattcctcaaatcgaagttacatttgatatagatgctaacggtattgttaaagtatctgcattagataaaggaactggtaaagaagcaaatatcacaattactgcttcaactaacttaagtgatgatgaagtagataaagctgtaaaagaagcagaaaaatttgctgaagaagataagaagagaaaagaaaaagttgaagctgtaaataacgcagaccaaactatatatcaaatagaaaagactttaaatgaagttggagataaagctactgaggatgaaaaggcagcagtaagagctaaaattgaagatcttaagaaagttaaagatggagatgatgtagaagctactaaagctgcaatcgaagcagtaaatcaatcattctatccaatagctacaaagatgtatcaacaagctggtggagcagaaggagcagctgatccaaatgcagcagctggaggagctcaaagtgcaccacatgatgataatgtagtagatgctgatttcaaagtagatgaagataaataagatataaattaggtgtactaaactacagttatctaatataataggatagggaaggcaagctcgtcttcccttttctacagtaaataaaactaggtggtgaatttaaacgaatggcaaataaagactattatgaattgcttggtcttcaaaagggtgcaagtgatgatgaaataaaaagagcctttagaaaattagctgtaaaatatcatccggatagaaatcaaggaaatgctgaggcagaagaaaagtttaaagaaataaatgaagcttatcaagtactttcggatccagaaaagaaagctaaatatgatcagttcggatcagctgcttttgatggtagtggcggattcggaggaggaggctttggtggctttgacggatttgatatgggcggatttggagatatttttgaatcattctttggaggcggaggatcaaattctagaagaagaaatggtccagtaagaggaaatgatattgagtatacaataacattaactttcgaagaagctgtttttggagtagagaaagaaatttctgttactagaaatgaaaactgtgaacattgtcatggaagtggagccgaacctggaactaatgctaagacttgcccaacttgtagtggatcaggtcaagtaagagttcaaagacaaactcctcttggaagttttgtatcaacttctacatgtgatacttgtagaggtactggtaaaattattgaaaagccatgttcagagtgtagaggaaaaggcagtgttagaaaaacaagaaagataaaagttaacataccagcaggtgtagatacaggaaatgtaatgcctttaagaggacaaggagaacatgggttaagaggtggaagtcctggagatttgtatgtaagaattaatgttactccatcaaaggtgtttacaagaaaaggaaacgatgtttatatagatgctcatatttctatgcctaaagcagcattaggtacagaaataactgtagctacagttgatggaaatgttaaatatactgttccaccaggtacacaatcaggaactatgtttagattaaaaggcaaaggaatacaaagagttaactcaaacggaaaaggagatcaatacgtaaaagttattgttgatattcctaaaaccttaaataaggaacaaaaggaagctttatatgattttatgagagcatctggtgaagagtttgatgaagctaatgttcctaagaaaaaattatttggaaaaaataaatagaattatatctgagaaactatttgaataatgtctatcaattagcattatttcaatagtttcttttttaaataaaaattccccgacaaaacctatagttatagtcatattttaaattataggttataatatattaaaataattatatttaggaggagaaaaagtgaaggaattgaaggaaaaattattaattgaaatagaagagtttagagaattaggaaataaatttttatctggtgaagtatctattatggattttaaaaaagtttctgggggaatgggggtatactcagaacgtaataaaaaagaattcatgataagactaagaattccttcaggaattagtagctttgagaacatgaattggttatgtgatatagctgataaatataatttagataaatttcatttaactacaagagaagcagtgcagtatcataatttaacgatagatcaagtttgtggaataatgaaggatggtatagataatgatatatattctagaggaggcggcggaaactttccaagaaatgtagctatgtctccactatcaggtgtagataaagatgaagcgtttgatgtgacaccatatgcattaactgtaaataaacattttttaagcaaaataacatcatataaatttccaagaaagtttaaagtatctttttcaagcagcgactcagatcaggggcattgtaatgtagctgatttagggttcttagcaacaattaaagataatgaaaagtattttagagtttttatgggaggcggaattggaagaaatcctcaagttgcagtcgaatatgatgagcttataaaaccaagtgatgtattataccacgtagaagccatgactagtttatttataaaagaaggtaactatgaagatagaaataaagctcgtataagatatatattagagagaatgggcaaagagaaattcatagaaacatataaagaacatttaaaatatgtgttagataataatgcgttagatttatttgtagaatctaaggaaattactaaagaaggtaaagaaattgaattaaaacattcaagattatattcacaaaagcaaaaaggattatacagcgtatatttccatccaattggcggacaaatttctgttaagacattaagagaaattttagataaattaaaagtagtaaaagacttagaaataagacttactatgacagaaggtttatattttagaaacttaaatggtgatgaagctaaagaaattttagatttaacacaaaatattggaggagaaacagctcttcagcaaagtgtatcatgtattggagtgccaatatgtcaagttggaattttagagagtcaaaaaatgcttaacaatataattaattactttgcagaaaagggttataataaagatatacttccaagagttcatatatcaggatgtggaaattcatgtgcagttcatgaagtcgttggtatcgggcttacaggaaaacgtaaaaaagttgaagatgtatttgaattacatattaacggatcatttgaaacaggaagtgcaaggctcggaaaagtttatggtgatttacttgccagtgaaataccagagtttttatatgaattatcattatatatagagaataaaaatatgaatttttatgagtttgtagaaaataacgaggaagaactattaaaaataatagagaaatataaaaaataagtcataagataaagtagttaaaatagtacattctcttaagtatgaggtgtgctatttttttatatttaataatgatagggtgttaagtattaaattggatgattttttagataaacaacttgagggggggagaattcttaattagtattaagaaagtataaaaatactttgagataaaagattcagtacagatatttgagttatttgcaatacctgtatatttttgagataaaaattgcaatataaatttttataggtataattattatgaaggatacggccgattaatagaacaataagacggtatgagcgtcttgtttatatggtattgtgtcgataagttcaatttaatgatctaaaaaacttaattgcagtgaaatgctattttttaaaagcttataaaagatggagtgaactaacatgagaatgagaaaaaaaccgtgggcaagacctgagcttgaaggttgcgatttttttgttataaatccgaaagaatataaaggtaagtggaaagaatttttcggtaatgataaaccaatatatctagaacttggatgtgggaagggaacttttatggcagttcatgcctccgagaatccagatataaattatattgcaattgacataaaggatgaggtattaggattagcaaaaagaaatattgaaaaggcttatgaagaaaaaaataggaagactgataatgtaaaattaatggctcaagagatagggcttatcagtgaaatcttaagtgaagaagatgttgtaagtagaatatacataaatttttgcaatccgtggccaaaggaaaagcataaaaagagaagattaacacatatgaggcagcttgaacagtataaaacatttttaaagagtgaaggtgaaatttattttaaaactgacgatgatgaattatttgaggaatcgcttgaatattttaatgaagcagggtttagaattaaatatataacatatgatcttcacaatagtgatgttgaaggaaatgttcagactgagcatgaaaaaatgtttagtgaacaaggaataaaaataaaatttttgattgccatgaaagacaattagatttataatgaccagaatttaagaatttaagaatttaagaatttaagaatttaagaatttaagaatttaagaatttaagaatttaagaatttaagaatttaagaatttaagaatttaagaatttaagaatttaagaatttacccgattcacatgtgtttgatgagtaagttcgaggaaccaaatacaagatttgaagcatcacttttggactctcacttaagaatttaaacatatgaaaagatacgcacctataaaaaaagtgcgaagcacaattaagatcagttcacctataaaaaaagtgcgaagcacaattaagaagtttaatattttaaaatttaaatattaaactagatatcaataaaaatatttttaaatatataaatttaactagatatatatgtaagtagttaaatagaaatctatataaatagttaactatgtaaatatatatcaatgttaaatataaataaagataaatatgtaaatatttatagttattgtaagggttacaatgactttaaaaaaataaaattatatagttagcaaagagcaattgtaggaaaaaattctatggaatttaaaaatatttttaataaattttgaaaaaaatgtattcctaaattgcaaactgttactgaaactgaattagaaaggttgataaacatggatggaatatggattgaagttagtgtaataacaaagagcgaggcgttagagcctatatcaggaatattttatggattaaattgccctaatgttgcaatagaagatccggaggatttactttcaagagatcaaggaccattaacttgggattttgcagatataaatatcttagaacataaaggaaatgcagctgtagttaaagcttatttttctcaagatgataaggttgaagagattgttgaatatgttaaggaaaaactttctgaaattaaagaatttggaatagatattggtgaaggtacagtagaagctaagaagatgcacgaagaggactgggctaataattggaagcaatattataaaccagttaaaataacagataagattgttgttaaaccaatttgggaagaatatgaaaaaaatgatgaagaactaattatagagttggatccaggaatggcatttggaactggaactcatgaaactacaagaatgtgtattcaagctttagataaatatgtaaagcctgatacaacagtatttgacgtaggatgtggatcaggaatacttgccattgctgctgcaaagcttggagctaaacatgttgttggtgttgacctagatcctgttgctgttgattcatcaaaagagaatattggttttaataatttagataacattgaagtattagaaggaaatcttttagatgtagttgatggaaaagccgacatagtagttgcaaatataatagcagaaatcatttgtgtactaactgaggatgttaaaaaggctctaaatgaaggtggattatttataacttcaggtataattcatgatagggtagatatggttacagaaaagtttgctgaatgtggttttgaagttattgaaatcaataaagatggagaatggaactgtatagttgctaaagcaattaattagtataaatatagatatttgtaatgcaaattttggttaacggtttgaaaatgtaattatgaaaataatgcacaatgtacaattcacaatgcgcagtttaggagaaatttctaagagatttttttgaaaatctatagttgatataccgtaatcaattattatttaattgtgcattgagtattgtgaactgtgaattagagaggagtcgtatgcataagttttttacagaacctcataatattagtgaaactgaaggtagaatacttggagatgatgtaaaacatatttataaggttttaagattatctgaaggtgaagaagtagtattaaacaattgcgaaggaattgagtatctaggtgagatagaaactataactaaaagtgaagttatagttaaaattattaaaagattagatataaataatgaaagtaaagttaaagtacatctgtttcagggactaccaaaaggtcagaaaatggacctgatagtacaaaagggaacagaacttggagtatctgagtttattcctgtaacaactgcaagagtagatgtaaaacttaaaggcgaatttaaaaagcttgatagactaaatagaattgctcttgaggcatgcaaacaatcaaaaagaagtgtaattcctcaagttaaagaagttatagatttcaatgaggcaataaatgaattaaaaaagatggatttgattattgtaccttatgaaaatgccgaagattttggaattaaaactcttgtgagaaaattagaaagagataatgtggatttagatactataaataatgttggaatattgatagggcctgagggcggatttgaggaatctgaaattgatgatttaaaagaacagggtgcttatatagtgactcttggaaatagaatattacgtacagagacggctggatttacagctacggcattaattcaatatgaattaggagatttaggaggaaagctatcataatgggagagaaccaaatgaaattagtcagagcaggtagtgacaagactaagcttaagaagttatctaacaaagaaccaataaaaaatacagaggggaagagtcttgtggcttttgcaactcttggatgcagggtaaatcattatgaaacagaggctatggcggaaaagttcataagagaaggttatgaagtaactgactttgaaggttttgctgatgtttatgttataaatacttgttctgtaactaatatgagtgataaaaaatcaaggcaaataattagcagagctagaagaagaaatgaaaatgcaataattgcagctgttggatgctattcgcaagttgcgccagaagaagtttctaaaatacaaggggtagatgttgtacttgggactagaaataaaggcgatattgtttattatgtgaataaggctaaggatgagcaaaaacctcagttaatggttggagaagttctaaagaataaacagtttgaagaattaaatatagaagagtatcaagataaaacaagagcatttttaaagatacaagatggttgtaatagattttgtgcatattgtctcataccttataccagaggaacaacttgctcaaaagaccctcaaaaagtattggatgaaataaagaatttaagtgaacatggatttaaagaaataatattatcaggaatacatacagcatcttatggtgttgatttagatggaaatgtaactttaataactttattagaagaaatagagaaactggatggaattgaaagagttaggataggttctatagagcctagtttctttacagatgaagttatcgagaaaatgaaaaaaatgaaaaaactatgtccacaatttcatttatcacttcaaagcggctgtgatgcaactttaaaaagaatgaatagaagatatactgctaaagaatacgaagatgcagttaatagaataagagaaaaccttaaagatgcctcaataactactgatgtaatcgtaggtttcccaggtgaaactgataaggaatttaacgaaacttatgaatacttaaagagaattaaattaactaaaacacatatattcaaattcagcccaagaaaaggtacgaaggcttcagatatgcctaatcaaatagatggaaatgtaaaggacaagagaagtaaggctttaattgaactaaatgcaaagaatgaaggcgactttagtaaatctttagttggaagagaactagatgtattagttgagcaagaagtatctaataagcctggggtatttgaggggtatacaagaaattatgtaaaagttgaaattccaaatggaagcagagacatgataggaaaaataattttatgtaaaataatggcctcagatgcggaatatgttgttggaaaaattatatagttttggtataatataaatcaagataagattgattaaggatcatttttggaataagatatataattcaaagagaatttctaaatatgaattataaaatctcgattcttacgtttgtgaattgagattgttacttagaaggaggtgaatttatggaaggttgtatattttgcaaaattataagtggggatatccctagtaaaaaaatatatgaagatgataaagtttatgctttttatgacataaatcctgaagctccaactcatttcttagttattccaaaagaacatatcgaaagtgctaatactttagatgacagcaatattgatattgtatcacatatatttaaagttattggtaaattagtagtagatcttggaatatcagataaaggatatagggttgtaaataattgtggtgaggatgcaggacagacagtaaaacatattcatttccatgtacttggagggcgaagtttacagtggccaccaggctaaatttgagttgttatttgatcaatagtaactggagattttttcttaatttcttgacattattaatttaaatattgtataatatagcatgtgttattaagcccatagctgagttaatttaagctagcggagggagggatagtaaatgtcagaaattaaagttggagaaaacgaaacacttgaaagtgcgttaagaagatttaagagaaaatgtgctagagctggggttctttctgaagttaggaagagagaacattatgaaaagccaagcgttaagaaaaagaagaaatcagaagctgctagaaagagaaagttcaaataatgatattttcttttgaaagaaggtacaaaaatgtcatcaattaaagatagattgcaagatgattggaaaattgctttaaaagcaaaagataagttcacatctagtgtaattagtacagctaaagctgcagtattattggttgaaaaaactgataatagaaagcttgaagatgatgaagttattacaatattagctaaagaaatcaagcaaagaagagaagctatgcttgaatttgaaaaggggaataggcaagatttaatagatcagtctaaggctgagattgaaattttgttgaaataccttcctcagcagttaagtgaagaagagataaaacaattagtaaaagaatcagctgaagaagtgggtgcaaatagcattaaagatatgggaaaagttatgtcagctgttaaacctaaagtagtaggaaaagctgatggtaaacttgtaagtcagcttgttaaggaatatttaaataataaataagaataaaattcaagattgttttgagttttatactaatataacaggacataggattataaagagtatcctatgtcctgtttcattgttatctaaaattggactagcaatgaaaggataatatttggttcatataactagaatacattatcgtaaatgaattagataaagccataatagtaatgattggctttatttttttgcaggaaattatcattattattaaattatagaattaattcgcaaatcctatcataaattacaatgagaaagtttatgtgggaggaaagcatggaagaaaaatttcaaagaggtaaagaaaagatacttagcaagttagattttccaagtgacatttcattagatctaccaaagataatagtcgtgggaaacagagaaataactattgaaaatcataagggcattatatttttcgaaactaatatggttaaaataaattccagaataggtgcaatcataattgaggggaaagagttcgaaatactttttattgcagaaacgagtataacaataagcggaatctttaaaggtatttcatatgagaggtagaatattatgtttagcagcttgaaatcgggacaagtaaccatagaaattaatgctttagtgccagaaaaaatattaaatgccttttggaatagccaaatctatacctgtaatatagtgaaagtaagcttgacaacggtaagagtaactatatattacagagattataaagatgcagaaatattaataaaaaaatataaaggaaaagttaagatagtaagaactagtggaataatagttttacttatgaaaatgagaagaaagatttctctagttataggaatgggattattttttgctgtgatatatatattatcaaattatatatgggctatagatatagagacacagaggaatttaagtccatttgaagttagacaacagctctcatcaattggaatcaaaccagggcttagcaaatcacaagttaatgtatatcaaatagaaaaaaagatggaagatttaaatagccagataatgtggattagggttaggatagaggggtctacattaaaattggttataaaggaaaaagtaaatcctccgtctacagaaaaaacattatataatcaagttattgctaaaatggatggagaagtaaagagagtatatacaaattcagggaatccagcagttgtgccaggagatatagtaaagaaaggtgacgatctaatattgcctatacaaggaagggaaggctttcagatggaagtaaaacctagcggaacagttatagcaaatactttttatgataaatttatggagattcaagtaagtggagaaaagcttgagagaactggtaacaaaaatagtgatatatacttaaatttttttggaaaaaaagtttacttgaaaaaagctataaatcaatttgaatattatgataaaatagaagagaaggatggtttctttaataagataacatatttcgaaaaaaaaggtataaatgtaaacttagataaagaaagtacagttaaagaagctacagaaaagttagaggggtcattgagaaaaacacttagcaacgatgcaaagataatagataagaaaactgcagtagaagatattgaaggcggaaagatattaattaatgttaaatttactgtagaacaggatattgctaaaaacgtatcataaggggtattcaaagttgtttttatgcctattacttattattaagatgaaaaggtgaattacatggatataaaacaaaataataaatggaaaaataatagaattcaaagaattttattatttatacttgtatttagtataggctatttattgcttgttaccgcaataactcctaagcaatatagcttaaaagaaggagatataccaagagtagatataaaagctccaagagatatagtggatgaaaaagctacaaaggaaaaagaagatcaagcggccgaaaaggtagggaaacagtatacatcaaagccagaagttaagaaagaagctgaggataatgtaagggcattgttcgataaacttgtatcattaagcaatatggcgagctctaccgtagctgataagcaaactgagcttaagaaattaactatatttcaattaacagatgaacaatgtaaggcgttgataggaatatcaaaagatactttgccgggcatagaagacaaaatagtaaatataattgacagtgcatatgaaaaaaatatacaggaaaaagatgaaggtgccttaaaagaagcaaaaggagctgtttcaactcaaatagataatttaaacttagataaagatgtatcaagtgctttaaagcaaatagctcaaacacaaataaaccctaatgttttttttgatgaagaaaaaacacaagaaaagatacaggaagtcaagaagaatgtatctaaagtaataataaaacaaaatcagattatagttaaagaaggagagcctgtaacacaagatcaaattgatattctatcagatcttggaatgcttaacgatgaaaatgtaacagcttatatatatatttatttagcgcttgcaatattttggatgataatattgtttcttcaatatggatatgtgagaataaattatggtgaaatatataagaacaataaaaagcttattcttataagtacaattaatttgatttcacttgtgttagctagaactgtaggggttatatcgccttttctaattccatttgcgtgcgcgcctatgatgcttacgctattactaaattataagatatcatttgtacttagcgctttaaatgcaatagttataggagcattaaatggttttgatgttcagattattattctaggaatagtaagttcggtattaggagcggcatttttgaaaaagatgcaacaaagaaatgaattgctatattcaacattgtatactgctgttgttaccgtaatacttacattgtctacgggaatattaatatcgagcaatttcggagatgtgttagtaaaaggtggaatcacattcattggaggccttttatcaggtatatttgcattaggaatattaccgtttttagaaggtacatttaatgaggttactacattaaagctgctagaattatcaaatcctaatacaccactgttaaaaaaattattaatggaagctccaggaacatatcatcatagtatgcttgttgcaaatctctcagaaatggcagcagaagaagttggtgctaattcggtaattacaaggataggatcatattatcatgatattggaaaaacagagaggccatatttctttggagagaatcaaatggggatagataatccacatgagaatatacctccaaatttaagtgctatgataataaaatctcatgttaaagatggtctggagttagctaaaaaatataagcttcctaaggttatccaagatattatattagagcatcatggtaaaacattagtaaagtatttttactatactatgaaaaatagtgctgaaaatccagaggaaataaaagaagaagattatagatatgaaggcccaataccaagctcaaaagaagctgggatagtaatgctatctgatagtgttgaagcggctgtaagatcaattaagaaacctactaaggatgcaattaaccaaatggttaattgcattatagatgataaattatcatcaggacaattaaatgattgtgatttaacattaaaagatatagaaaaaataagagtatgttttttgacttcgttaaatagcatataccatcaaagaatagaataccctaaagaaaaaatgaaggatttcaatggtgaaagcaataaaggtgaatttaaaactaaggagtaatttaaataatgatttatgtagataatagacaaaataaagtggaagcaagtgaaaaattaatagaaagattaacagaagtaatagaatttgcattaaaagaagaggaagtaaatatgaaatgtgaaatttcattattgttcgttgataataatgaaataaaggaaattaataatgaaacaagaggaataaatagagaaacagatgtattatcttttcctatgttagaatacgaagataagaaagtatttaaggatatgtataaagattataagttttctcaatctgattttgatggtgacgaacttgtacttggggatatagttctttcattagaaaaagcattagaacagagtaaagaatttaatcattcatatgaaagggaagcctcatacttagttgtacattcagtattgcatctattgggatacgatcatatggaggatgatgataaaataattatgagaagtagagaagaagatattttaaataaacttaacataatcagagggtaatattttttattatgtaatagaagtaggggtaaataatgaaaatgaaaaaaacactggaaagcttcaataatgccataactgggattatcgatactgtaagaactgaacgaaatatgaaaatccatttaatagtggcgttagtagtactaattgcaagctttttctttgacataacaaaatatgagtttctgatattagctgttacaataactatggtaatagctgctgaacttataaatacagccatagaggcgactatagatatgacaactaattattaccaccctttggctaaaatcgctaagaatgcggcggcaggtgcggtattaataacagccataaatgcattattagttggttatattatattttgggataggctcagtagattttcattttctttaattaataaagtaaagaattcagagccatatacgatattgattgttctagtaatagtatgtatagtaactataatagcgaaagcaatatttggagaaggaactccgttaaaagggggaatgcccagtggccacagtgctttgggattttcaatagcaactgcaatatcattaataacggaggaaccaatttgcattctattgagttttttattggcgtttataactgcacaaagtagagtggattcagaagttcatagtattttagaggtaatagttggagctatatttggtatattattaactttgtttatttttacattatttaggctttaattaaatatagaataataaaaataatatttataggagaagatataagatgaaataaaacttatattgtctcctatttcttaaattataagaattaatgatttaattcataaggaaacaattggaagtgattattaaattattatatgatcaaattaagaatagtagattgtcaatttacttataaatagagtatactatttgtaaaataggataacgttagttaagcttttttaagcttattttgaggaggaaaaaatgtttaaatcaggatttgttacaatagttggaagacctaatgtaggaaaatcgactttattaaattatataatgggggaaaagttatcaatagtttctaataaacctcagacaacaagaaataacatacaaacaatattgacaggtgatgattatcaaatgatatttgttgatacaccaggtatacataaacctaaacataagttaggagaatacatggtaaattcggcaaaagaatctactaaagatgttgatttagtattattcttaacaaatccagatgaggagattggaaagggcgataaatttatattagaaaccttaagggataaaaagtgtcctgtatttttagttttaaataaggttgatgaaagtacacaagatagagtggcaaaaagtttagaaatgtattcaaaagaatttaaatttgcagagatagtacctatttctgcaataaaagggaaaaacgttgatgtattagtagaacttatgaagaaagcaatgccagaaggacctaaatattatccagatgacatgataacagatgttcaagaaaagtttgtagtatcagaaataattagagaaaaagctttaagaaccttgagagatgaagtgcctcatggtatagcagtagatataattcaaatgaaacaaaatgaaataggtacatatcatatagaagtagatttaatctgtgaaaaagattcccataaaggaataataattggaaagaatggtcaaacacttaaaagaataggcgaaaattcaagatatgaattagaaagatttttaagatccaaggttaatctaaaaatatgggtgaaagttagaaaagaatggagagataatcagcttttattaaaagaattaggatataaagcgaattcaaagaaatagagtatcaattagaaatagataattagcctaacatattatttttttatatattccaagtgggagatggttgacctgtcaatagttgaaacaaaagctgtaattataaaaacgcaagattttaaagagaatgacaaactagtttggttttatactgagaagttaggtaaaattacagctatagttagaggcgctaaaaaaagtaaaagtaagttcttagcattgacattgccattatgttatggagaatatatggtatataaaggtaagagcttgtacactcttcaagaaggaaaaataattcaatcttttcaaggtcttttaaatgatttacataagcttacatattcctcatacttatgcgaattaatagatattgcttgtactgataatgaaattaatatggaactttttaagacattgattacaacattatacctactgaatacagatgccctagattacgaactactaataagagcatttgaattaagattattaaaaacaactggatataatctaacattgaataattgtagcgtatgtagaaaaaagatatcttcatctaattatataagtttatcccactatggaggtatatgtgatgaatgtcccaaagaacatggagtatttatttcaaaaggtgcatataatgccttgaggtttttgatgaatatggatatagataaattatatagactaaatttaaatcatgaaataaaaagtgagattgaaaaagtaattacttttttagtatcgaatagctatgctaaaaagcctaaaagtttggagatgttaaaatttattaaggagtgatgatttatggaaaatataacattagaaaaagttgatatgatacgtgagagaacaggagtaagctatgaaaaggcaaaggaagctttagaagtatgcgaaggagacgtattagaggctttaatatacattgaaaagtctcaaaagttatcagatattaatgatgaatttgttgatgaggaagtaaatagggctcctatatctatagaggaactaagggttttgattaaacaaataatagaaaagggaaatgttactaggataaaggttaagaaagatgataaggaacttgtagatattccagttaatgcaggaattgcagcaggagttgtagctattatagttccaccaatacttgcagcaggagttattgcggcaatagcgactcaaattacaatagagataactatggaagatggatctgtggaagttgtaaacacgtatgtttcagaaatggcaagcaatgttaaaaataaagctactgattttgctgataaaattaagactaaggttaatgaaatgaagaatgacataggtaaacatagtgatgattcaaaacaaaaagtatatactggttcagatactgtatatacctatacagttaattttgatgaagataaagaaaattcagaaaattaagtgatattgagagtaatataaagaaaaatagatatatcagtgatataaaattaatatacaagaaatatttagcgaatttatttgatttttctgaaaattaagtctagtcaaacaataattacatgatataattagagagtagtaaaaattaatgaatttgaactaaatatttcttgtatttacagaaagagggataagattgaaattatcacctaggcaagaagaaatagtatgcttagtaaaagaaaatgcacctataactagtgaagctcttgcagaaaaaattggagttactagagctgcgctcagggctgatttggcagtactgactatgataggaactttggatgctagaccgaaggtaggatatgtatatacaggaaaaacatctaatggattgatttattcaaacattaacaaaattaaagtatccgaaataatgtcaaaacctgtgactgtcagtgaagatacgatggtatatgatgcaatcgtatacctatttctgaatgatgtagggacattatttatagaaaataatggggtgcttacaggtgcagtctctagaaaggactttctcaaaatttcaataggggggactgatatacatagagttcccgttggagtaattatgacaagaatgccaaatataatttgtgcgaataagaatgacaacgcatatgatttggctaagaaaattattgaacatgagatcgatagtattccggttgttgaaataatagaaaagtctgatggaaaagatcagatgaagataatcggaaaggtttctaagactaacataacaaaattatttgttaaaattggagaaaatgaggattaattaattaagggtaactacgaagtctttaagcatatgaaataaaaaataagtctatgatgcgatatatatttcttgttagacaaggaagtctgtttatctcatagtggactattaggtaaacagaacgacgaagtataacaagaaatagattagcatgctgatttattttttgttgaatatgcttaggataggcatcgatagtaaatatagtgagaaataataagaaaagagggagtattgagatgtcaaataagtatgtatatctttttagtgaaggaaatgcttcaatgaaaaatctacttggaggaaaaggcgctaacttagcagaaatgactagtctaggaattccagtgccagatggttttattgttacaacagaatcttgtaataaatattatgaagatggtagaaagatttctgatgaaataataggtcaaatctatgaaagtttatcaaagcttgaagaatctacaggtaagaaatttggagataatacaaatcctttactagtttcagtaagatctggtgcaagagtttcaatgccgggtatgatggatactatcttaaacttaggattaaatgatatagctgtagaagcaatggcagaattgaccaataatccaagatttgcatatgattcttacagaagattcattcaaatgttctctgatgttgttatgggaatagaaaagagattattcgaaaataagattgatgaacttaaggagaagaaaggtgttgaatttgatacagatttaacagcagatgatttaaaagaattagttagtgaattcaaagaaatctacaaaaaagaaaagggtgaggaattcccaagtgatcctaaagctcaattaatagaagcaattacagccgtatttagatcatgggataatccaagagctatagtatatagaagattaaatgatattccaggtgaatggggtacagctgtaaatgtgcaacaaatggtatttggtaataagggagaaacatcaggaacaggagttgcattctcaagaaaccctgcaaatggtgacaatgctatatatggtgaatatctaatgaatgcacaaggtgaagatgttgttgctggtattagaactccacttgaaattggaaaattaaaagaacaaaatccagaaatatatgcacaatttgaaggaattgttaacacactagaagatcactataaagatatgcaagacatggagtttactatagaagaaggtaaattatatttcttacaaactagaaatggtaagagaacagctcaagctgctttaaagattgctgttgatttagtagaagaaggaatgctaagcaaggaagaagcaattttaaaagttgaaccaaaacaattagatacattattacaccctgctttttatactgaagatttaaagaaagctacaccaattgcaaaaggattacctgcatctcctggagctgcatgtggtaagatagcatttactgctgatgaagctaaagatagagcagcacttggagaagatgttgtacttgtaagacttgaaacttcaccagaagatatagagggaatgatagcagcacaaggtatccttacagtaagagggggaatgacttctcatgctgcggttgttgcaagaggaatgggaacttgttgtgtagctggatgtggaactataaaagttgatgaagtaaagagaactgtagaagttaacggaaaagtttatacatctgaagactacatttcaattgacggtacttcaggaaatgtatatggagaaaaaataaaaacagttacaccagaaatttcaggacattttgcgacattcatgggatgggctgatgaaataagaaaattgaaagttagagctaatgcagatagtccaagagatgcaaaacaagctgttgagtttggagcagaaggcataggtctttgcagaacagagcatatgttctttgcagaagatagaattatggctgtaagacaaatgattacatctaaagatttagaacaaagaaaagtagctttagataagattttgccaatgcaaaaatcagatttcataggaatttatgaagcattagaaggaaaagcagttacaataagattattagatccaccgctacatgaattcttgccaactgtggattcagatataaaagaattagcaagagaaatgggaataacttatgaggaattaaaatctactgtttcagaattacatgagtttaatcctatgatgggtcatagaggatgccgtcttgcagtttcttaccctgaaattgctgaaatgcaagcaagagctattatagaggcagcaatagaagttaaaacaactaaaggctacgatattgtacctgaaataatgattccattagttggagaaattaaagaattaaaatatgttaaagatgtaattgtatcaacagttaaagctgttatggaagaaaaaggagtaactttagattataaggttggaactatgattgaaattccaagagcagcattaacagctgatgaaatagcaaaagaagcagaattcttctcatttggtacaaatgacttaactcaaatgacatttggattctcaagagatgatgcagctaagttcttatctgcttattatgaaaagaagatttatgaacaagatccatttggtaaattagatcaaacaggagttggttctctaattaaaatagcagtagaaaaaggaaaatctactcgttcagatatccatttaggaatctgtggagagcatggtggagatccttcatcaattgaattctgccataatataggacttaactatgtatcttgttcaccatttagagttccactagcaagacttgcagcagcacaagcgcaagtaaaaaatccaagataactttaaaaaattaaagattatgataaagtagcatataaatcttagtaaaagaagatttaaagtgaaaaaatatagagcattgtaatttgaaatcacatgtgattttaattacaatgctcttttattatcgtacttttaagctgttattatgaaattatttagaatgcaggctgcctaatattttacaatatagacagcctgatgcagttagtttttataaaatcatgaagagaagattggctcaacctaataaaagatggtgctttacagaaacaatttcaaagtaaagtcatattgaattttttttgtacttgatttattatatctagcgcaaaatcatattgaagatttgtttttgatgtcgcgtttattattaaagttaagaaagcagatttattacacttgtgaatattcctatagtagtctcttgatatcctccaatatttttgcggaaagcaaatataagaaattaagtaacgtaaatctgagtgtgttaaaggacacaattcattataggcatctaatatagagagagctaactcaacattccattttgtgttttctcgtttaagtaatcttcgcataaaatatgctagatcttttgcactgtaatctactttgcacttatcaaaatctatcacccaaggatctagatcaggaggaaaaattaggtttttgtttacatagtcaccatggcataaagatttacttaattcattattgtcaattttatttgatatgtctagagagagtttagcaaggcgtaaatttatatcaaaacttgaaataaattgtcttgaaaatgaatctttgtatttaaacgattcatttgatgctttaagtaaatcttcaaaatgttttaaggtagatatgtaataatcctcaaatccttcttttgctgaacttcctaaaataggtctaaatttacgagatactgaatgaatctcagagagttttcttacagagattaaaacatgatccaaattatcgaaattacatttctcaccctcaatccaaggagttaatataaaaagcatatctcgataagatacaaatctattattatcaattgtaggtaaaagttttgagaccctaatattatttctatatagccactcaatagctgaatatacatatagcaagtcattcaaattataataaactttttttagacagtaatttttatctttataatttaccctataaactgctctttgcttatcagtatctttaaatttaattattgaaatctgagagttttgtaaattatagtatggtaaaacattttgttttataatttctggggaaagattagattcttgtaaagataaaacttcagtacccataaatacgctcctttataaggtgatttttattgaacttttatgatacaaggtaaactttgattgaaagttatacctttaagtaaaattaacatgtttttaaattttaattaagatatagaaatatatatatataggtaagatttctatataaaaaaattcctaattattaaataatattaatttaatcttagtattagactaaaaataataaaaaataaaaattaatgaatataaagatattattttttagttatttgcaaataataaatatagttaataaatagaggaatataatgatatagatagaatacataaaaagaggtgataatatatgaatgtaagagaaaaaattcaaaattttgaaagcttgacattaattaaagaagctgctttttcaaaaaattctattggcagaaaaattagagaagaagatgatgatattagaacttgttatatgcttgatagagatagaattattcaaagcaaatcattcaggcgcctcaagcataaaacacaagtatatataaaaacatttggagatcattatagaactagattaactcatacattagaggtatctcaagttgcaagaaatattggagctggaatcggattaaatgaaaatttaattgaagctatagcgttagggcatgatcttgggcatgttgcttttgcacacaatggagaagaagtgctaaatgagtacttggaagatggattccgtcataatgaacaaagcgttagagttgttactaaacttgaaaataacgggcagggacttaatctaacggaagaagtaattaatggaatattaaatcatagtgggcttggaagcgttaaagatataattacattagaaggaatagtggtgaaatttagcgataaaatggcgtacttgaatcatgacattgatgattctataagagcaggtttattaagcaaagaagagattccaagagaaattgttaaagtatttggagatacttcaaacgaaagattaaatgtcttaattaaagattttataaaaaaatcaaatgataatcttaataatggggtaaaggaaattgggttaagtccagaaataagtgaagcaatgactgaacttagacaatttatgtttaaaaatatatatttaggggatacattaaaggttgaaagaaataaggcgaaatttgttttaaatcaattaattaaacattttgaggaaaatccttatgagatgccagatatttatgtgagcatagctaaaaacgaaggcttgaaacgaggagttgctgattatgtggcgggaatgagtgatgattattgcttatcactatttaataaaatatttatccctaagtttgtaatagattaattatatatgagattcatgtcttagaaagtttaaaactataatgaatttaataatattctcaatgaataaagatttgcaataaaaaaagaggattttaaattaataaaaagaattactttaatatatagtattattcaataaatattattttataactggtgaaactttaaattaaaaaaaaattaatagttttctaattattttagaaggaaaactcgttattatgtcgaataatatataattgccaaaaaaagcagaggaaggagatgtctccttgcaaatatcagaagaagttcttgaaaggataaaagaacaaaatgacattgttgatattatttcagaggatgtaaggctaaaaaaatcaggtagaaattttatgggattatgtccattccataatgataaatctccatcatttagtgtttcaagtgaaaaacagatatacaaatgtttttcatgtggagaagcaggaaatgtgcttacgtttgttatgaaatataaaaaactcacttttgtagaagctgcaaagtatctagcagataaagctaatattccgctacagataaatgataatgaaaatagcgcagtttctagaaagaaagaagttttatataaagtaaatgttgaaacagctagatattattttgctaatttacaaagaattaaaatggcaaaagagtattttttgaagagagggataaaagaagaaaccataaagagatttgggttaggctactctcaagatagttggcatggattaacaaactacttaagaacaaaaggatataaagataatctattacttgaagctggattgatttcaaaaagtgagaaatcagggaatgtttatgataaatttagaaatagagtaatgtttcccgtgtttgatgtaagaggaaaagttattggatttggaggtagggttttagatgattcaaaaccaaaatatttaaattcaccagagaccatgatttttcaaaaagggataaatctttatggattaaattttgcaattaagaataagctaaaagaggattacatcattatagttgaaggatatatggatttaatatcacttcaccaatctggtataacaaatgttgtagcatcacttggaactgcacttacagtaaaccaagcaaggcttcttaaaaggtatgttaataaggtaataatttcttatgatgctgatttggctggacagactgctaccttaagaggtctagaaattttaagaggtgctggatttgatgtaaaagtattgatagtaccagatggaaaagatccagatgagtttgtgaggaatcatggaaaggagtcatttctgaagttggcaaatgaagcgcttcctttaattgaatatagaattaagaaagcagctgaaggcataaatctaaatagtggaaatgatctagtagaatatggagaaaaatttgcagaaattctagcagatctaaatcctatagaaaaagatgtatatataaggaaaatttcagaagaaacagcaattaaagaacaggcattatatgacttactttcacaagtaataacaaaaaaacaaaaagaagacaattttgtgaataaaaaggaatattttggaacaaaattatatgtagaacccgcatacttaaaggctgaaagagcattattaaaattgatgttcaaagatgaattttatgatgagattaaaagctccataaaatcaggagattttgtaatagaatcacataataaaatttattcattaatattaaaaggcaaaagtgaggatactaatgatataggtaatatagaatcctatgtagaaagtagatgtgacgatatagaaagttctaaagagttgaccaaaataagggaacatgagattttagagtttactgatagagagcgattaataaaagattatttaaaagaggtaagaagctttaaacttaagctgcaaattgaggatttaaagaaaaagcaaaatagattcgaaaaagaggggaaaattgaagaatctataaagattgcaatagagcttactaaattatctgaagcacttaaaaagggagagagaggttgaaggttatgacggaaggaggcaataataagatggaacaaaaagcgaatggaaaagtaacaaagccaaaagacgataaaaaagataaaaatgctaaaatggcggctgtgaaggaattaattgacaagggtaaaaagaatggttcactaacatataaagaaatcatggaagctatggatcatattgatttgagcccagagcaaatagaaaaaatatatgaagttttggaaatgacaggtgttgaaataataggtgaaattgcggatacagaaactgaagaagaaattgatttatcggtcccagaaggtatagctatagatgatccagttcgaatgtatttgaaagaaattggaaaagtgcctttattgtcttctgaacaggaaataacttatgcgaaagaaattgaagaaggaaaccaaaaggctaagaaaaaattagctgaagcgaatttaagattagttgtaagtatagctaaaagatatgttggaagaggtatgttattcttggatttaattcaagaaggaaatttaggtcttattaaagctgttgaaaaatttgattacagaaaaggatataaattttcgacttatgctacatggtggattaggcaagcaataacaagagcaattgcagatcaagctagaacaataagaatacctgttcatatggtagaaactataaataagcttattagagtacaaagacaattgctccaagaattaggtagagatccattcccagaagaaatctcgaaggttatggaacttccagtggataaggttcgcgaaattcaaaaaatcgcacaagaaccagtttcgttagaaactccaataggtgaagaggaagactctcatttaggagactttattccagatgatgaagcaccagcaccagctgaagcagcagcatttacaatgcttaaggaacaattaatcaatgtcttagatacattaactcctagagaagaaaaagtattaagattaagatttggacttgatgacggaagagccagaacacttgaagaagtaggaaaagagttcaatgttactagagaaagaattagacaaattgaagcaaaagctttaagaaaattaagacatccgtcaagaagcaagaaattaaaagattatctagattagtatctaaaagcacctaaaattaggtgcttctttttaaataaggaattaccaaactttaaaactagatttgtgtagtgacttaccgaaatcataaatattttgattcagaaaagctaagaacttttaagagtttattttcaaatattttcttcatattatgacccttgaggttacaaatatatttatgatttctagtgaagatatgaacttaaggttttagcaactttgtaaatacattcatctaataagtcgaatccttaaattggatatctaaaatttataagtaagacaaaaagaggtaaatatggaattaagtaaaagactaaaatggattatagaaaaaattaataaagtggaagtaataatggatgttggaacagaccatggatatataccaatatatttagttaaacatgatatagctaaaaaagttattgcatcagatattaataaggatccactgaaaaaagctaaaattaatgcagcacttgatggagtgttagacaaggtagatttaagattaggaagtggtttagctgtattaaaaaataaagaagctcaatctgtaataattgcaggaatgggtggtaatttaattagagatatattagaaaatgatttggataaggtgaaaaaattagaatatttagtgcttcaaccagcacaaaatccagaagtattaagagaatatttatatactagcgattatgaaatattagaagaggatatttgtttggatgaagacaagtattatgagatatttaaagttaagtataaaaagggtgattatataaaattagataatatattttatgaaataagtccatttatattaaataaaaaattaccattatttaaatcatatatagaaagcaaaattgaaaaaaatgaaaaagtaatggattttattaaagataatactgaacatgcaatttcaagaagaaatgagttaatagaaaaaaatgagaagttaaagaaactactaaaaagtttttaggcggtgagattatggtccaagtaaaagatataggaagagaaatagaaagagttgcgccaaagtttttaatggagtcttatgataatgttggtctaacggttggagatgaagagaagactataaacaaggttttattatctttagattgcacaaatgaagtaattgaggaggcagtagatttaagatgtgagttaataataactcatcacccactgctattcaaaagacctaagagtatagttaaaggagatttattggggaacaagttgataaatctaatcaaagaggatatagcattatactcttgccataccaatttagatagtgctaaaggtggaattaacgaaactatagttagaatgctaggatttgagtcacaagaaattattgaacctaatgaatctaataattataaagatggcggaattggaagactggttaaattagacgaagaaataatgttgaatgatcttatagaaattattaaaaaaaatttaaatataaaaaatatgaggattgttaggggaaaaaataaagcaaggacaatagctataattaatggcagtgggcaagatttcttttataaagcaaaagatcttggtgcagactgtataataacaggggatacaacatatcattttgcatcggatttcaaagaattaggtataagcataatagatgcaggtcatttctcaacagaataccttgtgttcttaaaaacattggattttttaaggggaaaatttaaagatgtagagttcatcgcttcaaaaaaaagtgaagatccttatgagtttgtttgataaattaatatttagtaaaactttatattaaggctataactgcactaaattatttaaatgttaagttctaatgcatataattaattgaaaaagagtttactaaaaaaatgaataggtgcatatactaatagtgtaataataattgtgcggtgaattatggggaaagatcatgattttaataataaaaatagtgaagatttaaaagatgacttgaaaaatttctttaaacatagtaagaaaacagtacgaaatttttttaggggaggaagcagaagaagtaaatatggtggatggaatggtagatttccaccattttttcctagcaagaatcctcttttatttttactttatcctaaattaattgttggtggacttatattattaacgcttctattctgtggcgtaagtttatatggaataatagtaatactattattaacaataatattttttttaatataactataatttagaaatgttgtgtaaaaaatatatttgcatcttaaaaagatatatgttaatatagattttgcgagtgagacgtgcaatcgctgctagacttgatctaggagaggaaagtccgagctccatagggcagggtgctggataacgtccagtcaaggcgacttgaaggaaagtgcaacagagatataccgcctaagtttacttaggtaagggtggaaaggtgatggtaagagctcaccagcgtgatggagacttcacggctatgtaaaccccacttggagcaagaccgaatagagaggcaattaaaggggctgcccgtcccgcctctgggtgcgtcgcttgagcttactggcaacagtaggcctagatagatgattgcttaatacagaactcggcttatggcttatctcgcattagtaaaataggcagttgagagaatggaaggataacttcttccgacattcttccgacggctatttttttatgtttattttagatggaaatagtaaatttgagagcttttcagtagctgatttctgcatttcattagtaacatgagaatatatatttaaagtcgtactaatatctgaatgtcctaatctggtttgaataattttaaaatcaatgccttcttgtaaaagtaaagtggcatttgaatgacgcaaatcatgaaaacgaacttttttattaagtcctgatttttctactagtcttctaaattttaatgtgtagtaattaggatgtatatattggccagatttccaagtaaaaataaaatcatactctctattattaaatttattttttatataattttcaccgtactctagtttgttgaggttttgaatttttttatgagattttagtaagtctagaagttcatttgaaatagatatacttcgctcactctcaatggttttaggggttcctatttcaactgatgtattagtatatataagattattagttatatttacaatattgcttgcaaaatcaatgttactccattctagcccagctacttcaccacgcctaagcccgagttccatagttactattaggcaaagcttgaaagcataatctgcatattcatttggatctaagcttgataatagcaaattaaattcatcaatgcttaaagtatttgagatgaatttatttcttttaggtttttcaataaatttacatatattatcattaataatctgtagtcttacagctctgttcaatgaattatttattacaccataaattccctctaaagtagtattgcttaagcctttctttttttcagcacttaaaagcttttctattagtataggtttaagatctttaagaagatattgccaaatataaggttttatcttatgttcataaatagatttatatctttcataagtattaatttttctattttccttaatgtagtcttcaagccaatcagtaacataagcatcatatgtaagtttttttggctctacaaatccattggcgtatttgtacattgcttcatttaatgcctctaatgcttccttttttgttttacctccacatcgttcgattctttttcgtttcccatcaatagaaggtaattcaaatgaatagtaccatctactacctttctttctaacgcttccttccatgttttaacacctccacgttagctattgtttcaaaacttgcattatttatactatagagttcttcatctttttcttgtattaaattttctttttcatctatatcccttttataaacaatatcattatcaagttttatttttaaaatatactcccatggcattaaaatttcccctctcaatggcgaacgtatgttccatggtaaattatagcacctatgaaaattcatttcaatatctttaaacaaattttttaaaattcaaaagaaaattatactatttaacaaattaaggtcaaaaacagtacaaaacacaaacaaaaaactatagataaaaatctatagtctatttcaattcattatttacttttagagttttcaattaatttttttacatctaatcctacagcatctaattgtctaataatattttcaacatcttcagcagttaactcatgagaatatcctttatcaatttctatttctatagtttgattatgtagctttccagagtagatctttgcacatcgatcatcagtcctacctaaaagataatctatactacaatcaaaataatcagcaattttaattaagacatcatctttgggaaatctatttcccttttcccaattagttattgttgcgggttcaacgttcattattttagcaaagtctttgcttaataattccttttcttcacgaagctcttttagcctatcagggaatttactcataatatcaccaccatatatattataaacgatttgctaattaataaacacttaattaacaaaatgaaaataaaatttataaaagttgcaataaatatattgaaattatcataacgttaatttataataaaattaaattagcaatatgttaatttggaatatataattagcataatgataattggagagggtttcctgttatcatttaggcaatttaaaaggagaagtgaaaatgtatagtaaattaaaaggtcttatggtagaaaaagatattactcagcaagaattagccaaaatattagagatatcagttagcacactaaattttaaaataaatggtagatctgattttagtgtaaaagaggctaaattggtttcaagtttctttggaaaaacagtagaagaaatatttattattgatgaagtcaaaaaaatgaaatctggtagatatgcttaacagaactgaaaaatgtgaaaatttaggcttaggtgtgatttataaatcaagtgaagcgcgatgggcagcgccaaatgaagtaatccgatggctgacatccataatgcggcctcttattaaagtaggagctgatggaatcacgcttctggatataatgtcccctgagggtaaattatgctccttgagagtatactatctccattgtgaggataagcttagataaattcagatggagacaaaattcaacatgaaaagtttcactttataaaggattggttatgggaatgagaatagggggatgggaatggagccagttttatatactgtatctgaagctgcagaattattaaaagttaataggaattctgtatatgatctattaaagaaaaatgtaataagaggattaaagcttggaagtttaaaaataactaggattgaattaatgaagtttttagaagaaaacaatggaaaggatttatctaacttagaagacattaaagatttaacttttgatagggaggaatagtcatttaagtatctatccaagataatagaatgaattcatttccgtgcatataactaacaattttagaaagaagggatttagattgattagaaaatttgaaggattaacagccaatgatttaatagaaatattaaagaattatccaagggatacaaaagtatgtactcaaatgcttggagagaatttcccggttaaacaagttgaagagtgtatttattatgactttgaaaagggtaaaagaggagaggaacatgcgggagttctagtaaaataagacaccattaaatcagggagaaaagtgaatttaaaaatcttcaaatgttatatctatgtatgtaattcaattggaataagtccatcttgggatggacttgaaaggtttagaaaattttatttatgggagtgtggaaatgatggcagatattaaatggattaaactagctactggtatgccggatgatgaaaaaatgagattaatagatgcattgccagagagagatacggttcactatttatggataagattacttatacaagctgccaagactaattctgatggtgagatatttttatcagaggatataccatatactgataaaatgctgtctgtattattttctagaccgttagcatctataaagcttgcactgaaaacattatctcgtcttgggatgatagagatatctcttgataagataattagaattgtaaactgggacaagcatcagaacattgaaggaatggaaagagttcgtgaacaaaatagaaaaagggctgagaatcatagagaaaaaaagaaactagaacagaaagctactaaaagcaataatgaagaagtttatgagaatgaagtcacagaagaagataaagatttaaatgaaaatcaggcattagaaaataatgaagaagcgtctactaattctattggtgataataacactaataatttcactgataatgctggcagtaataacactgtagaaacagctgatagcaattttgaggttactaaaaatacatgtaacgttatgcaaaatgaaagtaacgttactgtaacggaacagaataagaaagagatagagaacaagaaaaagaataagaaagagaagagagagatacagactaagagaaaaaatagtatttgtgaaataaataataaaagctcaacttgtgaggaagaagaaagtcagtcaaatccttttgagaattacaatactaaaactgaaacagtagtagaagaggagataaatactaaagctttagagcttatgagatatcatgaaaaaataacaggaaaagttggtggatgcgattatgtttcacttagatcagctattaatattcatggagataagcgggttaagatggcaatggatataggttttgaaaaaaattgcccagaaataaagtatgcaattggtatattaaaaaattggagaagagacgggtatcccaaagatgatatggagggtaagataaatggggttagaagcactggaaagaataactcagcagataaaaatgaattcgcaggattcaagccaaaggaacctcgaaaacttacagaagagcagagaaagagagcggaagcaaacctcatataattgcgagaaatgcttagatacggggtggattcttatttcacaagaaaataggcagccattagccttagcatgtgaatgtaggaaaatagaaaagattaaaagtgaatggaagtattcgggaattaatgttgagcaaagcaaacttacttttactaattttgaaatttggaataaggcttcacaaagagcaaaggaaactgctatagcttattatcaggaattccatgaaattaaagatagtagaaagaatagcattttattttgtgggcaagttggcagcggtaaaagccactgcagtattgcgcttgcattaaatttcttgaagcaaagaattaaagtggtgtacatgccttatcgtgatgtaatcacaaagataaaacaaaatatgattgatcaagaatactatagcagagttatttcaaagtatcaattatgtgaggtattgcttattgatgacctattcaaaggaaaaattaacgacagtgatattaacataatttttgagattatcaactatagatatttgaattttttgcctatcatagtgagcagtgaattttccattgatagacttcttgcctttgatgaaggggtagggtcacgtatatatgagatgtcaaaagattatgtcgtagaaattgagaaagatgtcaagaataactacaggcttaaataaggtaatgcttttaagtaaaggaattatgcattttaataaatcaaaaataagagtatgagagggagtaattttaaatgaaagaatcaggaatagtaagaaaagttgatccacttggaaggattgtaataccaaaagaaataagaagggttttaggaattaatgacggagattctttggaaataattaaggttaataatgatgtagttgttaggaaatatagtaaaggatgcattttttgcggaagtagtgatgatatcttagaatttagagatgtagtagtttgtaataaatgtaaaaaagatttgggacaagaataaaagagaatgcattatcaagaagtatataaaatctaagaggagattagcaaaatgagaggtttgagaattttcaaagatgaaagatttggggaaataagatgggtgaagattaataataaagattatgctgttggaattgatatagcaaaagcattgggatataagaagcctaacgatgcaatttcaagacattgcagggggtccgtgaaacacggagtaggggtagttactggaaagagaaaagatggaacagatattatccagaatgtagaaatgaatgtcattcctgaaggtgatatttttcgcctagctgcaaaatctgaattaccaggtgcagagaaatttgaagcatggatttttgatgaggtattaccaagtatacgaaaaacaggaatgtatgctacagatgaattattggataatccagatttactgattgcagcagccacaaaattaaaagaagaaagaaaagctaggatagaagctgaaaagaaattaaaatcactagaaccaaaagcacaattctatgatgatgttgcaggatccaaggatagcatagaaatgggacatgttgcaaaagttcttggaattagaggaatgggacgaaatagtctattttcattgttaagagataaaaaagtattagataaaaacaatataccttatcagcaatttgtagatagtgggtattttagagtactagagcaaaagtacacagtatctaacggtcaaactaaaatcaatataaaaacaatggtatttcaaaaaggcatagattttatattgagaaagattagagaataataaattaaatatttctaattagatatagaaacaaaaatggagatttgtccctactcggacaaacctccattttcaattaaaagctaagctacttcatatttagtaacttgtctttgagttaattgagcaccagattttttaactaaagcaccagagttagtcatgaaaatattcttagcgataattgtatccataagagtatttacttcagctttagtgagagcagctttaacgcctgaaacacttaaagtgcttttttcaccagcatcagttaaaaaaatcattgataaagtatattccatttaatttacctccaatctttaaaatttacctaagtaatctaccttaagcattaattaagctagaagattcagttataaatgaatctctagtgctagcatcaagaactagcttgatagcttcagcaacttcataaacattttgagcatcagcgttgatcctaacatttgaaaaagatttcttggaataaattgggtctccagctttatcagtacctttttgaacttcaatgctaagtgtagctgagttcataactttagttacagccatgtttttccctcctttaatttgttttcataaaggatatatgtacaaatattcgctattacataaatagatgaaaattatttgtttctataattaacaaaagaactgaaatagactaaatgtattgaaaggctcaatatgaaaaatgaatgtattattgaaggacaaattagcatatttgatttgcctgctatagaggttgtaaaatcaaaggaaataattattaaagcggaaaataaagaaataggtaagtttgataatatcatcaaattatattcaagcaactgcagtagaatagtaaaaactcttagtggagcattgctagttggattggatgataaaactatgtattttaatgcatgtggcatataaatgagtttgatttacctaaagattttggaattatgcctgaagaagaaatacttgttgtgaatattgataaggaaatgaatgaaatacaaaagcaaaagttagaagctcttaagcgtaggcaatatatcaaaagaaaaggtgatgctaatttaataatactaggagaaaaaattataatgataaatcctaaaggatgggtattggaatatgaccaaaagccaagatatcattcaaacgaaatctttaatacagaatttaattctgaaatccgagatataggtgatagtaaaagagaagtagcacttaagatgattgatgtaggtttttaagttaattattaaatggaaatcaaacaccagggtgtgaaagcaataggaaaagtggttaggatatgcattaatggagaaactttaaatgtaaaatgggatggaaaataaacagctttttattataagaatgtaagaaaggtaaaatattgataatatatataaataaaggtataatattttaaacagaaatttacaaaataatccttgaaaatttctgctttttatttgaacttagctttgattatgatatgaaaatataattgtagacaattatttaaaggtagttattgtcacaattttttaaaaagttagtttgtacagaaaataggaagaaatatgtttgtttataaggaaggtaatataatgacaaaggatttggagaagttaggaaagtacgagttggaggaaagggttcaaatattaaaagcatctttgattgatggaatatcaggagcacagatgcatgaaggaatggggtataaactttcaagaatcgcgaatggttataatttttatggaaggtatactggtacatattcacaagatgcaactgaagaagatatcagagcttttgtatatgcataccctgatgggattgaagatgagtatccgacatttgatgattttcttaaaaatagagttagtagaactaagtatgaagaaaactatggtggtatgagaaagggaaacataactgggagtaataatctagaatcaaatttcagtactgatttcaatggtaatatacaagataactctaagaagtacattattggttctgtgatagctattgtggtaatttttgcaatttataaagtaatttcatggattggtgatgtgatttttggaattggactagcttcagcagatgggatatatattggaatagttgttgcatttttaatagcatctatcgtaatgtggatatacaagaaatcacatggaatgggggtgtttaaaagaattattatggtaataggattatatttcgctgcatgttcatttgcgggtatttatgaacttttagcattacatagttttgagtggacagtgattatatatgggttgattgcgtattttgcaattagaaaaacaatttttgaataacaagtagtaattggtgttttcaaatatgtatatgataaaagaaaataacataatatataatttttgagactgggaaattattagtgtgggggaaaataatgagtaaagacaatattgattcaaattttaaaggaaacagatttaatctacttttgatagtgattgccttaaaagatcatagtactagtgaacgacctatttctgctggagaaatagctaattacatatataatgactgcaaaaaaataattgataggggatcagtggatagaatattagacgaagtttgtgcagaatgtttaatagatgatgaaagcaatgaggtaagatatggggctgctaagtatttaggatttagtgtacataggtgctataagaagtatgaaaggtataaagaagttttatcatatgaagattttcctaatggcgtaaataagtattattatattgaaaatattttaaatccaagtgaaataaaaatgttagctgatgctattgaaatatatagctatattacagtcaaggaaaccgaaaagattataaataaattaaacaaattgcaagctaaaaaatatagtataaattatttggattatagagggacagcagtcaaaagagagagtcttaatgctaaaaatgctataaacatatttgaagccatatcaaaatttagaagtataatcgaaaaaaaggaaaaagctgagattatatatggaacatataatgaaaagaaagaattagttcaaagaaaaggatatcctcaggttatttcaccatatcatcttatgtggtcaaatggatattattatttaattgcaaagagtagtaaacacgaggaattagtcaactatagagttgatagattcattgatgttaaagaaattccaggaagtaaaatagaattattaaaggatgatgaacataagtttactaatacaaatgggagtttttcttcaacaaaatatcgtgaacaacacgctgttatgtactcgggaaaaatagaacatattattttagaatgtaaaaactatatggttaatacattaatagatagttttgggggtgatattaaaattcaagaaattgatggagaatggataagagtaagttttaaatcttcagtagatggagtagtgttatgggctactcaatattgtactgattgtagagctattgaaccaccaatattagtatctaaggttaaagagagattgaaaaaaggactagaaaattatattgattgagcataggaactaaaaataattgaatatgaaatcataaaaataaataaaaaactataatgatgaatttttgcatagtttgtacatatataatttgattgtgattaagtaaaaaggagtatatacatgaaatataatattaatttgttatatgtagaatgttggaagttataggaggagaaaaaatgacaggaaagacgcatgtatctgtagcaatggcatctacattattacttactcaaccacaatcgataaaagaattagtattgtgtttgggagttacttctgtaggagctgttattagtgatattgatgtaagtacatcagaatcacatgaagctatagataaaatacttggtattattttaatagctgcaattgcattaggatttgcagaatataagtggcatgtaggaattattgaatcatttaaaaataatagtaatattataaggcttgtagcaggaatagcagtagttttaggtatttgtatttttggaaaaaatcaaccacatcgttcatttatgcattcagctttagcagtagcactgcttagtgtagctacttatactatattacctgatgcagttccatatatgattatttcaatgtcttcacatattttaatagatacctttaataaaaagaaggtacatattttttacccattgccaggaggggtaggtcttaatttatgtcacgcagaaggctttgtaaataatacgatttttaaagtagcaagccttttaacaatagtaaatttaatatattttactggaaaaataggaattagatttttaggataaaaattatatgatgcatttttgcggagtagttataagtataatttaatcatagtttaagttacaaaatataatacacaaaaagacgggagattattcaatatgaaggcacaaagccaaacaataaaggaaatattagagcaatacttaactatttctattccactatatcaaagaccatattgttggactagcagtgaggtagaagtcttactagaggatattcaaaatattgttaacaagaaaaaactaaatgatgaaactattcaacattttataggttcctttgtaattgaacagtcatcagcaaataataagaattatttaattgatggtcagcaaagaactactacaatatttttgattttgctcgcaataagcaagctagatagtgaaaacaatacaaatataaaacaaatattgaataggtataaattagaactttcagaagaagatagtggatgctatagaaaatgcttaaacagggataaattaacaggaaaagaaaataatctaataatgcaatatttctttattgaaaaatatttagacgatcaagatattagcttatggattgatgcggtgttaaatcagttatatgcagtaaatattttagtggaaaatggagagaatgtctttgaaatatttgagagcttaaattctaaaggaaaagctcttgaaccatttgatttaattagaaattttcttgtaatgcagtttaaggatggtgaagagaatttttataaggattatataaaaccattagagactctgacaaaagatgttgcaaaagtaaaaagagttaatggtaaagaaagaagagaaatttctaaggaaagttatgtgaacgaatttatacgttgttatttaatgttagatggtaaatatatttctaaaaaagaaatttattctgagtttaaagaaaactatgataattttactgattttaattcagataaaagtaaagttcatcagtttttacaaaacctaaatgattataaagtattttttgataatataattaacccatcaaaaatagaacaatcaggtttaagagaacagtttgaaagacttgaaatgctggagactgaaacctattatcctttcgtattatactgttatgatcaatttgaccaaagaggatttgatgacctactttctatttttattcaaattctaaaacagctagagacttttattgttagaacaattataggaaatagttcagctaaaaaatctttggataagctattccctataataggacctaaattatttagcgcaaaagattgcgattacttaacagaacttcccaatatattagttggaaacgtaactaaggaaaaaagtgtttatattgaagctgatgaaaaatttgctgagaagattcagtactttgaattttataaaccatcatcaaaattttgttgtttagcattaaacttacttgaaaatgattttgggaatagtgagaaagtatcagcagattatcaacagattgagcatattatgccacaaacattcaatgaagcttggaaaaattatatgggtaatgagtgggaagctatccataataaatatttaaatacaataggtaacttaacatatttagcacaaaaagaaaacattgaaaattctaatgagttatttaatgtaaaaaaggtgaatttgagaaaaagtaaattctctctcaaccagtggtttaaaaatatagatgaatggaaagaagaacaaattatagtaagaggagaagacttatctttgagacttgctaaacaatggcatgcttttgaaggtgtgaaagaagaaaatttacagaaatcaaatcaaaatcgtgtaacagataaaaaaattgaatatttcatattaaataatgaaaaagtcaagttatctgatactaaaggttcagctatgatggaagtattttataattatctatttaatataaaccccaattatattcaaattttattagataaacaacaagatatagttaatttaggtgaaattaaaacaagtaagtttagatctagaagagaaataataattaaagattatcctaaaaagatatttgtaggggtgtcatcttccttagatcaaaagttaagagatataggaaaatcacttgaattattagatattccgagtgagaaattttggttaatgacagatgctaatgaaaaacttacggttaatgcaccaagtaaaagggcaaagaaagaagagttactagaaatatcttataaaggaataaaaatagaagcaaaagattgggccgatgcttttactcaaattataactatgattcttaaggataattttgataagctagatagcatgccagaattatttacaaggaaaactgatcatggatatagagcattgagaaaatgtaatataaatggacaagatgtttatattacaactcattcaagtacagatgaaaagagaagacttcttaaaaagctttgtaggaaatttgatatagatgaaaacttggtgaaattttaagataaactttaaaaatataagaaaaagaggtatataagaatgcagtgtaataaatgtggcatagtactaaacgaaaatgctaagttttgttctgaatgtggtgaaaaagtaataagagagctaaaatgcaagcagtgtggaaataaattaaaagataatagtaagttttgtgatcaatgtggaactaaggtagaggctaatatttcaaccgaaacattaaaaaaattagtaagtgttgatttttttaatcttgcaggtcaaagcataggaagatgtaatcataatcagtctagatgggttagacagcatgagaattatatctatatatgcaaaggtagaggtgtttataaaatagatacgagtggaagtaatggtaaaattttttatgaatcaaaaaatttcatagataatattaatataaataaaaatggtattgtagtaaatgcgtttggagggacttgtattgagattttaaatttcactggagaactagttaataaaattaatatagaagatggaagattagattgcacttatgtgtatgataatcaaatatttttctctattaatgatctaaatggatctataaaactatgtataagtgaatttggaaaatctaactataagcttattaactcatttgaatctaatgatggcttatcatatttcatagcaaataaaaaatatgttatttttaaaagcgaaagtctgagcggttggaacattatgaatatagatggctcaagcttacagaaaatatatattaatggagaaagcaataatgagagcgatatagatattctgtattttgatgtggataatggttatatgtttaccagtgcattctactcagaaaaggagaaagatattagaggttactatatagtaaagcgtaaaattacgaataatattatagaaggggtatttgaggatgtaatatggaatcaggatcctaatatggtaacaaagcatggagatagattttatggtgctccttttattaataatgaatattctgttggattcaattatggacatacaaaagattattcagatagagaagaccattactataatctttatgcagtatataatggcaatggatataaatatttaaattgtggttcacgaagtggaattgagacattaatatgtgaaggtgaatatgcatattggaatgattatgatagtatttatcaggttaaaatagatggaactcaagtaagatgcttagatagtgagttacagcaataaatattttgcattaaaaagcagtttaatattatataaatttaagtaattaattcacaatttaaagagagaagaggatacaaatgcaatgtaaaaaatgcggaacagaactaagagaaaatgctaagttttgttttgaatgcggtgaaaaggtaataaaagagttaaagtgtaagaattgcggaaatatattagttccgaatagtaaattttgtgatgaatgtggaactaaggtagactatagtatagataatagtgcagaagaaaaaagtgaaacaacaataaatagtaatgctttagaaagaaatgcagaaaaggattctaaaatcgaaaataataaaaaagtatttaatgaatttggattaagaaaagtaagtttaaagtctactggaaaaatggggtatattaatgaaaaaaatgaagaagttattcagtgtatctatgataaagtattcgatttttacaagaattttgtaaaagtacagaaaaatgatatgtttacgtatttggtttatgacattaatacaaataaagcaaatcctatttcaaacgatgatgtatttggtgaatataaaaattatacagtatggttttcaaaagcaacagattttaaagatggttttgcattcttatctagatgcgatgatttttatgtattaacagatgaaggtgcaataattagttgcgatagagtgggggctattgaaaaagctgaaggattgctacctattttaaataatgatgagtatcctatatatataaatagaaaaggagagaaagtttcaaaatatgaacgatatgactatgtaggaaaattcaatgatggattagcagtagcaagagttaaagattgtgatgctaatgatactggggattgggtatatgtaaatgagaagttaggggaagttataacaaaagttaataatgaaaagatttggacttttgctggtgaatttaaagatggaagagccatggtatcaacagttaataatgaaattttaattattaatataaatggagaaactataagtaagttagagaataccgaaatttattataaagattatggatggctaaattctaatttagatggttgctataattatatagtagtcaaaagtaaaagatgtaatgaacatgcaatagtaaatcgccagggtgatattatagttccatttattaaatcagaaataacaaatgaatatggttataaccataaacaacattgtacatttacaacttcaaatggagatattgtatatgatttatgtactggaagaaaactttttagtgctgaacatgcttatgcggtaagagatgagtttaataagaagtattatactgtaagttatgataaaaaatatggactttatagttataaagaagataagttaactattccatgtatatataattctttgattgaaatagatgaagatattcgtaaattctacgaatatgacttatacttcagaagaggagaattttatatagcagaagatcaaaaaggaaaatatggagctattaatcataataatgaaatcataatcccttttgattatgatgaaataaaaggaatagagtctttaaggtataagtattttatagtaaatatagatagtaaagtaggagttatagataataagcgtaatattacaattcctataaaatatgataaattagaagaattagatctttggagctgtggatacatttgggataactatttaaatagcttcaaaaattctgatccaatagttttatttaaagctacattaaatggcaagaaaggtgtaatagatcaatatgatagagtttatattccgataaaatatgaatcaatcaaagaatttgggattataaaagatagaattggtttagtagttaaagataatggaaagtatggtatcgtagatatgtttggagaatatattttagaaaatatatatgatgatataggtgagaaacgttattatgcctttaagatagtaaaaaatgacaaagcaggttatatgaatataaaaggagaaattattatgccatttatatatcataaagagagtagagatccttatttagactatatctatgtagtaaatagaaatgatgatggaagtacaggcaaggaagaatctttatattaaatttatggacaatatgatgacaaatttaatgctgaagatgaaaagaaaatggaagaaaaagttaaagcttggcttagtgaaatgggaaagaaatatagcagtgatattaattaaggataaagcaaagattccaaatttggcagataaataatataagacattaaactcattatacataatggaggtaaccttcgattatgtatgatgagtttttcttattttagattagaaaatattgaataaataatcttttgtgaataaaaaattgaaaaattttaattttgcggcaaaattgccgaactatatcaattaaaatgatattaaattaagggaagatatttataaggattaaataataaaggggtaattcaaaatggtaaaaaaatgtttaacaccagttatcgcatatggaattgttacttcgagtatagtagcatctaatccaattatagcaaatgcagagaacagaataagtattgaccaagctaaaaaattaattgttacacaaggagatgtttttgattttgttgtagatttaaatgagctaaaattcattaacgagatttcagtaaaaacagataagtatggttgttatgtttataaattaacagataatcgtgaaaatttatatatttttcaatatgaaggtatgagttactatattggagtgaattcgggaaaaatatatgctagcgagggtggagctaaaagacagtcttttgcttgcgttgaaaataataatataatccatcattggtatatacatgatgaattaaagtcatggattgaatgtaatggatggaataatgaatggaatggtgagggttggtattattattctaatgcaatacaacaaaaaggatggcaattaattgatggaaattggtattatttcgataagtatgggaaaatgctctcaaatacagttatagatgggtacaaactaggcgcaaatggagcatggattggataagtgtttttagcaagttcaataataattatgttaataagtaggagaaatttgagcattcattaaggacaacataacacttttatggcaataaatttataccaaatttatagttatggcttaagaatatagaagtcatatacttgtttacataaaatgttactataaaaaagaattgaggggtaatgtaaaaatggtaaaaaagttaatttcaagtttgttaatcgcaataactgtaatggcagtgattcctaaaggagcttcagctgaatgggaaaggtatggcacaagatataaatataaagaaggggattcgtatgttacaggatggaaatacattgataacgattggtattattttaattccgatggtgtaataagaagtggttgggtaaatgacaatggaaattggtacttttgttatgctcacggtcaaatggcccatgataccactattgatggctattatttaaattcagatggagcttggacaaatggtgaaataacagcagatcaagcaagaaagttaatattaaatgttgatagtacttatatagcttcaaacccaaattatcaattatcgactaattacagagaatatagcgaagaagataatctttattttggaacttggaattttcccaaagaaccaatgtacgaattcttttttgataatggaaatgatggattaggagggtatttagttggtaaagagagtaaatgtgtatatgctttatataaccaaggaaatagtaatacgtatcaaatagagggaaataaaattaaaaagacttttaaatggatgggcgtaggtagtagttatgattggcgctaaatatatcatttagataaaatatatttgtttatatttatggactaataatatattacaaagctaagttatagtgtttttaaattatcaagaaattaagatatattcataaaactgtataaagtaaaaaagttttttggaatgatttacgtaattaaaggaggaatattatatgttaaaaaatatatctaaggcacttattgctatgtttattgttacaatattaccagttggagtctttggagttgaaagagtatcccatagaaaccctgacaatagattagatatttggtttacagatactagtggtaatatacttaatggatgggtatacaatgattcaactgatagttctaaggggtggtactattatgaaaatggtagacatcataatttatataaatgggttcaatcaggagcaaattggtattttgtaagtggtggtaaaatggtgacaaatcaatttatcgatggatactatctaggaagtgatggcgcttggacagataatataccaaccgatactaaaataaatccagcaaatgtacgtgcgacaaaaagtgtggttgataagttgctcgatgatggatgggtaatgccaaatagttattggtatgggtcaataacatttttatatcttaaggatagaaaagatagtgcacattatgatacaacatgttggattaaaaatggagtggctacaatagaggatattactatggcacaaaattataatgagtggaataattcaactaatacaaaagttacaataacattagaagagtatttagaatataaaaaggaaggtaaaataggttcatttgattattatggtggagttacaggagcagatcacatgtctaaaagagttcatgaatatattaagaaatagtaacattactgtggagaagacggtgcaatgataactaataaatggattaaatttaaaagctatgcatatggtaaagaaaaaagttattggtactattttggagatgatggtaagaagctaaaaaatactgtaacaccagacgggttcaaggtagatagtgatggcaaatggatacaatactaagttttgaattaacttccaaaataatagtgtatataataaaaaataaatgaagagaagtacaagctgttttatattaaatactatttttttagttaagacccattaagattgtatttactaaatatatagaaagtctatatagcttgcacttctctttgattgttgtagcctgcggcagcaaggaaattatccaagccctaaagggcttgaacaattgaaaatccatttgttggagctaaggctccaattcatttaattctaagtatatgcattttatcaataataattgctggtttatgatctgatttatagctttttaagattaataatttatttgtattactatatattagagatatagtagtatctacagtatctgtattttttataggacaggtttttctatcttttttcttcatagaatagtcttgtttgaaatcataaattgatgttattcatagatggtgaattccataggtatagagctagttcgtgaatattaaccctgccgggattgcgtggttggctcctaatattgtgtttgggcttgcagcggacggcgtgcgtaggcttggacctgcaatcaagattgcaggtccatcttgtacaggtttgcctgctaatcctatcttcgattaggacaggcgacaaaccagtacaagaatgcccacagaaggcatgcacacttcgctaagataagtcgttgtcccgtaaatgtccaagctaaaatatttatggccatgaatttttatggtctttttgtggttataaagattttgagaaatgaaggtttattccttaatttcagctgggacacttcgggaaacgttatttagcaaaatgtacatgccttctttgtggtaatgggtttttctggtgcagattatagagaaggtgttattatagtttttggtgtattgtaatactggagataatgctgcatgcccagataagagtttttgttgaaatgtgagaatggggagagaaagttaatgtttttattttcaaagaggatactttaaatgtatttctaaattccaactccagaaagagtcaatacgtaatagccacggagctctgccccttgctattacattgacactttcttaagagaatgttttaagtgtagtgattggattaaaggctgcgccttaaatccaatgaacaattgaaagtttactaaatagagaattagtataaatattatagagagaacctgtttggtgtattaaatgatttatggagaagtgatgcatacgcatagggaaaagggcgccttggacttgccctcaccaagatagagataaggtttgatgggtgagggcaggtccacaatgtacatgcttacctgctagtcctttttagtaaaggcgttctttccgcttaagaaatccaatcactaaaaataatagaaataaatatttaagaagaaattatttttagtgatacgatttcttgcgcttcaataacactcattactaataaggacaggcagaaaagcaagcacattgacggcgccctgtggaataaaagtttttttaatagtagttataatgagagtagagtagattagacagagtaaattaaaataagaaattgttctttgaaaactaaataatatgttatttacaaaatgtgttatttacaaaatgtgttataatatgttctgatagtagtttttgataaaacaagacagatttttgtttatagtagataaagggagtattttaaatgggatgtattaatattaagcgaatttggtc

SEQ ID NO: 23 - DNA, 72379 bp, Clostridium beijerinckii
ccttataatactaatacatataactatttccaatacataaaatatatatttaaatatataataagtaatgaggataaatttaattttaatgaataataattaaactttttatcatatttctattgagtaaatataaaaaagtgtgtataattatgctatcgttagtagagaaaagttttggaggtattaataatgaaagttggtatagtaaaaaaattagttgctattgcagcagcatcggttattgcaataggtatggtaggctgtggaaacagcactaaaggaaacaaagaaaacacaagcagtaatgcttctgcattacaggcaataaaatcaaaaggtaagcttgtaataggaacaagcgcagattatccaccatatgaattccataaagaaatagatggaaaagatcaaatagttggatttgatattgaaattgcaaaagaaatggcaaaagatttaggagtagaacttgaaataaaagatatggcgtttgatggattgttagtagcacttcaatcagataaaatagatatggtatttgcaggtatgactccaacagatgaaagaaaacaaaatgcagatttctcagatatatattataatgcgacacatagatttgtacttagatcaggtgatgaagctggaataactaaaatggaagatctaaaaggaaagaaaattggagtgcaaaaaggttcaatacaagaaggtatagcaaaagataactttgatgcagcaaatattaagtcattagacaaggttactgatttaatattagatttaaagaacaataaagttgatgcggttttagctgaacaaccagttgccaaaataaatgttgaaaaaaacgaaggtattgcaattgcagataaattggagattacagatccaaatggaggatctgctgtagctatgaaaaaaggctcggcagatttattagagcaagttaataagacaataaagagattaaaagatgaagataagataaaccaatttgtggtagatgtaaataaattagtagactaatattgtttgacactaagaaatactatagaaaataacgagttagagatgtagtatatattttgttattgacaaggtgaatttagataatatgatttattccttcatgaaagttatttaaaatttcagaagttatattggaattatttaaaatcactttgtacccgttgtgggtatgagtttaactgaaatcaggtgataaagagagcttcacctgagaagttttaccttgtactaagtaatgaaagtttttagcatataaaaactataaggtaatacataccagtatagtagaatgcaaaatatactgacatcatagcttgttatttttttgagtattagatatatgttgtaaattcacaatacacgtttcacaattcacaattgtggctaaaattcttgtaatatttttagaattatgatgaaggattatttttgaaatatatatatttaaatttatttttatattggaaattaacaacagttgaaaattatcagataatgtcttataattaaaaattagtgactattttattatatgtgtattattaagtgaagcttgattcagatgggggagtccttagctggatattagttgaacttatttagggtcgtgttactgtatatattacttaagcaggtagcctaaatatatgattcagtgtgaatcggttactcatctgactttaggaagaggagtttcatatattgtgagaatattacagtggctagacatcagataaagaactaggagggaaaatattgaattttacatttttaggaaaatactctgaatattatttaaaaggtgcagaaatcactattgtattagcattttttgcagtgctatttggtacaatcttgggtcttgcattaactcttttaaggcgttcaaaatttaaaccaataagctatatagcagcagcttatgtagaatttgtaagaggtactccacttctagttcaaatctatataatctatataggattacctaagcttataggaatagatatgcctgatatgactgttggatcaatagctttagcattaaactcagcagcatatatatctgaaataataagagctggaatcgaagcagtggacaaaggtcaaatggaagcagctagaagtttaggaatgaatcaagggttagcaatggttcatgttataattccacaagcatttaagaatatattacctgctcttggaaatgaatttatttctgtaataaaagaatcatcaatggtttctgttataggtgttgcagaacttatgtacaatgcaagtattgtaagaggaaatacagctttagggttagaaccaataattgtagcagcagtagtttactttgttttaactttcactttgacaagatgtttaggttatgttgaaaggaggatgaaagcaagtgatatacgttaaagatttacataaaagctttggaaaaaataaggtgttaaaaggaatagatgagcatatcagtaaaggtgaagttgtagttgtaattggaccttctggatcaggaaaaagtacatttttaagatgtcttaacttattggaaactcctacatctggacaaatcacttttgaagataaggatataacatcaaaggcaactaatatagataagatgagagaaaaaatggggatggtattccaacaatttaatttatttcctcataaaacagtctgtgaaaatatatgtttagctcctattaaagtaaaaggaatttctaaagatgaagctaaaaatatagcagaaagcttattaaataaggttggtttgatagataaaataaatgcttacccatcatcattatcaggtggacaaaagcaaagaattgcaatagctagagctttagctatgcagccagatgttatgttattcgatgaaccaacatctgctttagatcctgaaatggttggagaagttctaaatgttatgaaagatcttgcaaaggaaggtatgacaatggtagttgttacacacgaaatgggatttgcaagagaagttggagatagaatattatttatggatgaaggaaaaatattagaatctgggactccagaggaagtatttaagaatcctaaaaacccacgtacaatagactttttatctaaagttttataattaactatacaacaaggcgttcaccaaataactatttttattagttattatggtgaacgcctaaaattttaatatagataaactaattataatccatacttatgcgtatagctcaccgaaatgaataatatacttttgttccagtttctaggtaattctgatgggtgattctaaggctataaagttgcacccaaagtgctagcctcaaagaacaagctttgaactagcacatttggaacaacttatagtcaaagaatcacatccatcaaaattaccaatgaaacattccacaaaagtatatcactcatttctggttagaagatatttcatagtctaagtattatagtttatgattgcgctatctatagataccctaactaagagtaggaatttaccgaaattataagaattattatttgggaaacttatgaaaatttcgctaaaggttttaagcataaggctgtattagccttaacgtattcgaacttttagtttaacaagctaaaagtagtacgaaggagaagaaaatttatgtggtgtaatcctagttgaaagccaaatgccaagtgaaattactataaacataatatggagagctaatacaattaatggtgcggctaaattaactccgccttttttacgtaatttatttatatattcagtattgctgagattttgtatattgataacattcattttgaagtctttaatcttacgttcgcaattgttaagataaataaaatttgcatataaagttaatataattcttatgagtagtagcaaagataagtgtattccctttggaaaaatcgctgaagatactaaggttaagagtatcaaagcagctcctggaatataaagttttctgtataataaccaatagtaaccgaagaaaaaacatggccagttccaagataaaaatttatgtttatcgttatatttgttgaggtgcttaatatagaaaccgctattattaccaataaagatagctagttcgtctcgagaaatattgttgcttttattgtaaggaatagaatatatatttttaaatttgtttgtattctgattattataatagtcatttctattatgatagacttttgtttgattaaagttatcattagatttggagttgttttcaacatgatctactttaatatcagcattaactctactatttaagttttcttcagtataatctatattagttttttcagtatttttaatcgtattaccgaaataagaacacataggatttatacacacatcatttattcctagttcttctgaacaatgtggacatttcaaaattatatcctccttttaatagcacttaatactaaaaggatatcacaaatttatccaattaacaatgagaaggacagcaaataggatagggtaaaaaggaataatgaattgaaaaaatttaggtggagttttagctttatttatacttatagttttaaggataagaatatgtattaaatgggatgcagcgatatagaaaaagtacagccattatttcaaactagaagtttcttggtttgaaataacggctgtatttttatgtgtagtgtttgtctatagtaatgacacagttataagaaggatgatatttctttactccttcagatattatatttataagttcagtatcagttatagaaagtttttttgatggttcaataacaacgtcaaaaattaagttcttaatatcaccttcaccgactactctaaaatcatgtattgactctatataatcatatttttcaattatggatagaatttcatcataagcttctttgacttcgccttcaataatgcagataggatcgatgtgaataactaagtaaatcttaagtgcttttgaaatttctctttcagctttatcaattacttcgtgaatatctacaacgttaatatttccaggaatttcagcatgaatagatgccatacatttaccaggaccataattgtgaactattaaatcatgtgagccgaggatgttatcgtaagacaaaaccattctttctatggattcaacaagttctggatctggcgcttctcctaaaagtggatttatagtatctttaactaaattgaaaccggcataaacaatgaataatgcaacaaacattcctatatatccgtctatagggaaagaagtgaattttgaagctaaaaatgaaatagccacacaagtagtggtaaatacatcccctagagcatctgtagaagcagcttttagagcagaggaattaatcttttcaccaataaatttattaaatttagaaagccaaatcttaaaaaatattgatactataagcagaataaatgaaactaactcgaaagcaactggtgatggattaactattctttcaaatgaagattttataaattgcagaccaactaacattaccatgaaggcaacaataagtgctgaaagatattctatccgcccatgaccaaagggatgttctctatcagctggtttatttgaaagtttaaaacctaaaatagtaattaaagaggaggctgcatcagaaaggttattaaaagcatcagccattatagctatactcgaaactattactccaacagaaagttttattataaataaaataatatttactacaatacctatgataccgccaagaacaccgtaagaatttctaactgtgtcatctttaacattagaattatccttaacaaatttattaactataagttcaaaaaacatgaaatacactccaatcataagaaattaccaataagcattacatctattatattaaatatttttagttaagcaagtatttttttaccagaagttaagcaatctaacactaataaatatatatttcatattttaaatatattctaagtttatagtagcactttactgtgttataatttatatagaaaatattcgagggggcaatttttatgaaggatattatatttactggtgcagcagttgcaattgttacaccttttacagaagatggaattaatttctctgaattaaaaaaactaattgattttaatatagagaatggtacagatgcaattgtaattgcaggaactacaggtgagtcttcaactatgactgatgaagaacacagggaagttattagatttacagtagaatatgtaaataaaagagtaccagttattgcgggcacagggtctaatgatacagtttatgctgttgaattatcaaaatacgctgaaagcgttggtgcagatgcacttttattagtaacaccatattacaataaaactactcaaactggtttaataaaacattacaattatattgcggatagagttaatatcccaataattctatataatgtaccatcaagaacaggagttaatatagcacctgaaacatatgcagaattagctaagcatccacgtatagttgcaacaaaagaagctagtggggatctttcagcgattgcaaagataaaagcgatatgcaaagatgaacttaatatatattctggaaatgatgatcaaatagttccgatattatcacttgggggaaaaggcgttatttcagtcttttcaaatattatgccaaaagagtcgcatgaaatttgtagtttatattttgaaggaaaagtagaagaaagctgtaaccttcaaacaaaatatttagatcttataaatacgttatttatagaagtaaacccaattccagtaaagactgcattaggaattatgggatataacgtaggaccacttagaatgccattattcccaatggaaggcaagaatctagaaaaattacgtgaagaacttgctaaaaataatcttatataagttttagtgtgtattttaagtatagataaataatatttaatttagatttataaaataattcatataaataagcaatatattaatgaacgcttggatattataaattcgggcgtttattttcgttctttacaaagaaattataaaaagttaaatttatagataattattggaaatgtcagaaatatatattttacgaggcagatgcgtaagaatttttttgtctaccattttactgcatcaaactattttatagataagccaattataagctggatttatactatgaaatatatcccaaatagaaatgggtaatatacttttgtggaatgtttcattggtaattttgatggatttgattctttggctataagttgttccaaatgtgctagttcaaagcttgttctttgaggctagaactttgggtgcaactttatagccttagaatcacccatcagaattacctagaaactggaacaaaagtatattattcatttcggcgagttatatacataagttaaggtcttagttgggttatctatatagataaacaacttaagaatttgatttatactttgcagtaaataccatattagaaagtagaaacatttttatgcagcaggcattgaaaatgagctgttaaaagctcttaattgtaggttgttcaactaatgcttgtcacaatgaaattgggagcaagcattagtagtgcaacctgcaatttagtactttcagcgaaattttcatagccctgtgaaataacaatgtttttactttcggcaggttattgcataagtctaagttatatattgtttatctatatgaattagatccaaattaaaatttagatgtattttacccatggaataaaattatttctaaaaaaatataaaaaattttagagaaattatgtaattgttcatttttatacatatattccatatagaagactaatttaaatgggagagtgttaaagatgaaagaaagaaaatttgttaaattaagagttgatatgtatgatgatactaaatctaaaataatagatacaatgaatgaaagagatcttattcagtatatttggattagacttattgttttagctggtaaggtaaatttagaaggagaattatttttgtctagaaatattccatacacaatggaaaccatcgctatagaatttaatagagatattgaacgagtgaaattagctatgaaggttttaatggatttagaaatgattgagtttactgaagataaaatctataaagtaaagaattttgctaagcatcaaaatattaaaataaataagagtactgaaattaaagataatgtagtaaaagaaaatgattctagtcacaaaatggatgagcctaaaattaaagatagagaaaatctaatgggtgttaattcaaaaagtagtggatataaaagtattgatgaaattgttagaaataaaactgctaaaatcgaagataagagtactatgattacaaaggaagagataaatgaaaacaataatgatgataataatattaacagttgtaataaatataatgaaaattctactagcatagattctgaatttgtgactaaaggtaatgcagaaaatgaaagctttgcaaatagtaataaaaataatagtaatatcataattgctgaaagaactcagaatagtgatactataaatgctagtatagattctactaataataaagataataatgaaaacatagactatatagataatactagaaatgcagatgtgatagatagcaatagcatttatgacaataacgatgccaatatgaatatcagcttagaaacagaaaaaaattcctgcgaaaataatgcacagtcaagcataccaatctatgtgaaaaagaagaatagtaagggcagaaaaaaatccaataataaaagcgacattaacgagataaatttaagtgacgatgatgaagaaatagttgaactttgttcaggagatgtgacgcttggaaaagatgaaaaagtagttatggcatttactatgtaggtattatctaatataaaattttctagataatcacacatataaaatatgcattattttctaaaaaggtatataatattaaaagtgaatttaatattgtttaatgttttacgagaaaaatttaatttatgtagggagagataataactatatgaataatgcgcaagaattattagattttataaataagggtaagacggcttttcaaagtacttatgaaattaaaaatatcttagataagcaaggttatacagaaattaaagaagaagataaatgggagttaaaaaaaggtagtaaacactatattataaaaaataactctgcattaattgcctttgaaataggaaatggtgatattgaaaaagatgggttcagattaataggagcacatactgattcaccaggatttagaataaagccaaatccagaaatgaaagttgaaggacattatgtgaaattaaatactgaagtatatggagggccaatactaagtacttggtttgatagacctttaagcgtagcaggaagagtaactttaaaaggagaaaatccattcagtccaagagttgaattattggatgtaaataagccaatcttaattattcctaacttagcaatacatatgaatagaagcgtgaatgagggctatgaatataataagcaaaaagatactttaccaatgcttacaatagttgaagataagctagaaaaggataattatttaattaatttaatagcagaaactttaaaggtagattctagcgatatattagatttcgatttgtttttatatgagtatgcagaaggtatgctaattggcttaaatgatgaatttatatcatgcggaagactagatgatttatggatggtatttgcaggattaaaagctttaataagcagtaatgaaattaaagcaacgaaggtattagtagctttagataatgaggaaataggaagcttaacatcccaaggtgcaaattcatcaattttagaaaatattttagagagaataactttgggtcttgaaaaagatagagaaagtttcaagagagcattaagcaactcaataatgatatcagcagacttagctcatgcaatacatccaaactatgttgaaaaatgtgatcctacaaataagcctatgcttggaaaagggcctgtacttaaaattgcagcaggtggaagttattcaactgatagttatgcaagtgctgtcttcaaaggaatctgtgaaaaaactgaagttccatgccaagtatttgtaaatagatcagatttaagagggggaacaaccattggacctattactgcatcaaaattaaatataccagtaatagatatgggagcgccactactaagtatgcattcaataagagaattagctactgtaaaggataatgaatatacaattaaagcatttactgagttttttaattaatagaatttaaaaaaatagagccttactcaataaaatataatttgagtaggctctattttgttatttagaatgagtttaaagtaataacttaataatataaaaagaattggtaaaatgaatattattctggtgaaaccacaagttataatgcatggtaaatattaaattatttatcaagctctaaatctgaattaaaggatattggggaaatagcagatctaaagacttagttaatattctattaccgaaaaattttaaataaggttgaaaaaatatttaattttagaacattagttctaatcatcgattcatcttcaaacaagatattgttaactaagtaattaaggcatttctttgaattttaaattttccctatcattagtcgttttttgattgctccactacagtgtctgattttaatacatctaatcttttggatttatattagtgggaatgttttctcaagttatattcttgaattttgcaatttacaaaatatatattttttgtgttttgatatgtttttatttaaaaatatatcaaaacattcacatatattatgtaaagaaaagtttattccggtaattaaaagttaaaagagaactttttagtgtaaatttcataatttatttaaaataattatagttatatctgaaaatctataaaatgaataaagtaatatttgttgtaaatattgaaattaggtaatattatgtaatataataataataattaaataattaaggcatatctgaaaaaataattgtcctatactatttacaagactgtctatatatactgtttttcataaatacaagcgttctggtcggtcaaacgatgcagctttgcttcgtgagaacgataaaattgcgttaaacatcacatcaccatattattcatcgaaggatgtcaagcttttgcacctggaataaatcctttatttgatttcataattaaccagatatttcataacgcttgtgtgccataatattcacctctaagtttttttctcattttatatagaacttagattttgctaaatttctatttttgaacatgtcatagataattaaatattcaaaattcggtattgggattataatattaactttagttagtaaggatatctatcagtaagattagattttttctcatagaattcaagttttagtgataaagattcttcaaaaatatatttataaagacgtataaaatttatggatttaaagctttgaaaattaaagctaatttaatgaggagggggatttattaaatttaaaaaggtaaaattaatttatgaggaggggtatttcttggaacaaaaaagaattttaagttgggtggtagtcgttgtaatgatttttacaatattattgccaaccaaaaaagtttatgcattatcatcatatgtaattggggggcaaacaagtaacgggtctttgaaagttacaattgatggtactggagaaatttatgtagaaaaatataatggaagtgactttcagcaacaatattatgcaccatctggagcagtattaaatgttgatgggcagctatacactataggtggatattatacggcagataatggagggaatataaattctatcttagctgcagttaaaactcaaacagcagacagtaattcggttactactgtttgggatgcaggattaattgaagttacacaaaaagtaacgttaccttctttaaattctcagtatataaaacttgattggtcattcaataatataagtggatcattaataaataatatacactttttacgaggagaagatacttatcttaatggtggtgataatggggcaggattttgggacgctcccactcatactattggtgtaactaaaacagataatggtgttactcaaagattaggaatgcaaggaataaccacacctaattcttatacatctcaagaatatgatattgtagctaacgaagtttgtggtggtgagacactcagtaatactattgatgataatgtaaacacagataacgggtatgcattggaatggaatactagctcattggctgcgaattcaacatggaaagtcagtgcaattgaaagctttatagcttcttcaataacagcatcagctgataatggaataacggtagggggtcctgttactttaacatttaatgtaactaattctagtaataattcacaagatgtcacttattctatatctaatattgatggatggagtgttcagttacaaaaggaaagtgataccattgcatctcatgcaacaaattcattaagtgcagtggtcacacctagcggtagtataaataatggagtgtatgaaatacaattaaatatatcctcgggtggagttgagactcaagcaattggaacagtgactgtaaatataacgcaagcggtgataaatagtgtttcagtaagtcctgaaactgcaagtgtagtacaagggcaaaataaacaattaggatcaacagtaaatgcagtaggtggagcagcagaaacagtaatgtggtcaagcggtgatgcaagcggaaaagtaacagtagatgaaacaggattagtaactgtagcatcagatgctgcgccaggagattatacaataacagcaacatcaacatttgatacaagtaagacaggaacagcgacaataacagtaacgccagcggcagcaataaatagtgtttcggtaagtcctgaaacttcaagcgtagtacaagggcaaactaaacaattagaatcaacagtaaatgcagtaggtggagcagcagaagcagtaacgtggtcaagcagtgatgtaagcggaaaagtgacagtagatgaaacgggattagtaactgtagcatcagatgctgcgccgggagattatacaataacagcgacatcaacatttgatacaagcaaaaaaggaacagcaacaataacagtaaccgcagcgccagtggtgccagcagtaaatagtgttgcagtagatccgacaactgcaagtatagtacaaggtgaaaataaacaattgacaaaaacagtaattgcagttgggggagcagcagaaacagtaacgtggtcaagcagtgatgcaagcggaaaagtgacagtagatgaaacaggattagtaactgtagcatcagatgctgcaccgggagattatacaataacagcgacatcaacatttgatacaagcaaaaaaggaacagcgacaataacagtaacgccagcggcagcaataaatagtgtttcggtaagtcctgaaactgcaagcgtagtacaagggcaaactaaacaattagaatcaacagtaaatgcagtaggcggagcagcagaaacagtaacgtggtcaagcagtgatgcaagcggaaaagtgacagtagatgaaacaggattagtaactgtagcatcagatgctgcgccaggagattatataataacagcgacatcaacatttgatacaagcaaaaaaggaacagcaacaataacagtaaccgcagcgccagtggcgccagcagtaaatagtgttgcagtagatctgacaactgcaagtatagtacagggtgaaaataaacaattgacaaaaacagtaattgcagtaggaggggcagcagaaacagtaacgtggtcaagcagtgatgcaagcggaaaagtgacagtagatgaaacaggattagtaattgtagcatcagatgcggcgccaggagattatacaataacagcaacatcaacatttgatacaagcaaaaaaggaacagcaacaataacagtaaccgcagcgccagtggcgccagcagtaaatagtgttgcagtagatccgacaactgcaagtatagtacaaggtgaaaataaacaattgacaaaaacagtaattgcagtaggaggggcagcagaaacagtaacgtggtcaagcagtgatgcaagcggaaaagtgacagtagattcaaatggtttagtaactgtagcatcagatgctgcaccgggagattatacaataacagcgacatcaacatttgattcaagcaaaaaaggaacagcaacaataacagtaagcgcagcgccagtggcgccagcagtaaatagtgttgcagtagatccgacaactgcaagtatagtacaaggcgaaaataaacaattgataaaaacagtaattgcagttgggggagcagcagaaacagtaacgtggtcaagcggtgatgcaagcggaaaagtaacagtagattcaaatggtttagtaacagtagcatcagatgcagcaccaggagattatacaataacagcgacatcaacatttgatacaagtaaaaaaggaacagcaacaataacagtaatgacatcagcagcagtaacatacacccttaactatacagcagaagcaggtggaacaattgagggggatttatcgcagacggtggatgaaggatctgatggaactacagttacagcagtacctgatacaggttatcatttcgtaaactggagtgatggaaaaactaatgcaagtagaatggatactaatgtacatgatgatataagcgtaagtgcagaatttgaaattgatttacctaatgatactgatacaacaacaccagcagctgtaagaattagcggaaatcaaaaagtagataatactttagaagctcttttaatagatgaaaatggcttaagtgtaactacatcttcagcagtaacatataaatggtatagaatatcaggcaatgatgctgataatggaacactagttggtgaaggatcaacttacaagttgatcagtagcgatataggtaaatatattaaattagtagtatcttatatagataaaacttttgaaaagattacatcaaagatttcagggaattcatcaagtggtagttcaggttcatcaggtcacagtagctcatcaacatctagtagcaatacaagttctacagaaaaaattacagtgaaggttacagacggaaaaagtgacacttcaatatcaaaaactgtaattgaaagaacaacagcaagtgatggaactaaaaaggatattgtaacttatacacctgataaagctaaagaaacagtaggtgcattaacgagtgaaggaaaagatacagcaagaatagttgctacagatacagataatgatgtatctgaaactaaggttaatatacctaaagaaacactaacagcgctttcaagtggaaatgtaaatttacaaatagaaacaggtggtgctatagtttcattaccaaaagaatctgttcaaggtttagcacaaagtggacaattaaatggagatttgtatttcagattagttccaataaaggatgaaacaaggcagacagaaatcaagacaacagcaaatcaacaagctataataaaagctgtatcaggaaataatggcgtacaagtattaggaacaccaatgactatagaaacaaatatgagtcaaagggctgtagatattgtattaccgctaaaaggaattactcttccaactgatgcaactgaaagacaagctttcttgaatgatcttggggtattcattgaacatagcgatggagaaaaggttcttgaaaaaggtcaagtagttgaatatgcagcaggagtctttggaattaagtttacagtaaataaatttagtgattttacaatagtaaaacttaacaaaaacaatcaaactggttggaaattagataatggttattggtatttctttgacaatgctggaactatgataaccggatggtacaagtctgaaagtggggactgggtatatgatggaaaagatacagtaggacaatggttccacttgggcagagatggaagaatggacactggttggtttaaagatagtaatggtacgtggtactacttatgcgacggtagaagctatggtgctttaggctatatggaaacaggatggaaattcattgatggtaagtggtatttcttaaagagcaatggagctatggcaacaggctggacatatgtggatggcagttggtactacttatattctgacggcagtatggcaggcgacactgagattgacggttatagattagatacaagtggagcttggattaacaactaaaactatatatctgtcaatatatttttaaaacatactatttaaaaggatgatttctgcattaagcagaagtcatctttttttttcttatttatgaaattagaatgtagttaaatcttttataatttttttattccggcagataacatttgaatttaagaatactttttataattttggtaaaaatatctccgttgggtaattgttattaatgttaggtgtatgaaagaaaataataaataatgaaagttatgtgtttatatttagataaaaagtatgatttcctcatagcgaggtacttttgggaagttatatttataaagtataaagataaatagattatcatattaacttattgtttttttgaatataccaatagtaagaagggagttttttacttgaggagaaataattcttatggagtaagaaagaatgttttaaaagagttagctgatggattttcttgcatccatgaaaattttaggtactttagcaaattatctaagaacggatataaagtgcttggggcatctgaatggcttcttgataatatatacttaatagaaaaagagtacaaagcgataaagattgagatgcctatagattattttcagggactatcttctataggtaatgttaattacaatagaaataaagataacaatacaaatgaagataatgaaaatagggaacttattccacgcatttttgtagtggcaaaggactatataaataacgggaatgagattgattgtgataaacttatatcatatataaacggacttcaaggcgatattgaaaacggaaattttaataataaagagaaaattttcactacaggagaattgtgggcattcccattaatgcttaaaatagctataataataaatttatctaagtatactaatgaacttgttgatattcaaaaagaaatcataagaggaagagatatagctgaaaagataatagatgcaattaacaacaataaatttgaagaaaaaataggaagtattaatgttgggaaaaatattggacctttatttttaagagaattttttagtgtattaagagataattctatagaagatccaagaataaatgatcttgtagagtctaaatggaaagtaaattcggatttagataaaaataatattagaagtgatttaagagaagaagttttagaaagaaatattggagaatacataacctttattagaaaaattgaaggaataagctggagaagattatttgaagaaacttcttttgttgaaaaaatacttaaaaatgatccggcagatatttataatagcatggattttgaatctaaggattattataggcataagctcgaaaagatggctagaatatcaaacgcagacgaaattactttagctagtaatattctagagcttgcaagaaatagtaaaaataataaagaagaaaattataaacgccatattggatattacctaattgatgagggaataaacgagttaaagaaatatggaaataatataaaaacaactatatctgcaaatacgtatgtagcatgcaatatttttggaacactcttaataagttttcttattttattaataagcagcttattaggtgttagatacactttggtacagtacgtaatttcgttccttataatattaattccagtgaacgaaataataattggacttacgaattatactgtgggtaaagttgttgatattagattaattccaaaattaaattttagttcaggaattcctaaaggaaataaaactgtggttgtaataccagctatagtaaattctaaagacaaagttaaagaacttatgaataaattagaagtagcatattgcggaaataaggataagaatatttattttgctttgctaagtgattttcatgattctgagcatgagacttctccggaagatgttgagataattaaatcaggagttcaatatgctagagatttaaatgagaaatattccgatgactttaaaaacgaccaaggagttagtgaaaatagattctttttctttagtagaaagagaatttataataagaagcaaaatgtattcatgggcagagaaagaaaacgtggaaagttaatggaatttatggctcttattagaggtggtaagaatcatacttataatgtttttagctcggatattcaagaactgaaacaagttaagtatctaattacattagatgaagatacttttatgcctagggaaagtgcttttaaacttgtaggggctatgagccatattcttaatattcctcatataaaaggcaatatagtcgcaagaggatatggaataatgcagcctaaggtgagcattagcctagaagctaagaatcaaacttatttttcaaaagtatttggaggagaagaaggagttgatggatattccgtcgcttattctgatacttatcaagatttatttggagaagggtcctttactggtaaaggaataatatgtatagatgaattttataaagtgttaagtaattctataaaagatgatacagtcttaagtcatgatttgcttgagggtggtattgcaagatgtggattattaagtgatgtggaatttattgatggatatccagcattttatgaatctagctgcaaaagattgcatagatgggttagaggtgactggcagctaataggatggttattttcaaataaaataaatttattatataagtggaagatatttgataacctaagaagaagtttattagcacctaatttacttcttgctcttatattatctctcactgttttatttggaagaagtcaggttgcacttctcgccttcttagctttaataactccattagtatttgtggtaacagattttgttgtaacacctaaaaataaattaatgggagcatttaaaacgctagagcagatagtgctaatagtaagctttattccttatcaagcttttttgatgcttgatgccataatagtaacactatatagagtaatgttttctaagaaaaatcttttagaatggcagtcagcagaacttgtagaaaaaaactcaaggaataattttattaattatttaaagagaatgtggattgctcctataatgggtctgcttgtactatacttatcattttatagttcgttaggagtagttacttatagtgtagtagttgcggcattatggatagttagcccttatatggcttataccataagtattaaacgtccagaacacaagaagaatactttaaagaatgaagaaaaaacttacttaagaaaaatttctagaagaatatatgcttattatgaggattttgttaatgaagaaaacaactacctagctccagataactatcaggaaaagccatttaagggagttgcacatagaacctctccaactaatataggcatggggattacttcaagcattgctgcatatgacttgggatatataactatggcagagtttgttgacagaatagaactcatattaaatagcatgaaaactcttcaaaaggttaatggtcattatctaaattggtatgatacaaaaacaaaagaacctttatggcctagatatgtatcaacagttgatagtggaaatcttctaggtaacttatgggtactaaagaggtctatggaagagcttaaacataataaagttataagagtaaaagaagttacatctttgaatgatatttacaaaataattgaagatgaagcccctaatttaaagcttaaattttcttcacatattaatattggagaatatataaatgtattaaatgaaatttcctttaaacttcaagatttaaaggaaacagagcagataatcagtctaaagcagaaacttaagtcggaaaataataatatgaataatgaaaataacttaagtgatgaagaggaaaacagtataggcgaattaaaacttgagagtgaagaaacaagatattggattgataagcttataggtgaggttagaaaaaagattagctattataatttcatttttgaaggtatagaaaagttatatagtaaggaatttttcgaaggagtcccagatattgttgaattaatccacagatgcgagaattatagaagaaaaaatggggataatttcagaggcaaatttagagaaaagataaataatttcaaaaattacatagataaaatagataatataatacaagatattgataaaataacagaagaaatggattttacttttctttatgataaaactagaggactattctctatcggatataatgtagaggaaaattctcttggaaattcctattatgatttgcttgcatctgagtcaagaatagcatcttttgttgcgatagctaaaaatgatgtgccttcttcccattggtttaagctaggacgttccatgactaacgcattccatactcattcactagtatcttggagtggaactatgtttgagcattttatgccatcattaataatgaggaattatcctaagaccttacttagtcaaacttataagtctgtcataaaggcgcaaaaaagctttgcaaaacaaaagaagtctccttgggggatatcagaatctgcattttatgaatttgatgcggcagaaaattaccaatacaaggcatttggagtgcctggacttggtcttaagcggggacttgaagatgatcttgtaatatctccatattcaacattaatggctatttcttttgataaagattctggaattaaaaatcttaaagaacttgaaaagttaggcgcattaggaagatatggtttcatagaagctttagattatactaaagctaggaaagataagtacataatgacactttctaaaagtgatcttcttgagcagaatatttcaacaaatggaaaaaattatacacaaaatgtggataagtatgaggattatgtggataactacgaaaaaatagtggataatacacaggataaaaatacaagttatatgaatgataagcatgttgataatgtgaataatgtggataagaatgatgaaatcagtaggattcacatgaataatgacgatgagggcaattatgataactcaagttatccacagaaggtcaataaagttgcaacttatatggtacatcatttaggaatgtcacttatggctttggataatattctatgtaatgatattttgataaatagatttcacgatcttcctgagataaaatctacagaacttttactaaaagagaaaattccacaaaatgttgtttttgaaagaaatgaggatttttctgttaagaatagatattttgagggagaggttttaattccaagagtatttgaaaaagtaaatcaggacagtccacaagtattactattaagcaatggtgaatattcatctatgttaacagtaaacggaaatggatattcaaaaaagaatgatactatgctctatagatggaagggaaattctacaagtgatgatagtggaatgttcttctatataaagaatttgaattcaaatgaatattggagctcaacctttgagccttgtaaagatcttggggataagtattcagttgagtttaatctagataaagctaaatttagtagaaaagatggtaacattgaaacttcgatggaagtttcaatatcatcagaagaaaattttgaagttagaaaattaactttaaataacaaaggggataatggaagaagtattgaaataacaagctatatggaagtgactttagctacattcagtgctgacgtagttcatccaacattttctaatttatttgttcaaacagaatatgatgaaaaggaaagtgttcttataggaagtagaagaggtagagttaagaatgcaaaaatcccatatattttccataaggcggttgttaatggagacttagaaggaagtatttcatatgaaacttcaagaataaactttataggaagaaatagagaattgaagaatccaaaagctatggataatgataaggctttagataatactgtgggaacagttttagatcctataatgagtataagaacaagaattagattagagcctaactccaagaaggaaatttattatataactggaatatgtgaatctaaagaacaaatacttgaaatatgcagaaataacaatgacaacagtaagctagagagagtatttaaaaattatagcataagtgcacagcttgaactaaagactttaggaataagaagtgctatagccaatatattccaaagtgctgcaagctcaattttctttctaactaatactagaaaaaatagagaagaatatattagtaatatttcaatgcatcaaaaggatttgtgggcatatggaatctcaggagatttacctattataatgttgtctatagaaaatgaagaagacataaatttagtatatactatggtaaaattccacaattacttaagaattaagggggttaagctagatttaattatatataataatgaagaagtttcttatgatgaaccacttcaaaaaaacataatggaagtaataaggtcatccaatgtaggtaattacttaaataaagcgggtggaatatttattcacaataaggcaaccatggacgctgaaattaaggatttactaataggaatttctagagtatatgtagataagaataatccattaagttcatatgcatataatgaaaagaattttaatagatatgtggacttagatgatgagggattagattcgcgtatagctttaagaaataattcaaggtttaaggataaatataagaatgaaaatattaatgaagatacagatggcgaaaacataccttatgaagtatatgataatgatgaagaagtaattaatattcatgatttaataaagaatattaatgagccagaagatcaagatgatattgatgaattagaaatagataagaaatctaatcaaagtaagaaggaaagagagttagtttataactcagaaatttcaagtttagttgatttagatttggatgtatcaaaagattctaataattatagtaaagatgcggatgaagatcctgatgtaagagatttagatttctttaatggttatggtggattttgcaagaaagataatagttatataataaaactatctaattacagaaatacgccagcaccttggattaatgttatttcaaatgatgacttcggatttcatatatcagaagtaggatcaggatatacttggtgtggaaattctagagaaaataaaataacaccttggagtaatgattatattagagatcctataggagaagcattatatattaaagataatgactctggtgagtatttttcaataacgccaaaacctgtaagagattcaggtgattatttaataaaacatagctttggatactctgaatataggcatacagcatacaatataaaaggaaagctagaaatttttgctcctaaaaatgaaagattaaaaattcagagggttacgctagaaaacttaagtaatgaggatagaagtgtttcgctattctactatgcaaaacttgttttgggtgtttatgagtatgatagctcaagatatatctcaacatatataggtggagatgaatcacactataaagaaacaatagatgtagtaaatggaagcagcattaaaaatagtaatgaagattttacattcaaaaataaatttataggtgctcataatccatacagtgaatattttggaaaattaaatgcttacttaaccattataggtgggaaagaattgagtttcactggggacaataaagagtttttaggtattggaggagaaatctttagtcctgaggctctaaaacataataggttaagcaataagtctggtgggatctatgacccttgtttagcagcacaaacaagcattatgttaagaaaaggtgagaaaaaggaactgctaatcctatttggtcaagatgaaaaagaaaaaatagatgaattaataagtaaatacaagatttttggaaatgcagaaagtgaattagataaagtaaaacaatattggagcaatttcctaggaaatatacaagttaagacaccagataagtcattagattatcttttgaatggatggcttttatatcaaactttaagttgtagatatttaagcagaagtgcattttaccaaagtggtggtgcttatggattcagagatcagcttcaagattctatgtcacttggctttgtaaatccagaaataacaaaggcgcaaatactaagaagtgcttcaagacagtatgtagaaggtgatgttcaacattggtggcatcctgttgttaattcgggaataagaactagatttagtgatgatttattatggctgccttatgtaactgccgaatatattaattctacaggagattacgaaattttaaatgctagtgctccgtacttagaagatgaacctttaagagaaggtgaagatgaaagatatacaatagtaaatcaatcatcaaaagaaggaactatatatgaacattgtttaaaagctatagaaaagagcttgaagtttggtattcataatattcctttaatgggtagtggagactggaatgatggaatgagtactgttggaaacgaaggaaaaggagaaagcgtatggcttggctggttcctatattcaatattagaaagttttattgaaattgcagataaacaaaacgataagcaaacaaaagaacattttgaagaaagaagagagtttatacgagataacctagagaaaaacgcttgggatggcggctggtatagaagagcatactttgatgatggtacacctcttggttcaagagagaatccagaatgcagaattgactcgttagctcagagctgggcaattatatcaggtgcaggacagaaggaacgtagtattgaagcaatggaagccgtggataataaccttgtaaagaaagataagggaatgatcctattgcttgcaccaccatttagtaattctaagttagaaccaggttatataaaaggatatgtgccaggtgtaagagaaaatggaggccaatatactcatgctgcggtttgggttatacttgctttaactaaacttgggcttggtgataaagcggtaaactactttaatatgataaatcctataaatcatgcaaaaacagagttagagtgtatgacatataaagtagaaccttatgtaatggcagcggacgtgtatataaaagagcctcatgcaggaagaggaggctggagttggtatacaggagcttcaggatggatgtacagagttggcgttgaaaatatcttgggacttagaaaggttcaagataagggatatgctataaatccttgtataccaaaagcttggaacgaatttgaaataaagattacaaatgaaaaagaagattacattataaaagtatctagattaaatcaagaaaatattaatgaagttaataataatcaaatgaataacagtaaaaataaagttaacaatagtgaagttattagaaataaaaatgaggagattaatggtgaaagtagaattagcaagcaaggaaggaatataataaatactaataatatgaaggtgattataaatggtgagaatataaaggataatatcattccgagaaatcgcggaaaattagatgtgtttgtgtatttttagtacaataaattttgagcagcataagatatatgaaattatcctatgctgcttaattttatacatatgaagttattactaattaatatattatttgttgatcttatattatgcagtaaattttattgtttaggaactttaattcaattaagagttttagtttatagaaaattttaaattatatttctaagaagtatatgatgaagaatgtagttttatagataagatgatcaaactcctcctattatcattaagttttagtgaaaaatacgaataattcttcgaaatattatgatataattaataatgtgtaaaaacttattgtttttgtaaaaaataataagctaaatattttagtttatataagggttttattatttgtattaataaaaagagatggagggtgagaaaaatgttgttcaaaaaattaaattttcatagtattagaataaaactaattattagcttagttttaatttgctttattcctctcattgtagcgggagttttttcttataaccagtcaaaatcaatacttagccaaaaattaaatttaacaagtaagcaaacgctttctgaagtgaatagtggactagataattattttgctggatttacagaaagagtaacaatgttatcaaacaattataatttagtgaatgttgattatggaagtaattttgattacatacctgatttattgaaaaacttaaaagaaagtaataaggatattttcgatacatattacggtactgcttcaggtaaatttgcaatatatccagacacaaagatgccagaaggttatgatgcaactaaaagaccttggtatcaagaagctataaaagcaaaagggaagcctgtaataactaagccttatcaagatgccgccactggaaagacagttgtaggaattgtacaagcagttgtgaaagataatcaaattgttggcgttgttggaatggatttaacattgactgcactttcagagcacatatcagcaaaaaaggtaggtaattcaggaatattatttattacagatgcagatggtataatgttagcacatcctgatgaaagtagtattggaaaagatgatgttacaaaattatcatattggaatgaagcaaaaacaggagatagcggctttattacgtataattacaatggaacagaaaagtttggggcatatacaactaataaaataacagggtggaagttaatcgcatcattagaacaaagtgaattgtcaagcgacacaaaatcgataatattaactacttctataataatattaataatgttaataatttcagtcattgtatcgttgatattaagtaaaggaattgcaactaatattaaaaaattaaaagaagtatttgccaaggcttcagatggagatttatcaacatttatagaaattaaatcaaaagatgaagttggtcagcttgcaaatgactataattctatgataaaaaatataggtaaattattagaaagtgcaaaagaaacttctaacatagtgtttgagactacagctaacctttcaagtatggctgaagaaacgacagcgtctatgtcacaggtttcgctagctgtttcagagatatcacagggagctgtaaatttagctgaaagctctcaagatactgctactggtgtaggagaattatcaaaaaaattagataatattgcagatgccacaagggatatgaataaagtatcagaagaaacgaaggggtttagcaaacaaggaataattactgtaagtacattaatagataaaaatagtgaaacaatggaagcaacagaaaaagtatcaaatatattctcagatatgaatgaaagtgtaaaaatgattatttcaatgtccgatactatatctgaaataacagaacagacaaatttactagcattaaatgcatctattgaagctgcacgtgcaggagaagctggtaaaggatttgctgtagtagctgaagaaataagaaaacttgctgaagaatcccaaaattctacagaacagattaagtcaataacaggagcaatccaatcaaaggcagaagttgcagctaaagcaatggaaaacactaaaaaaattaattcagagcaaaacgaagctgtaacaaaaacagagtcaatatttaatgatatattattttcgatcacaactttaacagaaaaagttattgatgttaaacattcagtagatgatatgcaaattcagaagcagatttttgttagtcaaatagaaaatagttcttccatttctgaagaaacagcttcatcaacagaagaagttactgcatcagcagaagaagtaacagctacaatggatagatttagccatcatacagaagaattacaacatttatctgaaaaattaaaaaaagaaattgataaatttaaagtttagagtctaaaattagaaatttaaaagtctaaccgaaagcctatatatttttgtttcacagaaatgtatgggcttttcagttgaatagtataattatctttgcaatttacattgattaaatgtaattatatgttataatttatcaataatgcatgaaaaataagcataacttgtaaaagaataagtatatttattgtaataaacataatttttatagtgtaaaaaataattctaaaactactacttattttataagaatattgataaggggagaaaataaatgggattgattagaaaacaatatgaaaaaacaatggacaagcaaacaaataataaagataaaaatagctctgggaaaataaagagcataaaaagcgaactcctaatcacaatgttatcaatatccgttgtactgactcttggaattattttatgtgtaagcactattttatcgaaatattatgataatgaaataaatagtaagaacgaaatgttatctaagcttatatcaaaaaatgtttcttcttttatggatacggcgtataaagtgacagaagatctagcatataattcagaagtaagagagggaagtaaagatacaaaggaaaaagtacttaaagaaactaaagacagaaatccatattttgaattattatatatgcaggatgaaaaaggaatgcagactgggagatcatcaggggatcttgctgatagatcagacagatggtggttttcacaagcaaaaagctctttatcatcatttgtatcaaagtcttattattctgcttcttctaagaatccagtaacttcaatatttgttcctttggttgaagataataagtttgttggagtaatggggtctgatattaatttagaaaaattgcaggaagtagtaagtgaatattcagatgaagcatcaggaagatattctttcataatagatggagagggtgttgttgttgcacatccgaatactgaagtgattgaagaattatataattataaaaaccaaactagaacaactggagtcaaagagggaaatcctaaggaagagccgatagaagtatcagatggactaaaagaaatcatagctcagttaatggctggaaatgatggtagcattaaatataaagaaaatggtcaaaattactatgcatcttatacgaacataaaattagatggaaattcacttaattggtcagttataacagttcaaaaggaatctagtgcaaaggctattataaataacataacagaaatctcattaatcgcaggcttaataatattacttgcagcagctgcagtaatcatgtatgtgtcgaaaagaatttcaatgcctataatagaaatatcaaacttattatctatagcatcaactggtgattttacagtgaaatcttctactagagcgaaaaatgaaattaaattattaggtgaaagcttcaatgagatgatgagcaaggtttctgctttattaatcgaaacaaaagatttgactcatgatatgaaagagagttctgcaattttggctgaaaagtctcaggaaacaactaatgtggcaagagatataaatattacatcacaggaaatagcgcaaggagcatctaatcaagctagtggagcagaagagagtgcaagacttggagaagacatgaggggagaatttaatcagttagaggaaaagactaatctaatgattaatgaatcaatcaattcatctaaagcaattgcaaatggaattaacaaggttcaagatttaaaagaaaaggcacaaacaacaatttccattgtagaaaaaactcaaggaaatataggaagcctaagtgataaatctaagaatatagaaaatatacttggagttttaaaggggattgcagagcagactcagttactcgcgctaaatgcatctatagaagcggcaagagcaggagaagctggcaaaggttttgcggtagttgcaacagagattcaaaaattatcacaaaattcagcagtatcaactaaaaatatagcagagataattttaaatataaagcaagatatattaagcagtgtaagtgatatgaaaaaagtaaaagaagtatccatggatcaatttgtttcagtaaacgaagtgaatgaagcctttaatagtattacgcaggcaactgatacaataacaactgcaatagattatatgggaagctttgttgaagaaatgaatgacaaaaatgaacaagtagtaaattcaataaataatattgcggcaatatcagaagaaacagcagcatgttcacaggaagtaacggcatcaattcaaactcaaacggaagctattttagaagtatcacaggaagtggaaaaactgaaagaaaaagctgaacgtttagaaatggaagttgataagtttaaaatttaataaattctcaatgtaaatagatatcatgttactattctggtagtaatattgatatttatttgctatatcacataaattattaataattacttgataaatagtaaaaactttttgtagaaactgtaaaaaatctgttgaaaatactaaagattgaatatagaataatatctgaaaaatgaaatgaaacccaaataaccattttgcaaggagtatacaaatgagtttatattataagttgaagcataatatagttgatgtgtttttcatatttttaggctgcatgattgcatccttaggcgtgaatctatttttagtacatgcaaaacttttaagtggtggtgccactggtattgcactgattttagagtacactcttaaagttccatctggagtagtaatcttaataattaatttaccgttacttgtattgagttataaaaaactcgatagatcatttacgatttatacaacaatagggatgcttagtctttcagcttctctgcttataacaaaaccactttcgcgcctaattgatatgaatggtgatttacttatcttttgtatatatggtggggttttatgtggtattggttacggaatggtatttttaagacatggttccacaggaggaacagatattataaccatgcttattagaaaaaaatattcgaattttaatataggaagtttaggattttctctaaacttaataatagttattataggagcattaatatttggtattccacaagcattgtatactcttatttctttgtttattcaaagtacagttcttgacagagtattaaaaggatttagcagtaaaaaacttcttctgattctaacaagaaaagaaaaagaaattattgattatgtaataaaagatcttaaccgtggagttacatctttgttcgcggaaggtgagtatactcatgataaaaagaaaatgctttactgtattgtaagctcacaccaaatggttgaactaaaaagtattgtgcatcagatagatccaggagcttttataacaattattgatatatctgaggttagaggtaagggctttttgacaatttaaaataggttaaaaatatgaaagtccaccataaaaatttaatttatggtggactttttggaaataagcactaaattaaaatgataaactttagtgcctgagtattatggggtacgaatattattcttaccaacagcgggaaatttattcaaaaatatattaaattttttgcagtccttatataactaatcatctccatctatttcataattatcggaagaaagcatatcttgtgtgtaatcaaattcttgactagctatattatttacaacaatagggtcaactgctggattaggcatatttacaggaaaatccacgccagttgcactttcaacatcatctctgcttggatgataattagttctcatttttggcaagtaggaattagtaaagtcttttttactaccatctctcacatcagaagtatgagatactttcttttctttactcatataaaatcactcctaattttattaaattatttttattaagctcttcatattaaatcactatatttagattcatcagagtcgccgtcagcatttagatcaataagctctgtatctagattagttctagatatatttgcattatttaaacttttagcatttctttcacctgaatcagcagtctttcgtacatttttagaatcagaagcctttgactttggtgaactttccttactatactcttccattggataatcatcgccagggtttatactaaatggaatttttgattgactcataaaaatcactcctatcttttgctcaatattatttacaatataaatatatatatagaacagattttgacttgttatagataagccaattataagctggatttatactatgaaatatatcccaactagaaactggaacaaaagtatattattcatttcggcgagttatatgcataagttcaggtcttagttgggttatctatatagataaagttatattcatgctatttatattagtgattttggtttgactggttcaggatgttccaatccattagcattttcaatacttttttcacttggagcatggtcggcttttgaatccggaagatacatactttttattttttttagttcagaatcatttgggtctgatggatgtgaatcagttaattcttctccagaataatatttttcattttcattagatgatattttttctttactcattaataatcactcctaacttctcaaatattatgatttttatattcaaaagcatcttcatcattcatagcaacaggtcctgttactggatgcggtttagaagatgttgaactcgttatatttttattagggccgtcagtcgaaaggggatttaaacttctagttggtgcaatgttatctcgtcctccttgcctattagaagattcaggccttgtaccagataacttctcaacatcataatctcctggagtaggattatatggtgttctttctttgctcattgtaatcactcctcacatattaatttttggaatttatttatagtacataatgtctaaaattttgagataactaaagtaaataaaacttagttatatcttattatctgaaaaaagagtcgtattaatgctagaaatatttagattttatataaaaaacatggtaaaattatgttaagtgatttttttttgttatttttaaaaaattcactttataatggatgaggaggaattttatgaataaaaatataaaaagaataattgcgatcacagttgctgtcaatacaatttcaacaatttcacctacgacattaaatacatattttgtaggagcaaaacctgtttatgcgtcttcatattctccagacgatgaacaattaaaaactctaaagataaaatctttagatggagaaactcttgatttgcgtgatgggtataatggagatacagtaaaattaagcgatgaaacagaatactatacaaagcttactgatgatagtgatggaattaagataacggctgacgctgaaggtgatgactatgtagttaagatttttacatctgatgcagaaaatgctacagcttatgatcctggggacgaaatcttacttggaaaaggtgatacaactttatatataagaacttataagtctaaatcagaatttaataaagtaaagaataatgtatcaaattgtaaagaagaatatacgctaaatgtaagaaagactaaagaaagttcttatgaggatgattctcaagattcgatatatttagataatattgacttaagcaaaggagatatagatttcataaagggaaaaacaagctatgatataaaggttgatgaaaatgttgagagcatgtggattaaagcaattcctgagagtaatagcgacagagtcagagtagatggatctttagtagattctagcgataattataaaaaaactgtatctttagataaaggtaaaaatgagattaaaataaaagttacagatagtaaggataatcaaagaacatatacattaaatgttactagaggagacgattctgataacgaagatgatatatacttagatcatataactttaagtgaaggcgatattgacttttctaaagatgataattcatacaacgttgatttagatgagtctgtaagtaaaataactataggtgcagagccagaagatagcgattattcagttacaattgatggagatgaagtaagatcaagtgatgactatgaaaaaaaagtatcattggataaagggaaaaatgtcataaaggtaaatgttgaagatgagttaaatgataaaaagagaacttatactttgactataaatagaggtaaggaagcagatgatagcaaggacaataatactggggatacatctgataaaaaatctcaatgggttcaaaccgatgatggttggaagtattatgatgaaaatggaaaagtattaaaaagttcatggctttatgataaagatcaaaaagtatactgttacttagataaagatggtctaagagttacaggctggcataaagataatgaaaaatggtacttgctagatagtaagggagcaatgcttacaggttggcaaaaagataatgaaaagtggtatttattgggatctgacggagcaatgcttacaggctggcataaagaaacagtagatgatcaaaaaaagaacactgatgcatcaactaattcaggagataatgatactaaaaaagttgataattggtattatttaaatcaagatggatcaatgaggacaggctggttatcagatagtggaaagtggtacttctttaatgcagatggaacaatgcaaaaaggatggttaattgactataattcaaaatactatttaactgaagatggtagcatggcaactggaacaagaactattaatggaaaagagtataaattcaataatagtggagctttaatactttaggaaaatattatgaacattaatttaattgtacgtttaatttattttattagattaaattatagatgagacaagtgagacttgaatttatgacatagttcgccgaaataaggattatgctgttgtttcagtttctaaggaaattatgatggatgattctaagatcacaagttgcatccaagatgctagcctcaaaggcgagctttgaactagcatacttggaacaacttttaatctaagaatcaaaaccatcaaattcctaatgaaacatttcacaaaagcataattcttatttctagttgggatatatttcatagtataagtctagcttataattggatatagatacccacgctcgaaagtagacttatacaattatctaaacttagcaaattcaatagcttaattaagtgtataagttaatatacgcctctgtttatctatatttgtaatcacaagggtcatactatggagaaaacatttgaaaatgagctgttaaaggttcttagttgcaggttgttccattttattttgggttctcgaacttcctcagcgaatgtaatgagttgagcttcaataggaaagttggagcatgctaaagtgtgtgcaacctgctgcttagatcttcaacgatattttcatagcttttcggaatcaaaatatttatgatttcggtaagttatcacataaatctagttttaaagatatttatctatactagtaactaaacaagaactcgctttattcttataagtgagttcttgttttaattaatcaaatgattgctaaattaaagtttaaaccaacaatattatagattattcgattatagattgttcatgcgaaatagctacatatattatgggataaaaatcattttatatcttttgatgatatgatatatacattaaaaaacaattcttcatcataagtctgaaaatgttgcaagaattttattagaaattttgaaatgtgcattgtgaattgtaacatatataagttaattatttataaaaaattaatatttatataatagaatttttagaactatgtagtatacttggaatagtataggattatagttctatatttataattaaattaagttatgttattataactatataatgtttatttatataataagtaagttatgtaaaagtaaatagattaattttataaataacaataaggaggaagtttatgcataaaaaaattaaatatataattgcagcaactcttgttgttgcagctgtttcaggatttgcaccaagtaacaattttctattaggaagcgttgaagcttatgcatcaacatataatgatgctagtaatggagaattaaaatcgttagatttgacttggggtagcggaagtaaaattaaattgcttgatagttattctggagatgaagtagatttgtcaagcgatactgactattatgtgcagcttaaaggtgtgagtgactttaatgtagctgcagaagtaaaaggaagcggatatgtagttaagatgttcacttcatcaagcagatcagaaaaaggtgaagatgttggacaagatgttaatatcggttcaggatataaagatatctatctaagaacatataagagtgaagaagcatataaggaagcttataatgacggagatgtaagtgattgtgaaaagacttatattattcatgcaagaaaagaaagtagtacatcagaagcagaagaagatagagaatatgcttatttagatggaatttacttaagtgatggaagtgttgatttttccaaaaataaaacttcttatgatgtgaatgttggtgaagatgttgacaaattaactgttagagctaaccctgacgatgatgatgattatatagaaattaacggaaactcagtatatgaagatgacaatttcgaaaagacagttaatttagataaaggaaataatactataacaatatatgttgagcatgaggatgaagatacaacttatactttgaatgtatataggggtaaatcagcaaataaaactgattcttcaaacggccaaaactttgcaattcaaactcaagaaggcagccttaatgcatggcaaagagtagatggaaaatggagatatgtagatggtacaggctcagttttaaaaaataagtggtggtttgataaggataccggaaagaattattatttaggacaagatggatttagaactacaggatggtttagtgataataacaactggtattatttcaacgaaaatggtgaaatgcagacaggatgggtaaatacaaataaaaattggtattatctaaataaaagtggagccatgcaaatgggctggttagaagattcaactggaaactggtactaccttgatggtagtggagctatggagacaggatggattgaagattcaaatgggaaatggtattacttagattctacaggtaaaatgataaaagattctgcaataggtgcatataaattaggcacggatggagaattagaataataatacttctgtaaataaattgtaaacttgtgtgtgtcaagtgcacaatagtgaattaagtggtaaaataatcataatatgtaattaaagcacaatcgaaaaataatagacaagtatgcatacctattatttatttcgcgtgcttaaagtggagggagaacattatgaataaaaatttgaaaaaaatagttgcaattgcattagcaataggaactatctcggcagtagcacctgcaacaaacataaattttttaactacaaaagcttatgcatcatctgataatgatgagactgaacttgaaagcttacaattgcttactgaaagtggaagtaaaataaagctttacgaaagcagtagctatgatagtgatgataaagttgatgcagatgatgtggaggctggtgagaagtattttgctaagacttcatcagatactataaatatagatatagatggaccaagttcaaagtatgttagagtttttaagggaacttcagattctactaaaggtaaaaaaataagtagtgatataagtttagataaagattcaactactactcttactgtaagagtgtatgatgaagaaccagatgatgatgtaagatatgaagatgacgattattcaagtgaatatacaataaaggttaaatgtacagctgattcttcggattcagatgatgaggattcaagtgacagttcagatgattacgatgatatctacctagatagacttagtgtagatggtcaaagtataagtttatctaaatcaaaagttgaatatacttataatgtaagtagtgatacagatgaagtaacaattaaagcgactccagaagatgaagattatgacgttacaatagatggcgatagtgtagatgatgatgataagtacaaatcagatgtagatttgaaaaaaggtgaaaataaaatcaaaattgaacttgaagatggtgatgatgaaagagtatatacattaatcataaatagaggcggcacatcatcaactacaggaagtacaacaaatacagcttcaggttcaccaagcagtgcaactgatgttgtagcaactgttacaaataaatgggtacaagttggcggaaactggcaatataaagatgcaacaggaaatacagtgaaaaatacatgggttcaaaattattttgtacaagctgatggaaatatggctactgggtggttaaattatagtggaaagtggtactatctaggttctgatggagcaagaaaaacaggatggcaacaagcaggtggaaaatggtactacctagactcagaaggtgcaatgcaaactggatgggttagagatttaggtagtggaaagtattactatttaaatagcgatggatctatggcttataatacaatgattggtaaatataagctgggatcagatggagcttggattaactaagaatataaatagtataataactgaaaaagcaaaagaacgtttatttaatagacgtttcttttgctttaaataaatatattcaaaagctttaaatatatttacaatattttatattagtggtaatattactaaaaaactcaaaaagcctactttaattgttaatcctgatatataattaattaaggatgtatttactaattaaatatataagtagaaacgggggaaataaaatgaagaaaaatatgattaaaatagtttcaatagcgttagctcttggaatcgtttcagcagcagcgcctgctacaaatataaatgtattgactacaaaagcttatgcagcaaatgataacgatgatgattatttggatcgtctagaattaaatgatgaagatgggaacaatataaaactatatagtgatagtgattatgacagcaaagtaaatgctagtgatgtagaagaaggagaaacttattacgcaaaaacttcatcagatactgtaagtattgatattgatgggcctgatgaaaaatatgttagagtatttaatgggacatcatcttcttcaaaaggaaaagaggtaggggaggacgttgatttatcagatgattcttcaactactactcttacaataaaggtatatggcaaagaaccagatgatgatatgagatacaaagataatgatgattataatgtcttaagtacatataggattaaagtagagaacgcaaattataatcaaaataaggataatgataatatttatttagaaaggctcagcgtaaataataataaggttcagttgtcaaaatctgaattaacttatacttataatgttgctagtgatgtaaagagagtaacaattaaagcaacaccagaagatgacgattatgatgttactattgataataaaaatgttcaaagtgcagataactataaaaaagaagtggatttagatgaaggcacaaatgaatttgaaatagaacttgaagatggtgataaagatagagtatatactttgataataaatagaggaaatccttcatcaaatggtacaagctcgcaagatacagcagaaccagaacatcaagatagtatttacctagataaactaagcattgatggcagacttttctcattatcacaatcacaagtaaattatagttctaatgtccctagtgatgtaaataaagttacaattaaagccgaaccagaaaaagatttttatacagttaaggttaacggtagtgaagtttttgaagatgatgattataagacaacagttaatctaaaagacggtgaaaataaaattaaggtagatgtcaaaaatgaaaatagtggtgaagaaagagtttatactttgactgtaattagaggaagtgtgacttcaacacaaaataacaccactggagtagaaactaatgcgaataaatgggtacaagtaaatggagcatggaagtataatgatgcatcaggaaattttgttaagaatacttgggtaggaaattattacttacttgacagcggaaatatggctactggatggttgaattataacggaagctggtactatttaggaagtgatggagctagaaaaacaggatggcagttagtagatggagcttggtattatatggattcacaaggtaagatacaaacaggctggattaaagattcaaacggaaagtattattatttaaatagcaatggtgccatggcatataatacaacagtaggcggatataaattagggtatgatggtgcttggatacaaaaatagaaatcaccagattagaatgagaatgcataataaaagtggaggtatagactatgaataaaaatataaagagagtgattgcaattgtactagctataggaacaatttcagcggcaacaccagtttcgaagataaatctattaactacaagggcttatgcttcgactactaatgatgaaagtacattggatagtttatcattagatgatagtgatggtaataatgtaaaactgtatgatgataatgattataagaatagagttaaggaagaagatgttcatgaagatgaaacatattatgccaaaacttcatcaaaaactgtaagtgtggatataagcgggccagatgataactttgtcagagtatttagagatagttcagattctactaaaggtaaagaagtaggggatgatattcagttaacagataaatcagttgttactgatcttattataaaggtatatgggaaagatctagacggtgaaagtgtaagaaataatgagcatgatgataatgagtatgatttgctaaatacatatgaagtaaaagtgagacatgtagacgaagctgattcagataaaacagattttgatgatatttatttggagagacttagtatagctggaagtactataaatttatccaattcaataactaagtatacttataatgtagatagtgatgtaaaccaagtagcaataaaagcaacaccagaaaatgataactacgatgttactatagatggtgaagatgctgattatgatgataattataagagaactgttaatttggaaaaaggtcaaaatatcataaaagtagaaattgaacataataataaagatagagtatatactttaattataaatagaggaaatgtttcttcaagtaatacaaataatagttcaactaatactaatacaaatacaggaagtaaagatgttaaagctaatcaatgggtacaaacaaatggaatatggcagtataatgatgcagaaggaaaagtagtaaagaatagttggatacaaaattattatttaaactctgatggaaatatggttacaggatggctaaatcttaatggaagctggtattactttggaacagatggagctaagaaagtcggatggcaacaatcaagtggaaaatggtattatctagattcagaaggaagaatgcagactggatgggtaaaagataggaatggaaaatattattatttaaatagcgatgggtctatggtttataacactaaaattggtgtatacagattaggcgctgatggggcttggattaaataaatttaattttaatcgagttaaaaataaagaacgcttatgaaataggcgttctttatattattttatataaggcataataaaaaaataaccatggtattttatttcatatgcctaaaaggagagagaatatatgaacaaaaatttgaaaaaaataatagccataatattagctgtaaatactgttagtacaattgcaccagtagctaatttgggtctactaactactaaagcttatgcagctaataaaataactaatttaacagtagaagattcaaacggagataatatgtctctttatagtgagagtgattgtacagataagcatagggtagacagtgatgatgtacagcctggaaaaacttactataccagaaagacttcagcagatgaaataaatatagatgcagatggggtggattcagataatataagagtatttgaagaaacatcatcagatactgaaggaaaagacgtaggagaggatgttgacttatcatctggaacaaatattattactgtaagagtatataacggagatccgggaacagtaaaatatagtgataattcttatgtaaatgaatataagattagagtaaaatactccggatcaaatgatgatgacgatgaagattcagataatgtatacttaagcagtattacgttaatgggagggaatatagacttctcaaaaaaagtttatacttatgacgtgcaggttccagaagatttaagtaaaattacaattcgtgcaaggcctgattgcgatagcggtaaatatgatgattataaggtaaaaataaatggagtaaaagttgataaagatgataaatttaaggatgatgtatccttaaataaagggaaaaatgtaatagatataaaagttgaagatgatgatgataatgaaagagtatatactttaaatattactagaggtaaagataactcaaataataattccaaaagcagtgaacaagcagaagttaccaaaacaagtcaatgggttcaagttgatgggaaatggcaatacaaagattcaacaggtaactcagtaaagaatacttgggtgcaaaactattttgtacaagccgatgggaatatggcgacaggttggctaaataataatggaaagtggtactatctaggcgatgatggagctagaaaaacgggatggcagttagtaaatggaaattggtactacttagattcacaaggaataatgcagattggatggattaaagacataaacaatggtaaatattattatctaaataatgatgggtctatggcatataacacaacaattggcgaatacaaattaggatcagatggagcttggtacaatagataattaggaagaaaattttgaattagtagatagtgttgcgtagtgagaatcctagccgaaattggatacatatttgttccataggactatgaaaatttcgctgaaaggttctaaatggcaggttgtgcccattactgcatgttcccactttcagtgtgacaagcattgaatggaacaacctcccattaagaacctaagcagcttattttcaaatgcctattttacaaatatgtatccaatttctctgttgtgatatttcaaattctcaatattgaacattatatggataaacggtatgtaattaataatgaaaaaattaaatttatacaaaaaaaggtaccaaaatgaatttaaatagttgtattgtataatgaaagtttatttggatagttatagaagatattcatttaaaatgaattatatccaagtagattaaaattatagaaatagaactatataacgctcaataatacaattttacttgtataagttaattaatttagaatttaatagaactattttctaaattagctaaaaaatatttatatattttttaaaaaaggacccaaaatgaattttggcattgtattatttagtgatattacagtaaatactaggaagaacagtaaattatgaaagttaatagcattttatgtacaagcattatgtaatgtggtatcatgttatagttaatgtaaatgtgtaataaattacatgtgatttatttgattactaagaaatttatacaaaaatatacattagtagttattatataactttacatagttgtacaataatgctataatttatctgaattttaaaatttaggaggaaaagaaattatgtttaaaagagcaaacaaaattacatctttattagtagctgctgcttcagttatggctttagtgcctgcttacgctgcagacgtaaagaaaattgattcagaagacggtactgtatacaatgcagtagcatacaaagatggtaaatactttgttgatggagaaatcaacgatgatgaagaagcttactatgtagctgacggaaaattcaacaaattagaagatgttgattcaggagatgacgcagatttatttggagaaaaatacttagatgtatcagatggagactacactgttgatttagataaaggtagtgtaactgatgacgatgttaaaggtgatacagcagatgatgctgctgcagctttaagaaagaaaatcaaagacgatacagatgacagatatgctgaagctacaagtgataaagttgtagatgaaaatgaaagtgatactgaagatttaactaaattaaatatagttccaggagcaaaatatagtaaaccttggtactacacacaatatgcaagtactgatgctggtaaattagatggtgctaatggtggaaatgctaaatttaatgtttatactgatacagatggtaattacattgatgcagactataacttaggaaaagttaaggttaaaacaacagctgtttctgcagatgtagatggtaagactataactaaagaagatactatagaaaatacaaatgataagtatgatgctgctggaaaagacgatacacttagagcaagtgttagtcaagtaaaagtgttaacacaagataaagattatatttatagacttgtagatgtaactgtaaaagtttcaggaactactgctacaattagtgaaattaatggtttagctgcaggtactgatgtacttaaatatggtgcagataagcaaacagtaacattcaaagctattcaaaaaatatcaaaagcacaaagttctgatgaagtagatggagctaaatatgctaaatctgtaactacttatgcactttcaaatgattcagcacaaaaattagatgatgcagaattatttacagatcttactcttgatgtaaattatactatagtaggtactaaattagtagcttatactacagataaagcttatactaaagcagattcaacaggagctaaagttcttgcaagagcatatacattaaaatcaaagtcttcttactactatgctgattcagaagatcaaactaaagaagattgtgaagtaagtgctcaagatgataagacatcagctgttcaaacagacgttgatggaaacctttggagattagatggtggatacatctataaattcgatggtactgatgactgggataaagtttacaaagtagacggatctttcgatgaattatcagtttatgacaaagataacatggttgcttggagcgaagatgatgatgtatattcattaatcggaggaaagagcgatgataataagggtgatgaccaaggaacaactcctgtagttaaagctggttgggctcaaacttcagcaggatggacttatgttaaagctgatggaactaaagctactggatggttacaagacggtggtgcttggtactacttaaaagctgatggtacaatggctacaggttgggttcaagatggagcaacttggtactacttaaacggatcaggtgctatgcaaactggttggttaaatgataacggaacttggtactacttaaatggatcaggtgctatgttagctaacacaactactcctgatggatattatgtaggagctaatggagcttgggttaaatagttttaatctaaacttattagataaataaaaaaggacaaggcttagccttgtcctttttttatcaataatattattatataatgaatttacatttgaaactctaatgggctaagtgctaaattaagattagaaagtagaaaattaattgtgatatattagagagaataaaaggattttatgataataaaaacatggtaagatatgataacaaataggggtaattcctgtttggagaataggtaatttaattcacttatattgtgtgcatgtatcatcatttagaaatattgaaatagattcctaagagttttaggattaggatatatattttgtctatattcatattaatatcaggcttgcttgcaacgttctaaatccagagccgctattatagggtaatttatttaagaaatcccgctatattatagttaacttgaataaattaataggctttagtagtgaatcatatgatgaccatttttagccttactttcaagttataaaaccattcttagatttcctataaataatatttattatttcgtaataataaaattttactgtaattattttgtattagtttattttatataaatgttcttattaagtttttatctttctttcttgttaatatttttgtgtttttgtgtaattctattggcaagcaagtattttaatatccaataagctatggtaagtataattgcataagattataatacaaacatcgtagtatgctggaacctatcatctttaagttaacaactaacattgtaaattagagaatggacgaatttgtgtgttattttcattaaattcaattgataaacttcttatgcattagaagctaagagttctaatttatgaaaaaaactgtattaatgatttgtaaatagttatctagtattgttaagatacattttaatgtatcctctttaaagtattattttcggagagaattgtatctacttttgtaatttatattcaataatttatctctaaagtgaataaggatagacatatgtttcttttatttaagcactattcttaaataaaagaaaaaaataaccaagaggtaatctgtattccctcttggttatttaatattaatctattaagatacaattattatttattacttttcttacgaagattttccctattcataaagttaattgcaataccaaccccgaaaattatccaaaatattggggctacacctacaacagaatcattaaatattccagcgaataagtatccgataatgcctaggcaagtaatagcacctaacatctggtttttatcttcaaaggtgtttttaagtgcataaagctttatactatcaataatgtaaataagcagcattgctataaatccaactaatgcaattacaccataatttatagctatttgcaaataaagattatgagctttgtctacaactatatttggagtatcataagcataatatttacctattaaatcaccttgtggaaagtcaaacacaaaagtatcaggaccagttccaagtatcatagtgttttttatgagaggaagagatctagaccaaatgtaacctctagaagatcctaacttttctttacctttaaatccaaaggtttcaggagtttgtaaatcaaaagaattctttgtacttatatctattaaatgaaatactttactttcatttaacttaaataggaaagttggttgattgtttatatttaaaagaagtgagtcgctaataactgacttcttatcaagctttccaaaagcgaatgtgatatttttaaaagcttcactatctgtcgataatactttaccatttaaagcatatggaacaacttcaccatttgaatctttaaatacaggattaccactttcataagttatttttaaagtatcattaggtaatacaacctctgtcgttgagtccatatacttaatgtcctttacaggagtataatttgtataatcaaaatcactagtatctttaaaaatactgaaagcatccgatgctaagctaggtattctcttaaaaagacttcctttagatgcaaaatttgcaccaattatcaatataattaaagcgacaacaccaattaagaggcctttccaacgtttaataagaggtttataaaatattataataccaaatattaaagcacctaatacaccaacaattcccgaacgtgcagtacttccgaataaaagccaaaatgaaagaagagtaccaataaatgatagtattttatacataacatcatcttcgaaaattgtatagcagaataaaataggtagagcaattgctacaaaacttcccatgtaattataactagctaaagtaccataaatagttcctttttcattaagtaaatctatgcctgaatttgaactggcacccgcaatagaagcacctaatgaagttttaattaagtcttgtcctatatattgaaaaaggcctaaaaatgaattgataaatactagaatcaaaagcggagtaataatatacttataattattagtagttttaaaagtataaagtgagtataaaaagagaattatgtaacacgcaatagttataaatccttcagctctatcaaatattccccaaaaggatacttgtctatattttgaaaatattgcagatagaaatgtaaaaagtataaatacgccacatgcgattagaatataattaactaacttatcttttctactaaatattttcttgaagaaaataacacaagtaataattaatataacggaaaatatcattaaaagaagagcttttctttgtgaaaacaaatccgctttaactgtaacaccccatatcttaattgcattttcatcaagtttaacagctgctactcgaactattataggtacaatacttaatataaatgcaataggtaaaaaaaagttaaaggacttttcattagaattgtttctggaatttgtcattttctacacatcctaatatttttatttttgtaatatacaaatgttaatatgtaatattatagcattccgaaaagtctattgcaataaaccagtaaagaacaagggaagtgcaattaagttcttttgctaaaagaaatcaaggtacagtaaaatgtaattgttaattatagtgaagcaatatgcaattcgaattttttgcctagtatgtacttcttctaacataactaaaaattaaaaaaatataaaaatgagaattattatttttgaaattaaaccgaaaataataattctcatttttataaatgcagatcatattcgtttaatattatacggacagtattagataatacagaatctaaagagtatttttttgataattcaatgcttttaatatgcattctatattgcaaatctgtgcttttatagatgttttttatataggagcaaaattcgtcgatattattgtagttaaataaaaatccattttcatttggtatgactaaatctatatgtcctttcacttttgaagctactataggcagtccaacagacattgcttccataatattaaaaggtaatccttcaatacggcttgaagaaacacatatgtcagacatttgataatatgtacaagtgtctttagtatagccagcaaaaaaaacattatcattaatacttaagctctgagtgtatagctttaactcatctaaaaactgcccatcaccaagaaaaagcagttttatatttgaaaagccttcgctaattagtttattcattgaatttattagaaatttttgattctttcttttagaaaattcagcaacgtaaattaaaataaagtctttttctgaaaagttatggctatttctaagagcaaccttacatttagatgaaatggatggaaatgagtctggatcgattcccataccatttattaaatacaaattatctttatataatttgtattttttagcaatatcataatctgatgaattcataacaataataacgtttgtaacgcacttggtcagtttttctgctaagatcataatatgttttttaaaaaaggaactattgtaatcaaatagataaccatgaactgtgttaactactagcctaggcttttttaagcatagtattattccaagccttgcaaaaaaagcagccagagatgtatgaataattatgatatcataattattcttgttaattatctttgctatttttaaagataaatagaaatttttaagtgaaaacatgcttttttcaaaaggaacagatataattttatcagcatataagatttcagatttattatttagttttcccataacatgaacactatgcccgagatctttaaatctctttaaataagggatatgaaagttttctatatgtgatagtgttgatgctataaaaagtatttttttcataattgaactccgttattttcaatatttttaggattattatgttttataatctgttcattattcttaaatcctttaaaggcagttctgaataatatgtttatatccattaatatgttccaattttcaatataatatatatcaaattcaatacgcttttttattgatgtatcgcctctataaccatttacctgtgcccaaccagttattccaggctttacttgatgtttaaccatataaagcggaatctcatccttaaagttttcaacaaagtgaggaagctcgggtctaggacctactaaactcatatcccccttaagaacattaaaaaactgtggtaattcatcaatggaaaatttgcgaataagagatccaaacctggtttttcttggatcattattagtactccatcctgtttcttcttcgttgttgatcttcatagatctaaatttatacatagtaaataaatttttatttaatccaacacgttgctgtttaaatattataggccctttcgaagttagcttgataataattgaagtaataagcattataggacttgtacatattattaaaacaagagaacctgtaatatctaaaaatctctttataaaagcatttcctaaattgtctaaaggtattcttctaagatttattagaggtatattgccaatctgatcaatgtaaggctgacttggtatgtacttgtagcagaaaggtattatggaaatcttagtaccacttttttcgcagtcagatactattttttcaatatactttgcatcagaaatatctaaggcgcaaactacttcatcagctctatgtttctctaagacagtatataaattgttatattctccaagtttttcgccttcaaaatttgaattattggctacatatccagaataattatatccaaagtttctattgcttttaataacattcaaatattcatttgcaacttcgccagcaccaacgattataacgtgttttaagttcatacccttagttctcatttttgatagaattcttcttaaaagaaatcttttagctataactagcattatgtttacaaaataaaaaataactataactaatcttgaaatatgtactaatttaaatataaataatagtgataataaaatagctgtaagaacagtattcgattttattatttgattacattcttttataaacgaggttgttctaaaagaatgatataagttaaaaaaattaaaaataataaggtttattggaattataacaattgaaaattctatatatgtaattaattttatgtaatctgtatcaggcaaaaatatataaaaacgaattaaatacgctaaagtcattgaaatgaataagattacaatatctgaaatggcattaattttatttagaagactttgattttcttttatcatttctatccatcctttttgtaatattattaaatcatactattagctgtatgataccattttgtcagaaagtttgcaataaaacataggttttactttgagccttacatattaaaattatgtattagctgaaataagtaccagtacataaatattgtaaaattcgtttatttatattatagaatgtgataaaattggggatagaatgtgaaaaaatgtataattttaaattaagttaattatttataatttgttattaagctaaaaacttggaaagtaaacattatatagattattatgaatcatgcatattttaaaatttaagtataaaattaagtttcaatgaaagaagtgatgattttgacaaaaggaataatattagcaggtggaagtgggacaaggctttatcctttaactatggtgacttcaaagcagttactgccagtatacgataaaccgatgatttattatccattatcaactttaatgttagcagggattcgagatatattaataatttcaactccaaaagatttgccgaatttcgaaaaattgctaggtgatggttcgagatatggaataaatttatcctatacggagcagccatctccagatggattggcacaggcgtttatattaggagaagactttgttggaaatcataattgtgctatgatacttggagataatatatttcatggaaatggattgactaagcatttaaaaaaggctgtggaaaatgagggacgcgcaacagtttttggttattatgtagatgacccagaacgtttcggtgtagtggaatttgatgaaaatggaaaagctatttctttagaagaaaaaccagaagttcctaaatctaattatgcagttactggactttacttttatgataataaggtatgtgaatatgcaaaaaaattaaagccttcagctaggggagaattagaaattacagatttaaataaaatttatttggaaaatggaaacttagatgtaataacccttggacgtggatatggatggcttgatactggtacggtggatagtttgactgaggcatctgaatatgtaaaagtaattgaaacaagacaaggacttaaagtagcgtgtttggaagaaatttcttacaagaataattggattgataaaaaaactttattagaaagtgcagatcagtatggaaaaagtccttatggacagcatttaaaaaatgttgctatggggaaagttatttattaattatagtaaacaatggatagtgaaaagaggtttaaataatgaatttaataaaaactaaattagaaggtgtttatatagttgagccgaaagtttttggtgatgaaagaggatggtttatggaaacctactctagaattaaaactccagaaatagcgtgtgattttgtacaagataatcaatcttattcaaaggaaaaaggaatactacgaggaattcactttcaaaatggagaacatgctcaggcaaaattagtacgttgtgttagaggagctgtacttgatgttgctgtagatttaagagaaggatcacctaactataaagaatgggtggccgtagagctttccgctgaaaataaaagacagttatttattccaaggggatttggccatggatttttgacgcttacaagtgatgtagagtttgtatataaaactgataactattataattatgagagtgatagaagtatttgttattgcgatccggaaataggtgttgagtggggaatagaaaatccaattctttcagaaaaggataaaaaggcaccacttataaaagatagtgattgtacttttatatataataaatagtgttttattaatagtcaattggagataacttaatagtaaaatattaattttaaggagagtatattatgaggatagttgtaacagggggagcagggtttattggtggtaattttgttcactatatgcttgataaatatatggattacaaaataatatgcgttgatgcattaacctatgctggaaatatggagacgttagattcagttaaagataataataattttagcttttataaaatagatatagctaatagaaaagccatttatgatatgtttgaaaaggaaagtccggatgttatagtaaactttgcagcagaaagccatgtagatagatcaatagaaaatccagaaatatttttgaaaactaatgtgataggaacgcaagtattacttgatgcgtgcaggaaatatggaataaaaagataccatcaagtatctacagatgaagtttatggtgatttacctttaaataggcatgatcttttcttcacagaagaaactccattacatacatcaagtccatattcagcaagtaaagcatctgctgatcttttagtcggagcatattatagaacttataatttgcctgtgactatttcaagatgttctaataattatggaccgtatcactttccagaaaaactaattccacttatgatagcaaatgcgttaaatgaaaaaaagttacctgtatatggaagtggagaaaatgtgcgtgattggctatatgtagaggaccattgtagcgcaatcgacttaataattcataagggtaatgttggagaagtatataacattggtggacataacgaaagaacaaatttagatgtagttaaaacaatactcaaagaacttggaaaatcagaagagttaattaagtatgtaagagatcgaaaaggtcatgatatgcgttatgcaatagatcctacaaaaatacatagtgaattaggatggttgcctactactacttttgatgagggtattaaaaagactattaagtggtatttagataataaaacttggtgggaaaatataattagtggcgaatataagaattactatgagaatatgtatggaaatagataagccatcagtatcaatattattagctgtctataaaccaaatgaaacctggcttatagaacagctgatttcattgaatgaccaaacatataagaatttagagctactaatttatgatgattgtcccaattttccggtgagcgaagaatattttaaaaagcatattactaattttcgatataaattgatgcgaggaaggaaaaatcaaggatctaacatagcttttgaagaacttactaagatggcttgtggtgatttcttagcgtattgtgatcaagatgatatttgggaaaaaaacaaaatagaatttttagtaagagtgattacaaaagaaaaatcagtaatggtttatagtgatgtgagcgttatagataaagatagtaaacttattgctaaaacgctgaaagaagtaaggccaagattaaaatacgtacatggagaaaagttgttttctacacttttttttaataattgcattgctggttgttgtatgctagtaaaaagtgaactagcaaaaaaggctatgccattttcgaaagttacaatacacgatcattggattgcaataatagcgagtttttatgggagtgtggctttttttaataaaccactagtgaaatataggatacatggaaataatcaaactggaattctaagtaatgtgttttctaaagaagattactacaatgttaggttaattccgttaaggcaaagaatggatgaaatacgagagtgtattaaagatgtggatttaaaagatattattaaattttataaggcaagaattgataagaatatatttaagattttaaggtataggcacttaagtaaaaaagaagcgtactttgaaattctaatgatatttatacctaattggttatttaaaaatataattaaaaagttaaagtgagatgataaaatatgatacttgttacaggagttaacggacaactagggtatgatgttgtaaaagaactaaacagtagaaatatagaatgtttaggaattgataaatctgaattagatataacatgtagtgatgaagtaagtgaatattttttcaaattaaagccggaatgtgttatacattgtgcagcatatacagcagtagataaagcagaggatgatagagcggtttgttataaagtaaatgtagaaggaacacaaaatatagcgaaggcttgtaaagcagtagatgctaagatggtttacatatctacagattatgtatttgatgggaaagggaatattccttttgaaattgatggaaatataaggcccatttctgtttatgggaaaacaaaatatgaaggtgagattaaagttaaagaaatattaagcaagtatttcatagtaagaatatcctgggtgtttggagtgaatggaaataacttcattaaaacgatgctgagattaggaaaagaaaaagaaagattaaatgttgtatgtgatcaaattggaagtcctacatatacttttgatttggcaccacttttgtgtgatatgtctatatcagaaaaatatggtgtataccatgcaacaaatgaaggattttgttcttgggcagaatttgctagtgagattatgaaaaaggcaaatttaaagtgcaagataaatccgattccaactagtgagtatcctactaaagcagtaagacctttaaattcaagactttcaaagaaaagtttagtgaaaaacgattttaaaacattaccagaatggaaggatgctttagatagatttttaatagaaataagaggataattttaaatatgaggaaaaataaatttataaaactattaattttaatattttttgtaattgtgtcgaatatactagtatttaaatattgtgacctagaaaataaaagcataactttaagttatgaaatcacatctgataggccagatacttatcaagttttttacgggaacagtacttcatggacagaagagcaatctcaaaaggcaatctattcagatgtagggaaaaagcaaacattaacatttattatacccaaagatgtgctgaatttaagatttgatttaggaaatcaaccatcgaatataagtatatcaaatattggagtttcatgcatggggaaaaatgtggagttagatcgaaaacaaatattagataataataatcaaactcaaattggaaaaatatatgaaacagataaatctattgatatagaaacactaggagaagatccgtatataacatacaaaatggatttaaataaattatcagatattataaaatatcaagctttagtaaataaaatgcttaaagtaattatttgcttaacaatagatattctattgttaatgattcttaggaagtcaagaagcgtttttacattagtccaagagttaaacactaataaagtgttaatatggagcttatcaaaaaatgatttcaagactaagtatgcgggatcatatttaggaataacatgggcatttatccagccaataataactatattattatattggtttgtttttgaatttggattaaaggcaggatctccaattaagaatgttccgtttatagtatggtttatggtagggctcgtgccatggtttttctttcaggaagctctatctaatgctacgaattgtatgcttgagtatagttatctagtaaaaaaagtggtctttaagataagcatactgcctatagtaaaggttgtttcggcgttatttatccactttgtatttatagtgtttctatttattgtagctgggatatacggattttatccatcaaaatatacagtacaattaatatattactcattttgcacattttttatggcattaggcatatcatatgcaacatctgcaatagtaatattttttaaagatttagggcaattaataagtatatttttgcaaattggaatgtggatgacaccaataatgtggagctatacgataatgccaaaacaatttcagtggatagtaaaattgaacccaatgtattatatagtagagggatatcgagatacatttttaaataatgtatggttttttcaacgatattttcaaactgtatatttttgggtaatgaccttggttttatttgttgttggagcaatgatattcaaaaaattaaaaccacattttgcggatgtactgtaaggaggtacaaatgtcagatatagcaataaaggtagagagtgtaagtaagatttataagttatatgataaaccaatagatagaatgaaagaatcgctaagcttaagaaaaaaaagttatagcaaggagcattatgctttaaataatatatcatttgaaatagagcgaggagaaacagtaggtataataggaactaacggttctggtaaatcaacaatactgaagattataactggagtattaaacgcgagcaaaggaaatgtaatagttaatggaagaatatcggctttgctagagttaggtgctggttttaatcaagaatacacaggtatacaaaatatctatcttaatggaactatgctagggttcactaaagaggaaattgatgcaaaagtagagagtatagttgattttgcagatataggtgattttattaatcagcctgtaaaaacttattctagtggtatgtttgtgaggctcgcatttgcagttgcaattaatattgaacctgaaatattaattgttgatgaggcactttctgttggtgatgttttttttcaagctaaatgttacagaaaatttgaggaatttaagaaacaaggaaagacaattctatttgtaagccacgatttaggaagtattggtaagtattgcgatagagctattttaataaataagggtacaaaattgattgaaggggaaactaaggaagttattgatatatataagaaggttttagttaatcaattaggtgatgaatgcaaatcggattatgataataataaagtttttgaagacggaatatggaaaaagtcaatgaacatcaatccgaataagatagagtatggtaataaattggcagaaatagtagatttcgctgtgattgatagtaatgggataataactaataatgtagttaagggagaattattttctataaagatgaaaattatttttaatgaaataattcaagatcctatttttgcttttacaatcaaggatttaaaaggaactgatattacaggtactaatacgatgttggagaaaatcaatatttccatatcaaaagtaggtgagattaaagaggttacttttactcaaaaaatgaatctgcagggtagagaacacctgttatcattgggatgcacaggttttaaagatggcgattttactgtataccatagactttatgatgtatgtaatattactgttatagcaactaaaaattcggtaggctattatgatatggattccgaggtaaggataaaatagaattaatggaggcatatatatgaatgagcggataggaaatgtagttttaaactataaatattatttaggagaagatttgtacagcgatggagaagttgaggatgagcttttagacattgtgcaaaataatgaagagggtgagtatgataaaattataggggaacgtaataaatggccagtaatatatcatttgtctcacctaagggctaatataatagagtggatgcctattaataataatgaaactgtgttagaaattggatcaggttgtggggcgattacaggaactctagcgaataaggcaaggaaagtaacatgcattgatttgtcgaaaaaaagaagccttatcaatgcatatagaaacaaggaaaaagataatatagaaattctagtgggaaattttgaagatatagaaaagggaattgtggaaaaatatgattatataactcttataggcgtgtttgaatatggagagtcttatatatcaagcgaaaggccatatgagaacttcttaaaaataattagtaaacatcttaataaaaatgggaaaataattattgcgattgagaataaactaggtttaaaatattgggctggatgcaaggaagatcatgtggggcgatattttgatggtattgaaggataccctaatacaagaggagtaaagactttttctaaaaaagaattggaagagattatacaaaagtgtggatttaataagtacagattttattatccatatccagattataagttaccgaatattatatactcagatgattatttacctaaaaatggtgaattaaacaataatatgagaaattttgatgccgaacgcatggttttgtttgatgaaagcaaggtatatgattcgattatcaaggaaggtttatttgatatatattcaaattcatatttaatgattatagaaaatagtgaggaaagtaataaggattgcactattatatattccaagtattctaatgaaagagatgataaatttaagattagaacagatataattaaagatattaacgaaaagttatttgttcaaaaggtagcacttactactgaagcacaaaatcatataaatgatatgtatgagaattataatctattatcgaaaacctataaaggctcaaatatatgcatgaataagtgcatagtgatggagaatggactgaaatttgagtatattcaagggaaaacattggaggaagagttagataaactattatatgaaaaaaactatacgaagctatttgagaaaataaagaattatattgatgccattgaacctggcaaggtgaaaagaaacttcgaaataacggaagaatttgcaaaagtgtttggtaaagctaaattgccatcatacttaaaatctgctgaaattaccgatgtagatcttatttttggtaatgtaattattggagagaaatggaatgttattgattatgagtggactttcaatttcccaattccactcaattttatattgtatagagctttaagtggttatatatttaattctaatcaaaaaaatgaattaatgaatctaggattatataaattattaggtattacagatgaagaaatatatgcatatggtgaaatggaaaaatgctttgaaaaatatgtattaggtagttcaattaaattaaataatttgtatgggaaaactacacgacccaatatagatgtgcaacaattaatttataagcagaatacgagcttaattaatgaggagatacaagtattttatgattatggtgaaggatttagtgaaacacattcgtataaaacttatcctgtattcaatgaaaataataagattgtattaaatgttgatataagtgagaatacgaaacaaataagaattgatccgtctaattgctacagtctagttaagataaacagtttagttggatacgataatgtaaaatactctaagttaaattactacacaaatggaatgagattaaataataaatcgttactatttataaataatgatccacaaataatattaccggatttaggagttaatacttgtagggtagaattaatttttgaaatacaaataatatcaaaagaatttgcaatagaattatgtagttttattgaagatagggaagaagaagttgctagaaaaataagtgaactaaaatataaagatagtgaactaaccctgaaaataaatgagctaaaagataaggatagtgaactaaccctaaaaataaatgagttaaaatacaaagaagagaaaataacggaatctaataaaattatagaaggtcttcagatggaacttgaagataagaataaaagaattcaagaatataataaattatcgttaatcaaaaagattagaaaacaaatttaatataaggagttattggactatatgcttaattataatattgaaaataatcaactattaagtaataacaataaatttaatttgataataaaggggtgggcctttgatacagataaacaaatagatattgaaataatagatttacaaggaagaacatatgaatttaaactacaaaatcagcgaagaaacgatgtttttaatcactttaaacatagcaatgctctaaatagtggaatagtcatagaaatagaatcactaaagaaaagtgtaagaaagttaaaaatagttttcctagaccaagaagaaggtgtgttaggagaacatataatagatattagaaaattaaacctagaaggctttaataacaagctttcgtatggaaatttagaaaaagtaattcaaagtcttaaaaaagacggtgtaaaacttactcttagtaaaattataaataagttcaggaatttagaaataggtagttctgagcaaaagattatagaaccatattgttttgtagatgaaaattatgagtataagccttcagaaaaacataatattattttagttattaactctacaagtgataaaatacaaaaacaatattacaatgaaacaataaaaagtattcaacatcaaaattttgaagctattattaacttatataatcctggaattgaaaaattagtgcttgagaataattacttgttaagaaagtgtttgaatataaagtgtgaagaggaattagatacaaatgagaaaatactaaagttaataagagaagaacatagcgataataaagatgcgtactatgtcatactcacagcaggcgattgtctggctaattcaacgttggcgagaattgaagatgctttagaacataataatgccaggatgattacatttgatgaagacagaatattaggggaagactacatagcccctctatacaaagaagatgctattaatcaaaaaagaaataataatattatattcagaaaagcactagttatacatgaaaaggcaatagaggattatttagagaataaaataaatgtagcggatatttattctataaataaagttttatatcattatagggtaattagagattctggtaaattgagcgaagttaaacctatagcgttttatttaccacaatatcacgctataccggaaaatgatgaatggtggggaaaagggtttactgaatggactaatgtaaaaaaaggaaaaccactttttgaagggcactatcagcctcatgtcccagatgaattaggatattataatttagtagaagacaaatcagtacagtataaacaaattgaattagcaaaggagtatggaatacatggattttgttactattattattggtttaatggcaaaagattgttggagaaacctctagataacttattggcggacaagggattagattttccattttgtatttgttgggctaatgaaacatggagtagaagatgggatggtcaggaaaaggaagtactaataaaacaagaacataatgaggaaacggataaccgttttatagaagatattattcctatcttaaaagatgaaaggtatattaaggttaatggtgctccactattactcatttatagggcggagttatttcctaatttggaaaatacaattagaatgtggaaagaagtatgtaagcaaaatggaatagataatttacatgtttctttagtgcaatcatttggattgactgatcctaatatatatggtggagattccgcagtagagtttcctcctcatggtattatgacaggagagatatctaaaactataccaagtttagttaaagaatttggtggaaacatttatgattatagagacgtagtatcaagatatgtgaataagagacctaattattataaagaatttaggggggctatgttaagttgggataatacagctagaagaggagctaattcgaatatatttcattatgcgaatccggatgaatatcgtaaatggttaacaggaattattgactatactacaaactttaatgatgatgaagaaagatatgtatttataaatgcatggaatgagtgggcggaaggaacacatttagaaccagataatcagtatggcaggcaatatttacaggctactaaggaaagcctgcattctaattattaaggagaattgaataatgatagatagtttagtaagtgttatagttccttcatataattatgaaaaatatatagttgagtgcctagaatcaattgaaaaacaggattacagaaatatagaattaatcatagtagatgattattcaaaagacaatagtaggaaggtaataaaaaagttcatagaacagtgtagatgtaatgaaaggttcatagaaataagatatattgaaaatcctgaaaataaaggtgcacattatactattaatgaaggaattaagcgagccaaagggaaatatatcgcagtaataaatgctgacgatttgtatgagagtaatagattttctaaaataatacccgaaatggagaaaagaggaattgagattgctttctcaagtatagaagtaataaataaagaatccgtatcggcagaggatgaagaagctcagaattttagaaaaatacaaatgcgcattaatgaatgtagacaagtatctcatgcattgatgattcaaaatgtagctatatctactggtaatatggtgtttactaagaatttatataataaattgggtgggtttaaagaatataaatacattcatgattgggattttattttaagatcagcattattacaagaacctttatacataagagaaactaactattattatagattacacgacaataatagttttagagaattaagtagtattgcagaccaagaggtaaatttggttttgcataatttctttgatgaaattatgaatgggaatgttataaatcataatctttcaaaggataatgtagaatatgttattaagggcacatatttatataaatattggactaaagataacatattaagaacactaatagagaagattaggaataggatgaaaatgtaactgttattaagtataagggaatgagtataagtatattgctactattcccttaattttatgatggcggtaattatggaggcgataatgatgagcaaggagcgtacatatagagcttggcatatttcaatagtatcaattttaatactgttaggaatagctatgttttttatgatcatgaatataaacacacctatgatgggggaggattttgcattaactagtttttctcattattataaaccagtttctgcaggagaatacataagtttaattataagtaggattgttaggcaagcttctacttggaatataagaattggagaacaaattgctattattttttgtagtatcgatgagatatattactacattggaaacacaatcataagtatattatatgtattattgatacctatgtatgtatttggaagaaagttgaaattatcggaaagaaatgatcttataagcatagtaataagtttttgcttaattattttatttcaaccagcactaggtgaaatatttttttggagagctggaagtggcaactacttatgggctgtatttattttattgatatttaccattcctttaagagtgataatttcaggtagaaatgtattttataataagaaattatttgttttattacatacaatattaggattttttgcaggattaacaaatgaaaatacggtgatcacatttttaataatatatgcatgcactattatatatagaattaagaaaaaacaagaagtttatttatggatatggagttcctttgcatcactaacaataggtttttttgtaatgatttttgcaccgtctacttctattagaattcaaacatataaagatatatttggaattaagaatgtaacaattaaagattacatttatagagcaataagtataattcatagatttttttctgaaaatgttagtttagtaattatacttttaatcgttcttatattatatatagcattaaattataagaaagtaaaagaagaaaaatgcatgtatgtttataaaacggcagggataaatatattatttttattagcatcttctttatcggcaggagcattaattggagctccttatgttgaaacgcgagcattctttttaatagacttcttcatgatgggatgtatagtttattttgttatagaattgcttagtatagctaatagatttgcaaaatctactatatatgcgttattggggatattattattgtttactataaaagagaatataagaatttttaatacatatagtgattacaataaatggataaggaataattataatgttatagaagaggctaaaagtaacaaccaaagtattgtgagtatttcgccttataattatgcaaataatagaattctgaatacaagagaagactatttacagtcaaatttaaagtacttggaaggatattttgaaataaaagtagtatattctatgaaagacgcgtatttaataaatgaatcacaactttctgcaaaatatatagaaattatgaatggtatagattatgtagattataataagggcaacgatcagttaaaaataatagggtgggcagcaattgaaaataaagattctaagaatgatgatataagtatattgctgaaatctgatagcaagacgtataaattttcaacaaacaaaattaagagggcagatgtatcagagtattataataatagatattatgatgacacaggattctcattagacttatctaacttaaataatattctagataaagacagatatacggttgggatatatattaaggataatagtaataatagtgattatataatgtatacagagcataaagttgatatttattagattaaaattatattatgttcatgtatattaaatttttgttattaaacgaaattagtactagctaattatgacacaactgtttaaatattaatcaaaatttccatttgcatatgcatgtggatgctatttcgtatgtacacgtaaatttatacgtgaaaatagccagtaacatttgatttaatataatcacaataacaataaaattaaaggtaaaggaagttgctggctacatgtttggttataccaaatcatttaacataattatataatttattaattaagatattttgaaacgataataaaatatcttgattttctactaaaggttacctgaaattaatgattttctatcatatctctcaaaaagatagtctaagagatttaagtatgtgcatgtctagcaatttaaaagtgaccgtagcacaagcgttagataaaattttggatttttgtaagatgagcgctaagggtaatgatgattcaaataattactgggatccttaactttgctatatttaagctcgtggaaatatagttcaaaaaggagctaaacaaattttgaaatgaagagaattgtaagtgataatctcttcgagatttatgaagcttataagtttcaggggtctcatattttggaaagttcttaagtaataaatgaaaatagagtatctaaataaaaaacaactgctaaaaatcctatttccacgtctaatattattggaattatattccggtaactctattgagtaatttttggaaaggttaatgaaagtattagtattgaccaattgacggtgtaattatgataagttaagaaaagtataaaaaaatatatttttttcaatcgaggtgaacatatgttattaaaaaaagtgggtaagaagaatctaccagtggtaggaatttattttatatttatagtgttgttatttattcaatatagaaatgtatatatgtattatgatgattttgcatatgcaacattgtcgtatgtatatgaagttccaggaattaaaggtaccaatttcacattttttcagttgatggagtttttgtataatcattataatttatggggagggagagtgcttggatatttaatatatattttgcttttaaaaatgggactttatgcaattagaatagccaatgtaattagcttatttttaatattcctgtttgagtataaaatagttaaaactactattgatgaaactaataaaacttgttggaagttagcattgtttacttgttgcttatttggttttttttcagtagatacatatcgaataggagtatattggtatgcgtctagtagtacatatattttcggaaatatatatttgatagttggttcatataaatattggaattatttaaaaacagcaaaaaaaaatattgcggaagttatctttattgcaagtatgttcttttttgcaggatggtccatggagcaggttggctttggtgcaatagtagttgtagttgcattaactattacaaattatatagaaaataggaaaattaaaaaatcatctataataatttgtctaagtgctttaattggatacattatgttagtaatagcaccgggaaattataagcgattagatacaaataactcagctacaagttttattaataaaatattattggcaatgaataatattaccaataatatgttttctaaagaaaatgtattattggtaatattaatatcttttacagtaattggggtaagcattttattaagggaaacaaaagacaagataaaagtaaaaattgcatatattggattgatagctgcacctataagtgtgatattaactattcttaatatatttcatccaataatagcatatctatatattcttttcataagtattgaatttgtaatatatttaaaggatacaaaggatagtttcatattagcctatctatttggagcaataggtactcaaattgtcatgatagcagcaccttattatgtagcttcagccattgtaccatttggattattgtggtttgtcatagcttcttatatatttagaaaattgcatgaagaaataattaacagagtaaattttaatcatattatgaatatagtaacaatgcttgtagttggaatttttgtttgtagttattatacagagtttagtggatattataataatagatatatcaatgaatataatgaaaaaactttaagaatggctagtaaaaaggcaattcttggagaagatattaagaaagtaaatttaataccattggatgaaaagtttagtcagtcaatgccaaataatatagaaaacaatccaactaccgaaaatggtatgaaaaagtattataatatacctaacaatataatatttaactatacaaaacaatttgatatgttaggtggaatagattattataaatatgattgtgaaaaagatatattagaagttatagggtggggaagcattactaacactaattcaaaagataataaaataaaaattgagttaatatctgaaacaaatgaatatatttttgatgtaaataaagtacaaagagaggatgttgctaatttctataataacaataattacaaagattcaggatatgctttaaaactagcagagttgagtaaaaaaattacaccaggaagatataatatcaatgttttgattgagaatgtaaaactagatgttcaatcaatagtagtaagtgggaatactattgatgtaggataatgttgtaaattatagaaataagatatttgttaaagcaactaattaaaaaaactttatattgtaatattttacaaagtaatatatagattattggtatggagaaataaaaagtacttaaggtaattaaatttaaatagtattgtatataaggagaaattaaaatggacaaagtatcaatagtaattccgtgttattatgaagaaaaatctttaccgtttttttacaaagagataaataaaataaccaaggaaatggtaagtgtagaatttgaaataatatttgttaatgatggttcaatagataaaacattggatataatgaaagattatgcgcatatagacaaaagagtgaagtacatatctttaagtagaaattttggaaaggagtcagcattatatgctggattagaaaattcaacaggtgattttattgcagttatggacgctgatttgcaagatccgccagaattattaaagcaaatgtatgatgttttaataaatgaggattatgattgtgtagcaacaagaagagtgaatcgaaaaggcgaaccgccaatacgttctttttttgcaaaatgtttttataaaataataaataaaatttctaatgcagatatagtggatggtgcaagagattttaggcttatgaggcgtagcgttgtagatgctattttacagatgaaagaatataatagattttctaaaggtatttttggttgggtaggatttaatacaaaatggttagcctatgaaaatgtagagagaatagcaggagaaacaaagtggtcattttggaagttatttaggtattctattgaaggaattatagcattttctacggtgccactagtaatttcatcatttattggattaatattttttattatatctctaataatgatatgctttattatggcaagaacatttatacacggtgatccagtagcaggttggccatcattagtttgtattatattttttgttagtgggattcaattattttctacaggtattctaggacaatacttagcaaaagcttatatggaaactaaaaatagaccaatatacattataaaagaaagtaatttagagtagttgagagatgggatgaaagcatagtgactagaataaagaagttattaaatagcgaggcctttaaatatgtaatttttggagtattgacaactcttattaatattctattctatttagttttaaataagataggaatgttgtatattataagcaatacaattgcatttgtaatgagtataatttttgcgtttataacaaataaactttatgtttttaattcaaatacgtggaaactaaaaatagtaataaaagaaggaataacttttctatgttctagactagcatcatttgcattagatacatttttaatgatattattaatagaaatggtatggatgaatgattttatagcaaaatgtatagttaatgttattgtaattgtcgtaaattatatattaagtaaatttatagtatttaaaaacagataataaatattgtaatgcaatcggactgctttagggatttcagtttctcataaatttgtcaaatgaataagttttcgttaatttaaatgataaaatatataattataggagttaatcaatgaaaataactataataagacatgcaaaagttaattataagtggaaagctttgtgtagttcacaggaatttaataaatcatgtaatgaatatgatattagcccaatagatttttcaaataaatacagtataaatacaaagcaaccgatatatataagtgagttatcaaggtcatatgacactgcaaaactaatttttggttcaaataagtttataaaaatgaatttatttaatgaagttccattaagagctttcactgataaagaaatcaagctaccattaattatatggagaatttttggaagaatccaatggtatatgaattccaaaaagcaaatagaaactaaaaatcaaacctataaaagagcaaaaaaaacagttgattttttagaaaaaaagaatcaagattgctttattgtatgtcatgcatgttacatgagaattctgctaagggaactaaaatatagtggatatattggaaattattcaaggataaatattatgaatttacaaaagtttgtatttataaaagaataaattcttttaagttaggaaatacacatatttctaattttatggataagatatcgtagtaagtaaagtaattatcattttattatttaaataaaatattaataggtataataacaaagattgcctaaataaaaaagtaaaagatactatatttattaaaaaaattatcacatccagatatatttgaatttttaataaactgaacttaataatagatcatttggttatttaaggctacattctaagaatacagctttagatgcaagaacatactatttatatagaaagtattttggtacattacgataaaaatgtagacttaaaaataacgtaataatttaaagtaagcatcactaacaattgggtttagatgatatatgaatttggtgattatggaaatttttgagggtttagtaaatcatgtatataaggagaaaattattatgcaagatagcatcataaaattttttattaatataaaa

SEQ ID NO: 24 - DNA, 72243 bp, Clostridium beijerinckii
atatataggatattaggtatgtacaatatggatatcaaatttgaaaattggatattcatatttataatttcgataagttataacataaatctaggttatattctgtttatctataatgtatgttaagttgtgtatttaaaatatatattgcaaaaataattctaattataaaaatatttaaagaattttaactgcaattgtgaattgtgcattgtgaattgagtaaagaagaaagttgagaaaatagaagctagaaatttatctagtcttctacctatataaattttttgatttttttgatatataaatacgaataaaatcctcaaagattagaagatctttaagagtgatcttatcgttctccaataattttgctagtgtttttactttattggcctttttagaataacgtattttaggttttgtcttatttaaattagcagaagaatcaacgctaattaagttttcatattgatcaaaaccaagaagaaagtctgtagtgacattatagtatgaggctaagcgtttcaagtgatcatatattggtgctgctttaccagtttcccatttagaaagcatgcttccagtaatattaatatcaaatgttttatttatttcagaagctagctgatctagagtaatattcttttttaatcgcaagttcttaaggattatacctgttatattcatatttctcctccataatgtaaaagattactttggagataagtatacaactgtaagcgacaaaaagcaagaaaataatttgaaaaaatttccaaaaaaatcattgacacttatagctgtagtcgtataattaaattaacggtggcaacttaaaccaaatgctgttacgataaaattatataagggggaatatagtatgtcaaagtcacaagctcaatataataaatttaaggaattcttattggtgaataacatcaaacaaagtgagttagcagaacacattggcagatcaagctcttttgttaacaatgcgttaaatggaagaggtgcaagatttacttcagaagatttaaacgcaataagatgtttatttaatattagaataagtgaatatttttaatatatgcgttttgtaaacgatgacatgaaagtatttacgtttaagggggaagtatggcagaaagagatttaaaattcatttatgggaatgagatagggataatattaggtataaatgcaaagaaaacaataaaagaattatatgaagagaagttagaaaaaggtcagagtagacatataaatcttaaggaagaatatgaagaaatttattggtttaatactttaaaggagattttatgtaaagaatttaccataagaagtggtaagaaggtaagaaaagaattaaaaacaattattgatgaagaatatgaatttatgtgttgtaaagtagatagaagaatagttggtgaaaattctattttactttgcagcatatataatggaattaactttgatgaagaaataaataaaaatgtttttcttgaatgtcaacataatatgagagttacaaaagccgataaatgctattttgcatgtttaatcaacagcagaaaatttgtatttaaagagatacatagagatgaaaaggtgatttcaaagatagttaatgaagagaaagtatttttttatgatcatatcttaaaggaaatttcgcctaggtgactaaagatatagataaatagcctatacagtggagtttagtcatggctgtttatctatatttatatagtttcagagattactttatttttgtgagaattatagaactattaaatctgcgtatatttaccaattatgagtacagcttataatgtatattgcaaaaataattcttcgcgataattgtaaaaatactacaagaattttagccataattgccaattgtgaattgtgaattgtgcattgccaatcgtgcattgtgcatttcaacatatatgtaccatttaagttaggttgaagagaagaaaatgagtgaaaataaatctaaaagggagtactgaatattttaagtaaaaattaggtaggggacgatatttatgaaggggatagagtggattaagctaaatacaaatatgtgtgaagatgaaacaatgagattaattgactcactgccattaagagattgtacaaattatgtatggataagactgcttttacaggcgggaaaggttaatgatggtggattaatatatctaaaaaaagacgtaccttatactaaaaaaatgctgtctatattatttaacaggccactagatattatagaagaggttctagatatattagaatcttttaagcttattaaaatttatgaaaatggcgtaataaaaatatgcaactgggaaaaacatcaaaatattgaaggaatgaaaagagtaaaagagggtactcgtgaaagagttaaaaactttagagaaagaaagaaaaaagaaaaggaacttgtagagaaaaaattaaatactgatgaagcttgtaataatgccataaatgaaggaagtgatactaataaaattaacaaaaataaaaactgtaacgcaaatgtaacgctacagaaggagaagagagaagaagataaagaacataagaaaaagaatatagataaaaaagagaataaagaaaaagataaggtaaatgatgttgctttaacaaaagaaaatgatgaatcttatgataaagctcatatacagactaaaattctctcttcgtctcatgatgaaataaaatcacaggctcttaaaattataaaaaccttagaagaagataataaagtcataagaggatttactttaagctgggtaataaaagagttaatgattcataaagaaaagtatgtagaaatggctgttagagaggccatagaaagaaataagcttgatataaattatattaatggtatccttaaaaactggcttaaggaaggatatccaaaagactatgaagatatggagtttaatgattgcgatgcaggcaattcatcatttgttaaagaaaaaccaaaacttagatttattaactttgagcctaggcagtatgattatgatgatttagagaagaaacttctagggtggaacgaagatagttaatcatatgaattggttattttagggattatgtcttaatatattgcaaaaataattcttcatggtaattctaaatatatcgcaagaattttatccctaattgagaactgtgcattgtgaattgtgaattgtgaattgcaaaatgtgcattgtgcattgtgaattgaaaaaaagtatataagggggtataggtaatgaggtatgttaaaggaattgatatatcaaataataatgcaagtattgattttgataaagtttcagaagataacatagaatgcgtctatatgaaagctactgaggggaagacttttcaagacagcagactagaggagttttatgatttatgtaaaagccatgggataaatgttggagcttatcattttttagttagtacaagctctccagaggctcaggcaggaaacttttataaaaagattaaagactgtgcatgggacatgattcctatgcttgatattgaatctgaatttgatgaattgtgtgattatataataagatttgtaaatgcatttaaggaattaagtcctcttcaattaggaatctactcttatacaggatttttatcaaatatagaagagataaaaagtaaaataaaagattatcctttctgggaagcaaattataataatgatccctggaaccttccttcaaatttctttactaatagaatagggcatcaatatactgaaaatggagatatatcaggggtaagtggaaagtgtgatgtgaatttatttacagaaggggttttgcttaaaaataatatgtacttaggaacttggataaatgagaatgataaatggtggtataagcataatgatggaacttttactaaggatgattgggaatttataaacggaaaatggtatttgtttgatgcagagggctggatggttcatgattggaaaaagtatggagatagttggtattactttggagattgcaatgatggagctatgaaaactggatggtattatgatgaaaaatcctctaaatggtactactttaatgaggaaggcataatgcagacagacgtataaagaagagcattaagacataattcaaaagattgtgaatttaatcttgaaattaatataaaaggttttaaaattaattttaaaacatgtgaacaatctcctattaaaaggagctgcactaagtgattatttagtgcaatttttttgttttaatgaaataatttataggctataatattactatagttaatgttagatgtgaatgtgtagtagagaggaagtggagcttgtgtgtagattaaatccaaaagttgattttgcatttaaaaagctatttggaagtgaagagaacaaagatattcttatttcgtttataaattcaatgttatcagagaatcaacaaataaaagatgtatatcttaaaaatccatataatatagcaaattatagaaaagacaaaatgagcatactggacataaaagcagtagatgataagggaatctggtatgatatagagatgcagctttcagagcagattttttatgaaaagagagccttttattattgggcaaaagtatattcggatcaattagaaggtggatataattatgataagttaagaaaaactatatctataaatattcttgattttgattatctagatgaagaaaaatttcataatgtatacaaagtttacaatgaaaaaagtaagaaagaattatcctctgtatttgaaatgcactttgtagaattgaataaattcaaaaaggattttaaggatgtaagaacagctttagatagatggatagtttttttaaacagggcttatgaacttgaaaaggataaaattccagaagaattggcagtagatgaatctgtaaagaaggctgtagagagattggacgttatgtatttggataaagatgaaagagaaatatacgaaaatgatttaaaaaggcttagagattacatagcgggaatgaagacagctgaaataagaggaatggaaaaaggaatggaaaaaggaatggaaaaaggaatggaaaaaggaatggaaaaaggaatggaaaaaggaataaaacaaggacagtatcatgaaaaaataaatatagctaaaaacttgctagacgttttagacaataaaacaatagctattaaaactggattaactatagaagaaatacaaaaattaaggtaagataaggaagaaattgaatttaatgaaacaataggtgaaaaatgaaaataaaaaaagaaatgcatcatatacatgataaaagctataaagatttgttttctaataagaaaatgctagttactatgattcaaagttttgttgaaagtccatggggaaaagacattacagaggataatatggaattagtaaataagtcatatattctttcagattatgaggaattagaatcagatatagtatataaagcaaatatagaagataaagaagtaatattttatatattactagaatttcagtcatatgttgattatagtatgcctataagattatttatgtatatgtcagaaatatggagagaagtattaaagaatactaaaaagatagatgttaaaagtaaggaatttaaacttccagcaatagtaccaatcgtattatataatggagagtataaatggactgtagagagaaaatttaaaaatgttataaataaaaacgaattatttggaaataacataattgattttgaatatatacttatagacataaataagtatgaaaaagatgaattgatgaaattaaaaaatatagcatcagcagtatttttattagatcaaaaagtagatgttgaagaatttataagcaggataaaagagattgcaataaactttaataacttgacagaagaacaaaaaatgatgataaggcattggttaagaacgaccttgaatgacgatatgaagaataaattaggtgaaagaatagaggatattttaatagcaaaaaaagaggaggttgaaataatgacttctaatatttcaagaacaataaaagaaacttttgaacaaactagagaagaagcgagattagaaggaagagaggaaggaagagaggaaggaaaaatagaagtggcaatagagatgttaaaggatggagagccaatagaaaaaataattaagtattcaaagcttagtgaaaatgagatattagagctaaagaaaagtttatagaaatctcacttcttcggtatttcataaaggggtgagacctttgtgaaaaaataggaaaaggcccgttaccatggtaacgagccttttagttttatgctatatcaattttagtaacagttttctctgttaatttagcttcgaattttttaaaaaagaaaaatatggtataattaaataaaaatggtcagggggatgagcaatggaaccttatagcgatgacaaatataatagtaataatatagttagcgaagcaaaaaataagagaacttattatgcaaaagcgtcatcagataatataagtgttaatataaaaagattagatgaaaagtatattaaagtatttagggtgacctcatattcagatattggtgaggtgagaagagcaaagcttgttgataatgataatattgttttagatccaggaacaacaactcttattataagagtatataataataaaccagattcaagcataaaatatgaagatgataataatatcttaaatgaatacgaagttaaagtggagttagataagtaaatttaatcttgaaattaatataggattagcttagtgttaccagcactaagcttttcttatttatattgtattaaattttttataaaaataaacatttatcttaaattatttaaattattctatggagcaatgagtatcacaaaggggggcagatacttttaaagaaacaccaagaacaagcagtgaagtgaataattatttagtgcagtttttttgttttagtgaaattggttataggttataatattactataatcaatataaagtatcaatacgtatgagagaggaagtgaagcttgtgtgtagattaaatcccaaagttgattttgcatttaaaaagctatttggaagtgaagagaacaaagatattcttatttcgtttataaattcaatgttatcagagaatcaacaaataaaagatgtatatcttaaaaatccatataatatagcaaattatagaaaagacaaaatgagcatactggacataaaagcagtagatgataagggaatctggtatgatatagagatgcagctttcagagcagattttctatgaaaagagagccttttattattgggcaaaagtatattcagatcaattagaaggcggatataattatgataagttaagaaaaacaatatctataaatattcttgactttgattatttggatgaagaagaatttcataatgtatacaaagtttacaatgaaaaaagtaagaaagaattatcctctgtatttgaaatgcactttttagaattaaataaattcaaaaaggattttaaggatgtaagaacagctttagatagatggatagtttttttaaacagagcatatgagcttgaaaaggataaaattccagaagaattagcagtagatgaagcagtaaagaaggctgtagaaagattggacgttatgtatttggataaagatgaaagagaaatatacgaaaatgatttaaaaagacttagagattacatagcggaaatgaaaacaactgaaataagaggaatagaaaaaggaataaaagaaggagaaaataaaaaggcttttgagatagctaaaaatttattggatgttttagataatgaaactatagctgttaaaacaggattaaatataaatgaaatagaaaagttaagattataaaataagtgataactctaggctagcggttttgaaattcaaaaattctcagtaagaaatttaatgaaaaaggaacttttatatatttaaataggaaaaggcccattactatgaagtaatgggccttttggctttataatacataaatttagaaattataaaactaccaaataatatgtagtattaaataaattatggatatattttaaatatttaggaaataaaatgtttgttattttaataaaaatataaaaaaattatatcaatatagaggaaattggaatagcatgaagaattatcatacagtgaaataaaataaaactttatatgtaagaaaaggggaaataataaatgaacaaacatttaacaggtttagtcgcagtagcggcagtagtatcagtgacagcttcatcaattccagcagaagcaaaagtagcaacagcagaagaaataaaaacaattatagaagacactttaaaagatttcgtagtaactaatcaaacaacatcggatgatgtagaagcaaaatacaaagacgctatatcaggttatgaaaatataacaacggaaccatatatatggatagaaaaaaaagctacaaaaactacaacaggttctgcggtaatcaatgtggatatagctaataaatcccaaacaactccggattcagcgtgggtttctattgacaaagacatagcagttttaactccggatcaagctgtagaagatgctaagaagtcattggctaaggcaaaatatgaagttgtagatagtatagattctatggacataaaaaatgaaacgacacctggagctgtattgattagaattaatgattctctatctgatcttggagtaacagcacagtttaaagagtttactataactccgtcaacaactaattctgaaggtaatttatatagcaaagttgagctgtcaaaggatgggaatagtactgaggtaagatataaaaaatacatagatgaagtagatgatactaatcaaactatggcagaattggcaaaagttatagaaaatagaatggaacatcttaatgtgaataatgattatacaagtgagaatattctaaatcgtttaaagcattctgttgaaaatccaaatttatatttaacgctagataatcttgatattacaaagtctactctagatacagaaggaaaagcaactggaacaatagttatacataaagatggtagtacagaaacacaaagtgtatcttttaatatagtaatagacaaggagttaacagatgaggatgaagagttaataaatgatattgatgatatattaagtgattatagttatacaaaatataagggatcaaataatactacagcagatcaaataaaatcagaaatcgaaaatggtttatcagatgaaaatataagagtagctgtttcagattttgaattagatgcagctactgatgatgagtggggatatatagattgcaaaataacacttactagagcagataactcagttgttacatgcaatggatgggttgatatctacccattatcttgtagcgatacaacatcaaatgattcttcaggaaattcaggtaactcgggctcatcaagcggctcaagctcatcacatcatcattcatcgggcagctcaagttcatcgtcaaatagctcaagttcatcaagcagctcaaattctaactcaggagctgcaaattcagcaaatggtactgtatcagattcatctaaaccagtatcattagctaatatgtcgaaggaagctgtaaaagcagttgaagctaaagtagtaaatagtataagtgcagttactggagcgactgctggagaagctaaagaattagtaacaacagatggagctaagttatctgtaacacctattgctaaagatggtaagagtgtaggagctgttataacagcggaagcagctagtgcaaaggcagttattccagttgataagaatcaggcaccagttactgcagtttataaatatgtgccattattagataaatatattcaagtgcaaaacgcagttataacaacagatgctattacattacctgtacaggcaaatgcaacatatgttgcttcaccaacagttatgccagaagtggctacaataaaacaaggatgggtacaagctaacaataactggtatatggtaaatgttacaggagacccattaacaggatggcaaaaagataatacaggatggacttatatgtcaccatcaactggggctatgcaaacaggctgggctcaagtaggaggctcttggtattacctaaagaataatggatatatgtcaacaggatgggtacaagacggaaatacttggtactattgtaatgcagatggttcaatggcatctaatacaacaattgatggatatacattaggatcaaatggagcttggataagataattctttaattagaggtgcaggggttgcacctcttttttagcttgcactagctgtagaaagattggatgttgtgtatttagataaagatgaaagaaaaatataccccatccaatcagtctcacgatttagtaacgaaattaaacatatatatgaaatatggtgtgaaagaatattggatagttaatcctatattaaatactgttatgttatatacactaaaccaagatagaatgtatgaacaaagcatagttaagactgaaactggaattgtcaaatcaaaactttttgaagaatttgaagttgatatagaagatttattttcctaggaaatgattgtttagggttttaatagagtggtatttattaccactctattttacttatacttaatattaaataattgtaaaatacccataataggttagcataaatattttcgcgatatacataataacattgtggaaattttctactgttggaggaagtaaaaatgtttaagaaaatgctatctattataatgtttctaatgataatgtcatatatgttatttagctttaaagaaaaagccacatttgcgagtattaatgttgctgaaaaaaggcccgttagagtagctgtatttttaataaattttagtgatgattatatttctttagtgcgtaaagatttagaagatattcaagaagaaaatccaggaaaagtagaattcacgttttatgatgctaaatcaaatcaagcagtgcaaaatgaacagcttgataatgtacttaaagaaggtgttgatcttataataatgcatctagttaagaacagggatgaattaacggtaaaaagagttactaatcaaattgctaaagctaatattccagtgatattttttaatagggagccgctgctaagtgagattaaaagatacaataaatctctatatatagggttagatgcaaaaagcgatggaactatggagggcgagattcttgctaatgaatggaacacaaatagagattccattgataagaaccatgatggaataatgcaatatgttcttttagaaggtgaaagaaataatttggtagcagctgatagaacaaaatattctcttttagcacttagtgaagcaggagtagaaactcaggagcttgaaagagtatttgcttattggagtagagaactcgcaaaagaggccatagagtcgctatttttaaaaactggacctaaaattgaagccataattgcaaatgacgactccatggcattaggtgcaattgaagcactgcaatcctatggatataatttaggagataaagaaaaaaatattgcagtagttggtgttgaggggttgccagaatcacagaagttaattaatgaaggattaatgttagggactatttttcaagatccaaaagcaatggcagaagcactttatactatagggatgaatatggttaaaggcagagatccaattgaaggtactgattatcaatttgatcaaacaggagttgcaattcgcatacctaatcaaattatatacaagaaataatttgatttaggaatattaaaatcagagaagagcaaccatatactttttgtaaaaataaaaattaccgagcataagcattgtattaaatctattttttgttttaggaagagaaaatataggttataattaaagtactaaataattttatgatacagttattgtgtatggggagatgatagtatggaatcggggaatttagaaaaatcattattaaaagaagagtggattaataatataaaatatatgtcgccaaggcctagatataatcatatagagttacaaggagaattgtatttgcagttaagaaactatttcaaaaaatcttgtaatgtttcaattgaggctgcattatttttgactaaagaagatccagctattatcaaatccgataaaaatattattgataatttaataaaatcaaagaaagctgaagttgctccagatgttgcagtatattgtgataaaaatcaaattttttatagaggatatataggaattccgcaattagttatagaagttttaagtccatcaaattcagatgatgatcttatttctaaaaaggatttatatgaggaatatggagtacctgaatattggattgtatcaccaatgagtaagaaagtatggatttattcattagtaaataataaatatgaattaaagaataattgtacattaaatgaaaaatttaaatctataagatttgacgatttagagatggatttatcagaagttgaattaatagaagaggattaagaaaatctcctgcctatattttttattagtaggtgggagatttttctctttcgtagctgaataaatttacataaacatcagaagaagtcattcattttgagttttaaggtattcataataataacgaatagcttcgtcaacgatggtatttaaataaacattatcatcaatatgaatggctttaattttacttaagattcttacagtagagcgtcttaaagtatagcttcttaccatatcaaaagcttcgccatcaacagatggtgttcttccatttggattaacttttaaagttctgtggtccaaaatttcatttttgacatcaggattatatggaatatcatgagaatttaaattaggtgtagtattagtgctatcattgttactgtaattattattattattattgctattattgctattattgttattattgttgttggtggtggtatcgtgaatggtgggtggcgcaggatgttcaataagttcttcatcagaatcaaaagaaaatgattttataagagtcccatctaatttaagctctccttctgagaaggtaaatatatctgaagattcattttccacaatggaaaaatcatccttgatttcgccttttaccttagatttttttacagacatgttcatttataattcctccctatgtattaaaatatgaagaaataatagagtatataagcctcgtcatatccagaaataattaccccctcatataagatatatgcaaatattaaaatatataaatactttaatatgaaaaaatttaaatttttttatatattcataggtttctaggttcatattttagaataaaaataggtttaaatgtttctaggaaaataggtttatgggaatatatttttctaggtaagtatgtttatagaaaaatatttacctaggaaaatatttaaatatgtaaatatttataggaaacataagggtttgagatagatgaatgaaaatttatataaaatatattatggcagaagttaatagtgacagccataaaagagtacttagtacatttattgttttaagtaaataatttataggttataatattatgtatgttaagtgtaacaagccaaaggagagataagtttgaatttagaacagaaaattgttgatgatatatttgatatatgccataagcataaaagtattaataaagttattctctttggatctagagcaagaggggataatttattaaaaagtgatattgatcttgccgtgtattgtgaaaattcaatatctgaatttattgaggacatagaaatgaatacaagtacttatttgattaatatttattaaattgaatatgtactgcaagaattctagcagtaattgtgaactatgcattgaaaattatgaactgtggcttgtgaactgtaaattgaaaatgtgaattgtgcattgaaaaactgtgaattgtagattgaaaactgtgcattgtgaattgaaacatatattatatcgaaaagggagatttaatagtgagtaaaagctttacatttaaactgtatctaatctttagtattattgccatattaatgcctacattatttattattttagtgcagcaaaaaataattatatcctttgaaaaatgggaaattagcaattttatttattttatgtttactattattttattattggccattattgtaaataaaattataagagcatatataaaattaaaacaaatgaaaagtaatttaaatattggagatagaaaatattctaatgatgttaaattaatagatggagaatctctattcaatgaaatagataaaataaatagaagtataagaatattaaaatttgaaaatagtattttatatgatacagcatttgctatatataatatggcatctatacaagagttattagatactatattagctcgtcttgtaactcacacaaatgcagattttggattaatatttttgttagaaaaagatgaacttaaactgaaatcacattctaatgttttatatgaagagttagaaaagacaactttcagaataggtgaaggtcttgttggatggacattttataaagaacaggggttactcacagatgatgttcaaaaggattttagatatatacggtgcataagtgatacaagagcccagattacaattcctataaaaatgcatgaaaaaatattgggtgtattagttttaggaagtaaaaaagattcggattttggagaatcagattttaaattgattaatactatatctggagaaattggacttgctataaataatgcccaattaactgctaagcttcaaaaagaaaatcaaaataatcaaagactgtttgagctaactaaaagaataacctcatctatggatttggaagaggtatctaatatgggtattaagatagtaactgagattatagaagttcattcatgtactttaggtatatttgataaagtggatgaaaataagattaatgttatttcatcttatggggatgataaaaaaggtttggagtttagtggaactgtggaagaagcttttaaaaagaaacatatggctgaattaaaagcagataaaggatacatatattccatcccattattatcaaaagaaagttgtataggtattttacatataaacacaaaaaatgaattaacaatagaagaaattgaacttataaatggaactataacacctttgacaagtgcactagaaaatgcctttttatacaaaaatgtagaaagattagctacaagagatggacttacaggagtctataatcatcgttattttcaaaatatgcttgatgaatatattagaaaagttcaaaaggatgagaatgatctatctatggcaatgattgatatagataattttaaaaaatataatgatactcatggacatccagtaggggatcttcttttaaaaaaggttgtagaagttatgcgaagcattctacgtgatgaagatgttatatttagatatggtggagatgaattcacgataattttgccttatactaatagtgaagatgcaggggttattatggagcaaataaaaaatattattagtgattataaatttgaaattggtgataaagaggaagaagaaacagaagaaacagaagaaacagcattagatgtagaagtgataaaagaaagcatgtttaaatcggaaaaattatttaattctaatatctttaagaagtggatttctgaaaaagttggactaagcaaatctaagtctatatctaacacttttaatattactattagtgtaggaattagctctttagttgatgtcaattatgataaggaaatgttaataaaaaatgcagataaagcatcattaaaatcaaaacgaaatggaaagaatcaattaaccatatggaagccagaattaaatatggattaaaaaataatccaaaattaatatatagtttcacactgaaatttaaatcaggatattacataaataaaaatattttcaatatacatatgaaatatcaatgcgttgtacaggcagttataccacttaccgtcgatacaacgtattttttgtggaataatatgtggactatagataccccaacttatgcatataactcgccgaaatcataaatattttgattccgaaaagctatgaaaatatcgctgaaggttctaagcagcaggttgtagccactttagcatgctccaactttccgagggaagctcgactcattacattcgctgaggaagttcgagaacccaaaataaaattttggactctcacttcacaagctaaaatggaacaacctacagctaagaacctttaacagctcattttcaaatgttttcttcacaaatatatttatgatttctagtgaagatatgaacttaaagttttagtaaatttgtaaatacatttatctaataagttgaattcttaaattgtttatctatatagataagccaattataagttagatttatactatgaaatatatcccaactagaaatgggtaatatacttttgtggaatgtttcattggtaattttgatggatgtgattcttaattgaaattccaaatctatgatttggtcaattgaaattactcagtgaacgaagtgagtcgagtttcctttgaactgttccaaatgtgctagttcacagcttgttctgtgaggctagcattttggtgcaactttatagccttagaatcacccatcaaaattacctggaaactggaataaaagtatattattcatttcggcgagttatatgcataagttcaggtcttagttggggtatctatacaaaagtattaaaaaattcttatatttattagtttatgtatggaacaaatgttataaagtgctataataaaaaatgtttggatattaaatattttttgccatatataagctttaaatagtataattcattctttataaaactatatattgaaaaaatgatttttcatcataattctaaaaatattgcaagaattttatccgtaattgtgcattgtgaactgtgcattgtgaattgtgaattgtagtatatagtttaagatgaatttttatgaattaaactttttgaaacatgtatattaatctctttataaggatgtggaataatgtcgtttttgcaatttaatttttgtattttttttgttatattgattttggcatactatattttacctaagaaggttcaatggatatgtttacttattggaagttatattttttatatatctgctggtataaagaccgttggatatatagtttttacgactttgacagtctgggttggaacaattattataagtaaaattagcgaaaatatgaaaattgaattaactgaaaaaaaagaaacactgacacctgaaaataagaaacaaataaaggctctggcaaagaggaagcagagaataattttctggtgtgttttattaagtaattttggaattttagcgtttttaaaatattttgattttctatcaaaaaacattgttggattgtttaacatggtaacgcatcatggaacagttccaatgaagttggatttgttgctaccattaggaatatctttttatacttttcagtccatgggatacctaattgatgtatataatggaaaatataaagcagaaaaaaacttatttaaatttgcactgtttatttcattttttcctcaaattgtacaaggccctattaatagatttgataaattatcagaacagttatataaaactcacaggtttgattggcagaaatttaaatatggtctccaattgattttatgggggctttttaagaagatggtaattgcagatagagcaatcacattagttaatgaaacatttaagaactatgataattatggtggtgcaatcacagtagtaggagttttattctattcattacagcaatatgcagatttttcaggcggaattgatgttgctatggggatctctgaattgcttggaataaatatggctgtgaattttagaagaccgtatttttcaacctcactatcagaattttggcgcagatggcatattaccttaggtgcttggatgcgcgattatatattttaccctctagctctttcaaagaaaatgtctaaggtatcaaaactagccaataaacatcttggaaggaaagcaggaaggactattccggttgtattttctaacttagtggtatttttagttgttggcatttggcatggagcttattggcattacgtagcgtggggattatataatggaattgttattgcctttagcacgattctagaaccgttttatgaatggttaaaaagagtaactaaagtaaatacggaatgcttctcatatcacttgtttaggatattaagaacattttttattgtaaatttaggatggtattttgatagagcaagtaatcttaactcttcactttatatgttacataataccgtagcaaattttaaaattacgcaattacttgatggtacaatttataaacttggacttaaagaacaggattttagaattttattttgggcaacggttattttgtttgcagtaagtgtattacaagaaagaggagtaaagatacgtgaatttttatctaagcaaaatttagtttttaggtgggcagtattttatgcattaatttttgctgtcataagctttgatgctagttctggaaatcttctaggaggatttatgtatgcacaattttaaatataaatggtttagtggaatcatatttataatggtatttattattttaagttatggcttagcatttgcccttgtgccaaagggaaattattcacgaatgacaatgcgtgaaatgtattctgagaaaaaagattttgatgtggtatttgcaggtgcctcactatctcaaagagatattaatccgtatattatggataaggaattgggggaaaatacttttaattatgcattttctcagcaaatgtttgtgggtacttactattcattgaaagaattattttcttaccataaacctaaactaattgttttaacggttgatccagataattttactagcaaggaagaaaagccaatagtatttctttcagtttctttatatatgaaatcatttttaaataagcttgaatattatttttcatcgtcccaagatggttcttatttagacaggctatttccgtggcgtggatatgatgtaaaatcacctcttgatgtagtaaacaatatttatggaaaatttgattctttttatacagattatccaaaaccgggacaagtagaagctatggaaaacaataagagtggctatgtaggaaaaggattcaataaggttgatcctagtgatcaaaaaggaactttaaattacgataatctaaaattacctccggctaataaaaatataggtgatataaactcaaaagatactgaatatttaaagaagatatctgaattatgtaaggaaaataattgtgagttaattcttttaacaacaccatttcctacatttcaaatccttagagtaaaaaattactttgaatttgataataaggtggcagagatagcaaagaacttaaatattcaatattacaattataacttaataaagccagaattgtttaagcttaaaaatgactatcttgctgatactgagcatttgaatactaaaggagcagaggctttttctaagtctttagcagctttcataaagaagcgccaaaatggtgatgatatgagcaaatatttttataaacaagatgaatattatgcatcaatagattatgtttcatctgcgtggtttaattggaaaaagaatggtagtattataacactatcaggggattctcttcatggatctaaagttacaccagaataccaatttgtattactggattcagaaactgggcaggagcatattatacgagattatgataaaaatccagatttcgtttttgattcaaagtcctataagaagtttaaaatacgagtaaatgccagagcaaaaggatctaataataatgaagcaattcgtcattatgatgaagatgtttccaaagaagagtcatataaaagataatgtaaagtaagctatgaaaaaatagattatggaggaaatattatggaaaaaagcattttatcttatcttgaaaaatcagaaaagaaatttcctaataaagttgctttttctgatggtaaatataaattaacttatcatgaattagttgaagaatctaaaagtattgggagttttttgatagaaaacataggtatgcataaagctgttgttgtctatatggaaaaaggcgcgcgaaatatttcagcatttatgggggtagcatatgcaggttgtttttatgttccactggatgctcaaatgcctgtagagcgtattaacataatattagatacattgaagccagctgctataatttatgataataaaacagaaaaatatctttcgcttatagaaacagattgcataaaggtattgtacgatgaaatttatatgttaccaaaaaatgaagaaaaattagtgactgcaagaagacaaatgattgatactgatcctttgtacattctttttacaagcgggtcaacaggaattccaaaaggtgtcattgtatgccatagatctgtaattgattatgcagactgggtagttaaaacttttgagttggatgagaatactacttttggaaatcagacaccattttattttagtatgtctgtattagatatatttgcaactattagaagtggagcaacattatacattattcctaaaatgttattttcgtttccagtaaagctacttgaatttttaaatgaaaaagaggttaacacaatttattgggttccatctgcattaagcatagtggctaatttaggagctttagatgtcattgagttgcctcatttaaagaagattttatttgcaggagagacaatgcctactaaacagcttaatatatggcgtagacatgttcctgatgcagtatatgcaaatttgtttggaccaactgagattacagatataggaatatactatatagttgacagagagtttaatgatgatgaacctattcctataggggtaccatgtgataatgtagatgctctggttgttgatgaagatggacaacttgttgaagaatgtggaaaagttggagaattgttaattcgtggatctttcttggcttgtggatattataataatccagaaaaaacaagggaagcatttattcaaaatccactaaataagaactatcctgaaactgtttattgtacaggagatttagtttactggaatgagaatagagaattagtttatgtttcacgtaaagactttcaaataaaacatatgggaaatagaatagaattaggtgaaatagaaaatgcaatgagtgcattagaaggcgtggatatgtgttgctgcctatataataaagaaagtgatcaaattgttgctgtatattcaggaagccttgagactaaaaaactatcacagaatttgaagaaaaagctgcctcgttatatgctgcctaatgtctgctataatagaagcagtatgccactcaatatgaatggaaaaattgatcgtaaaaagctaatagaagaatatataaaataaataaacaacattaaatttagatttatgctgtaacttaccgaaattataaatattttgattccgaaaaactatgaaaatatcgctgaaaggttctaagcagcaggttgcatccactttagcatgcgccaactttcctagggaagctcgactcattacattcgctgaggaagttcgagaacccaaaataaaattttggactctcacttcacaagctaaaatggaacaacctaccgctaagaacctttaacaactcattttcaaatgttttctacacaaatatatttataatttctagtgaagatatgaacttagagttttattaaatttacaaatatgtttatataatatgtaaaatcatacaatgaaggagagatatattatggagaagttaattgaattattacaaggtgttagagatgatgttgattttgggacatgtacaactttagttgatgaaggtattttggattcgtttgatattgttgaaattgttaatgtaattgatgatgaatatgatatcgaagttcctgcaattgaaataattcctgaaaattttaacagtgcagaagcaatttttaacttgatacaacgccttttagaagaataaattttattataagttagatggtgagattgaaaattataattatataaaattactgcactaaattatgtttagtgcagattttgttttaagcaagtgatatatggggtataatataagataactattaacactattgaaatagaattcacaaatggtctaattaaaaagaggtggtcacttgaaaaaaatcgttatacttttatgtttgttctggatgggatttatattttatatgtcaggaaataacggaacaatttctcatgaacaaagcactaaggtggttaatataattgaaaatgctcaaagaaatcaagaaaaatcacaagctgaaaataaagataaggcagtaagcagtagtgatagttcccaagtaaataagaatagcattaatgttcagcaggaagaagcaagtaatttagatcatatagtaaggaaaaatgctcatgcatttatgtatatggtactagcaattctagtttgcggtgcacttttctcttataataaaaatggaaaaggtatgataatttacatattgtttatttgtttattttatgctgtaactgatgagttccatcaatcttttataccaggaaggacttcattagttagtgatattttagttgattttatgggagcaatgattggattaggcttattttatttttcttattataaaatttataaaaggaaaaggtcttaaaggaaaaagtacgtagttaaaaaattacgtgcttttttctttatagatatccaaatctaaaactaaatttatgtggtagcttgccgaaatcataaatattttgttccgaaaatctatgaaaatatcgctgaagattctaagcggcaggttgtatccactttagcatgctccaactttcagtttgacaagctaaagtggaacaacctacagctaagaacctttaacagctcattttcaaatgttttctacgcaaatatatttatgatttctagtgaagagatgaacttaaagttctggcaattttgtgaatatgttcatctaataagttaaattcttattggctatctatatatttgtttttatagtttattaggtcaaggttgatttaaaattctctttatttcagcagctgttaaaataatttcacaatacaataaaatttcatgttatactataaataggatataattgacaaaaaaagataagatgactaatatgggggacataatcatgagtaaaaaaataaaaaaagcgataattcctgcggcaggcttgggcacaaggtttcttccagcaactaaagcaaaatctaaggaaatgcttcctatagtagataaacctgcaattcagtatattgtggaagaagcaatagcttctggaattgaagaaattcttattataactggaaggcataaaacatgcattgaaaatcattttgataagtcagtggaacttgaagcagaactagctaaaaataataaggacgatttattaaagatagtcagggatatatcaggtatggcaaatattcactacataagacagaaggaaccaaaagggttaggacatgctatttactgtgctagggcatttgtaggaaatgaaccttttgcagtattgcttggagatgatattgtttatacaaatgaataccaaaagccttgtttgaaacagcttatggactgctatagtgaatacaaaacaagtatattgggagtgcaggcagtagaaccagagcatgtatcaaggtatggaatagttaatggaataaaaattgaggatagagtgtctaaggttaaggggttagtggaaaagccaaatattaaagatgctttatctaatactgcaattcttggaaggtacataataacaccacagatatttgaggtattaagcagaattaaacctggaaaaggtaatgaaatacagcttacagatgcattattagaattgcttaaagaagaagcaatttattcatataactttgaaggaacaagatatgatgttggagataaacttggatacttaaaagctacagtagaatacgcattaagaaattcagaacttagagatggatttacagattacttaaagagtatagttatttaagttttgaaattaagttgaattagtaaaagaggaaaataatgagtatattaagtttaaaaaatattagcaaatattataaagtaaaaagtagtgaaaaagtttatgtgctaaaagatattaatttatcttttgagaaaaatgaattagtggcgattataggagaatcaggtagtggtaagtctacattaatgaatttaataggtggattggattctaaatataatggagaattatttgtaaacggagataatattaaaaagtttaagaaaagagaactcgatgattataggaaaaataagattgggtttgtatttcaaagctttaatttaataccacatttatctattttaaataatgtagcaatagctatgacgctatctaatgtaaagaaaaaagaaagagttaaacgtgcaaaagaattgttaatagaacttgggttaaaagatcatataaataagaagccaaaccagttatcaggtgggcagaaacagagggtagctattgcaagagcattagtgaatgatcctgaaataattattgcagacgaacctacaggaagcctagactcaaagacatcaatgcaagttctagaaataatgaagagtatagctaaagctggtaaacttgtgattatggttactcattctgaaaaagtagcatcttgctgcagcagagtaattaaaatagctgatggaagtataaatgaggataataaatcctttgaattggaagctgctgttggcgatgagaagaactatgaaggaagcagatacatcagaaaaagagggaaaagtttaaattcttttaatgcaataaagctggcacttactaatatgaaggaaaaggcaataagaaatatatttatttctataggctcaagtataggaataatgagtcttattttgatgttggcttttggaaatggaattaaggcttattttaatagaactatgaatagttatgttaatcctctagtaatagaggtaaacatgcctagtgatgattctgaaacggttgatttagatattgcaaccatacagaagcctgacattaataaacaaactccatttaaagaagaagatataaaaaagctatcagaaatagaaaatgtatcttctatagaaaagggatttaatgaaatatctctaggagcagattctttaagttataatggaaaaggaagcaatgtcatgaggctttcaaccatatcttcaaatataacagaatcaaatcttaaggaaggaacgttgcctaaagacggagagatactaataaataaaactataagtgataaagttggagaagacgttattggtaaaaaggtgactttgagcattttagtaaatcaaaaggtattaaaaaaagaatttgttgtaagcggaatttatactacagcaggtggagatttaacttcaatcatgaagtctgtctttttaaactattcagatttagaaaactggtatttagagaataaatatgaattaaagtctaatgtaatgtatttaaatacacctagtgaaaaatatactgacggaataaaagaaaaggttaaggaactcggatattcaggatcttcgcaggagcaaatgttaaatatgtttaattctatgataagtattttaacttacgtgctatcaggaatttcggcggtatctttggtagtatctgcaattatgattgtagtaataatgtatattagtgttgtagaacgaactaaagaaataggcataattaaagccataggggggcgtcggaaggatataagaaagatttttgttttagaagcgttcttaatcggctgcttcagtgggattattggacttgcctttgcatatgcattaatgagaggtataaatatcaagtcaattaaattatttggaatcaatttagttttgataaagaagtcatatgctgcttttggattaacattaagtattgctataagcgttctggctggactattaccagctaataaagctgctagattagatcctgttgaatctttaagaagagaataattaatagtaaatatatatgttgcaaaaataatttttcataataattctaaaaatattgggaaaattttagccgtaattgtgaaatgtgcattgtgattgtgaattgagaatcgtgcattgtgcattgaaacatatatatataataaacctttggatgttacattatccaaaggtttatttttactgtatattttagcactcagaaaaccatcttctaaatggagctcacgattatgttaaatgcttgtacataaataagtacctattttttagattaaaagctaaatacaagaataacaagttttattattgtaattcaaaaagagccccttttactgaaacatattttgtatcatcttcagtaatatacatatctgcagaatagctactataagatatgtggaggcgtttaacagtattgccgctaactgaaatcttccattttgatttgaattcagaagctgtcattgagctttctttaatagtaggattaatagttgttacgccaagaacaggaagtgtagcagtaataccatctttagagattgtaaattgttcaccgacatatgattctatagagtcattgttactacctttataaacgagatcgccaacggtccaagtcccatataagtattcatatgaagagtcagtgtcatcattttttgatccagagctactgcctcctgaaccacctgagcctcctgatgaagtagaagttgttgtattagtagtacccgtagtagtattttgatttgctgtagatgcatttactttttcgccattttgaccaaaagtataacttactccgttaatagttatagttcctgttttcattgctccagagtcacttaaataataagttttaccgtttaattcaagtaatccagttttcatatctccagatgaatttaggtaataccaagctccgttgtttaaaagccagccagtttgcatatctccagatggattagtataataccatttaccgccatcgctaatccagccagttttcatttcgccagatgatgctaggtaataccatttaccgccatcattaacccagccagttttcattacggaatttgaatcgaagaaataccaatttccatttattgatttccaaccggataccgcagcatctccgtcgctgtagctccaactactattatcagcttgtctccaagcagctgatgcttttgtaggaagcacaacagtagcagtagctacaagtgttattgcagctacaaaaactaagttttttagtttgaaatttttcattttaacactcctcataatacttgattagttatgctcaaaattcacaatagtttgtttgaggttattgcatatgtataactatgtgaagtttgaaatatacatatatataatttaccatttaaatatgtaaatttcaaattattataaatgatggaaggttaattaatatctagaataagaaaattgaaaaaaatagtaatttttaaatgaaaaactattcatataagtggatatcatggaaaaaatattgtaattagcccataaataatatattatagaatatgtatactgttattggaagagaatatagttaaaatattgaaaggggaaaaataagaatgaaaatgaaaaaattattatcaatgggagcacttggattagtagtagcttgttctacatctataggagctttagcagctgacacacaaacaactagtaagactgatttactaataaaaatgattgcaactcaatatcttgagggaacaaatccaacaggtctatttgaaggggtaaaggcagatactccaatcaatacagttgtcactgataaattcattggcaatgttaaagatacgtttggagattctgaagttgctaataaagcaataaaaaaatttgaaaacaataaagatgctactgtaaaagaaattttacaaaaagctactagcagccaagagaatttcgagagatttagagatgatttcatagaaattgcaaaaaaagtacaagctatggataaattaacagatgatactgctagagcagcggctgaaaagaaagtaattagtattgttagtgcttataatagctctttaactgttgcttttggaaaagatgctgaaggaagaacaagtgctactattaagaaatcaggtaaaactataattcaacttaattctgaggatcttcaaaaggttatagataaggctaaagatttcacttggaatgattttaataataaaaaaagcgaaataaaaaatccatcacaaaaataaatttaataattagatttgtaagaattttttaatcttattaggaaggattaatatactagcatgaataagacaagaaaaagcatcagtgttattattgccatattgttagtgtgcagtattatatttgcagtattatctatatttcttaaggctattgtattaaataaaaatacgtatactaatatacttgataaaaataatacttatgaacaaattacaacatcagtttatgataaaatagatgctatattaagtgctaaaaatattaattatgacattaaggaatctataataacagaagatgacataagaaaagaagctgatactatgatttctggcttaattgattatttagaaacaggagaaaataatataaaacctttaaatacagaaatatataagcaaagagttgcggatatattacaatctatatttggtaatttgaaatctgataaaaatgatttgtcttataatagcaatataaagctggataatatggcctatagtgggcatcctgttatgttcagtaatatggttgttaataaagaacagtcgcaagtaggacaaaatactattaatgtagaaaagctaatgtctaaagaagaagcagaggctagagtaagggaaatattaaaagaaaaaggtttaactgaggaacaagctattgaaaaggcaagaaaaaaagggataactgaagagcaagctttaaatatattggctgggtatgggataacaattgatgatgattcaactgggtcaacagcagagaaaactactagcgatactagcaatgataattcacctgcacaagaaaatcagggggatgttaaaaactcaagtgagggatcatcaaatagtaaaattacaaatcctacagatcaacctggggttagtaaaagtgccaaaagtcagttagaaaacataacaaaaaaattacaaagtgaagctgaggataatattaataaagaagttgaaaaaataaacttaaataagatgttaggttctagtaagcttcaaaagatagcaaaagtcacatcaataagttataaactgttttggctatttataatattaccgtttattttgatgggaatgctaatcaaaataaacggcggagattttaattcaagcttaaaatacataagaaatgcatttttatcgtcaggtctagtattgttagcaatctctagtggtgcgtacttttttaaagcttatgaaaagataaatattagccaagcttatttagttgatacaatttcttatacgataaaatatttttctaatattttattggtttatggtgcaataatatttgtcataggtttacttatgtttttgcctaaacttagaagaaggctaaattaagagtaggcaatataaggtgttatttgtttattaggatgatataaacaaattaagttttattataattgaatagtaagagtatttaaggagggtaatataataatgaaaagtttaaaattaaggaaaatagttgcatctgtagttgcagcattaacaatagcaactttatctccaattggagcatcagcagaatggaagcaagattctaatggttggtggaatacagaaggaaattcatattctacaggttggagatcaatagatggaaattggtattattttgattcaacagggtatatgaaaacaggatgggcaaatgacggaggtacatggtactatatgcaaccatcaggagaaatgagaacaggctgggtaaatgatggcggtacatggtactatacaaatgcatcaggagcaatgcaaactggatgggtaaatgatagaggtacatggtattatttacaatcatcaggggcaatgaagacaggttggataaatgataatggtgtatggtattttgcatcaacatcaggagcaatgcaaacaggagtaattgaagttaatggaaaagtatattatcttgcagcaaatggagcaatggcaacaggtaatgtaacaatcaatggagttacttatacttttgcagcaagcggagaagctataggggataagaagccgacaccaacattagcattcacatctgctggtgttccagtgaaagtaaatgatccgtcagatacaacaggaactactattccaactacaaaaactggaggcggtggtggaggccatcatagctcaggcggaagtacagtagatcctgagcaagctgcgatagataataaatatgcacaagaagctgtaattcctgaaataaaaccagtacttagtgatgataaaaaaactgcaactataaacgtagcagcagtacttgcacctaagtttaaagaagaattaggacaagaaaaacctgataatatagatggtgttgactatcttgttaagaaagatataactataagtacagctgatggaactgatgtaggtataacacaaactggattagctgaatataaagtaacagcaggtactaaaggaacagtaacagcagttatttctttattaaatcctaaaacaggacaattatattatgtaagttcacaatctacaccattccaagcttaatagctgaatttatagacgaatataaagatttaagaattattaattatatttgtattaaactaagagttttataatcaaatgtaatagtaatacttattcattaatagcagaagcaaagcagtaagaattttgaattcttactgctttcttatttttttatatctgctataatattacttgtcgctatttttatttctagcgaagaaaaatattggggaaagtgttactttatataaaataaagtttattatatatattgtaaaaataaatcttcatcataattctaaaaatactgtaagaattctagacgtaattgtgcattgtgaattgtgaattgtaaaatatatataagttaagaggcattaaagaaaaaagaagttcaaaactatcaagaagatttcgagttaggcataagtaatatagcagtaagaagggccttgctagggatatatccgctgctaaatagaaaatttgaaatcttaggcttcgagtgaatcaattgctttgagcatatgctgagacttttttattctctagaagtttatattaaagtcaaatttttggcgttgtactctttgatggcataaattatgaaagttactgattaagagtgttaaattcttagagagaataaaaaagaagtatattagtcatttggatttttgtcgtagggattaaaaatcagatctataaaaagtatcctactcagtagtcgcctgagattttactctgatagaaaatgattaaagtgagatttgttattatttttgattgcgttttaaaacgataattgcagaaaggagtgggaaaggtgagaccattagcagatttaatgagacctaataaattagaagattttgtaggtcagcagcatatattagggcaaggaaagccattatataacttgatagctggaaaaaacatatgtaattgcatattttacggaccaccaggaactggaaaaacaactttggcgaatataatggctaattatgtagataagaaattttataaattaaatgcaacagttgcatcagttaaggatattcaggacataactaataatatagatagcttattaaattataatggagttgttttgtatattgatgaacttcaacattttaacaaaaagcagcagcaggcattgttagaatttatagaagatggaagaataactttgattgcaagtacaactgaaaatccatattttgttatacacaaagctataataagcagatgtaatatattctcttttaagcctctaactacaggtgacataatagttggtcttaagagatctatacaaaagcttatagatgaagggatagaaatagaatattcagatgaggcgctggagtatattggagaaatctctcaaggtgattatagaaaggcttataatattttagagctggctgtaaactctcaggttaagcaggttagagttatttcgagcgaatatattgaaagtctaggccaatcaagtatgcgggctgattctagtggagatgaattttataatttattaagtgctcttcaaaaaagtataaggggcagtgaccctaatgcagcagtacactatctagctagattgattaaaggaggaaatctaactgctataattagaagaatatctgttattgcagcagaagacattggtcttgcatttccaaatgcattatctgttgttaattctggaatagaactttcattaaaagttggacttccggaggcaagaataattctttcagaaatagttgtatatttagcaacgcttcctaaatctaatagtgcatacttagctatagattctgctatgagtgatctagaaaacattaactttggagatgttccaatgcatttaaaggatgctcattactctggagcagcaaaccttggtgttggtggctataaatatcctcatgattatcctaatcattatgtaaaacagagttatttaccgcaagaactgcttggaaagatttattataatgaacaaaataataaatatgaagagagtttgaggaaatactgggcagaaataaaaaaataatagcaattatcgtttgacaaaagccgagtattttggtaagatataagcgaatttaatatatcttttataatactagaaaaacaaagaaatatcaacaaaaaacgaaaaggggtgaagaaataatgaaactttcaactaaaggaagatatggagttagagctatggttgacttagcatctaattatggtggtgccccagtttcaataaaaactatatcaaagagagaaaatctttcggaatactatttagaacagttatttagcccgcttagacgtgctaatatgattagaagtataagaggtgctcaaggtggatatgttctatgtaaaccgccaaaagacataacggttggcgatattatgactattcttgaagggccagttgagatagcagattgtattgatggtgttgagtgcgatagctcggattgctgtgcaaccaaagcagtttgggagaagattaaaagaagcatagacgatgttatgaactcaattacattacaagatatacttgatgattatgagacaattaaaaacaataagaataatattaagatagtggataggagtgaatgattatgaagaacgtatatatggattattcagctacaacttatgtaaagccagaagtattagaagaaatgcttccttattttactgaaaagtttggtaacccatcttcattttatggaatatcaagagaaacaaaaagagctatagataaggcaagagaacagatagcagaggcgttaaactgtttacctgatgaagtgtattttacaggtggcggatcagaggctgataactgggctataaaaggtattgcatcagctcataagaataaaggaaaccatataataacaactaagattgagcatcatgcagttcttcatacttgtgaatacttagagaagaatggctttgatgttacatatttagatgttgatgaagaaggtttcataaatttagatgacttaagaaatgctataactgataagacaattttagtaagtattatgtttgctaataatgaaataggaacaattcaacctataaaagaaattggagaaatctgtagagaaaagaaagttttcttccatacagatgcagttcaggctgttggaaatgttcctgttgatgttaaagaaatgaatatagatatgttatcacttgcaggtcataagatttatggaccaaaaggtattggagttctttatataaagaagggaattaaaattgataatttaattcacggtggagctcaagaaaagaatagaagagcaggtacagaaaatattgcttctatcgttggacttggtaaagctcttgaacttgctactaataatttagaagagcatatgaaaagattaactgcgttaagagaaaaattaatagctggtttacttgaagttccatacactaaattaaatggaccaagaggagataagagacttcctggaaatgttaatgtatgttttagatttattgaaggtgaatcgattttattatcattagattttaaaggggtttgtgcatcaagcggtagtgcttgtacttcaggttctttagatccatcacatgtattacttgcaatcgggcttcctcatgaaattgctcacggatcattaagacttagtatgggtgaaggttcaacagaagaagatgtagattatgttcttgaagttgtaccaccaattattgaaagattaagaaatatgtcaccattatgggatgactttttaaagaaaggggaaaattaatatgatatacagtgaaaaagtaatggaacatttccaaaatccaagaaacgttggagaaatagtagatgcaaatggtgtaggtgaagttggaaacgctaagtgtggagacataatgaaaatctacttaaaagttgaagataatatcattaaagatgttaaatttaagacttttggatgtggatcagctattgcttcatcatcaatggctacagaattaattaaagggaaaacattagatgaagcttgggaattaactaacaaagcagttgcagaagctttagatggtcttccaccagtaaaaatgcattgttcagttcttgcagaagaagcaattcataaagctataaatgattacagagcaaaaaatggattagaagtaatacctatggaagaacatagtgatgaagatctacatgctgctgtacatggagaagagtaataggtgaatttatgaagaaaaaagttttagtaggtatgagtggtggtgtagatagttctgttgctgcatatttattaaaacagcagggatatgacgtcattggtgctacaatgcagatttggcagcacgatgaggaatttgaagaaagggaagggggctgctgctccctttctgctgttgatgatgcaagaagagtatgcgacaaacttgatataccattttatgttttgaattttagagattattttaaggaaaaagttattgataaatttgttcaagaatacatagacggaaaaactccaaacccttgtattgaatgtaataaacatttaaagtttgatgaacttttaagaagagcaagaggtataggggcagattatgttgctactggtcattatgctaaaattgaaaagcgagatgatagatatcttttaatcagatctgatgatgatagaaaagatcaaacgtatgctttatataattttactcaagatcagttagaacatacattaatgccttgtggagattatgaaaagacaaaaataagagaaatagcgaaagaaattggtcttgctgttcataataaaaaggatagtgaagaaatatgtttcatttctgataataatcatgggaaatatatttcagaagcagaaccaaatagggttaaaccaggtaactttgtcgataagagtggtaatatactaggtaagcataaaggaattgtatattatactattggacaaagaaaaggacttggactttcacttggaaggccagtatttgtaacaaatataaatgctaaaaccaacgaagttgtactaggttctgaagatgatatcttcaaaacagaattaattgcaactgatgtgaattttattccttttgataaactagaaaaagaaatagaagttacagcgaaaatcagatattctgcaaaaccggcagaagcgactttaataccacttccaaatggtagggtgaaagttatctttaaggaaaaacaaagggcaataactaaaggtcagtcagttgtattttatgatgatgaaatagtagttggcggcggaataatagaaagtataatctaaagagttattgtaatttaaatatttttaaaactgagagtgcgtaagtgctctcgttttttgtttgtttgttttggtttgaggttgcagaatatttcaatatgcaagtagcagaggagtgttatagacagtaaaaagctttataggttcagagcaagctgcgcgttttacgagaggattaactatgtgatttagaattaaaaagaactttgtgagtaattgtcctgatttgataattgatagaaataatactaaaaagttagtataaataaacaatatatgtgaatatgaattatcagctagaaggaataaaatatttgcctatattttacataatagtattaacttatgaagatatacttgatataatatttttggaagtaaaaaattggaaggtgattttttgaatatcttcaaggcgttaaaaagatacgatgaacatggctttaattctaaaggatttcataaaaatggcacgaagtatgatgagtatggatttggtaaaagaggaatgcatagaaatgggacatattataacgaggaagggtatgatagagaaggatacgacaaaaaaggatatgatagaaatggatttaatagtgcaggttttgataaagaaggatataacaaaaatggatataacatattaggatacgacagaggtggtgaatacttagaagtaagatataagtggaagtgattggagtaaatctaaataataagagggtaatgtcatgaagcgaataaaaagctgcatttctaaatcggcatttagaatgaacattttatacttacattaatttttctaataactgataatggtagtgtctcttttattaaagttaaagaaaacggttgtatattattgaatagattcacctaaattctaaggatattaaaattttgtctcaaaaattttagttgatgaaattaagtacttactaaatagtaggtactatttttattctctagtactgctcatgaagacaaagtatccacaatgtatgatgatgaaagtattggtattttcgtaggagctcgcccatagaggcaaaggcttcataattaaacatattcgtctacgattttttaagtgtaaaattattgtgcggtaaaattatacatgtgagcatattaatatgaataattttcctcttgttggagactatatcaaatgaactagatttagtttattaactatattacttattttagagaatatagggggaacactacagtatatagtgtatagacataaacaggcataaggactttctattaaaaattattttggaggtgcacaatgtttaaaactagagacttctatttcaagaaagtttataacattaaaggcaaaaagattggcattatagaagacttatacatagatttcttttggggaaagattgtaggatttaaggtatccaatagccatctgttctctaaaaataactatatagacatggaagatgttatagatataggtgaagatgtaataatagaaaatataaaaaaaggtgagggacttacatttaaagagattaagtatatggaagttattgatacattggggaatgttaaaggagttctagaggatattataatagatatacaagattattcaattaaagcaatagttataagctcagggttagtagataaaatgataaagggtaagcaaattattctattaaatagatgcatcctcggagaggaatatatattatatacaggaaatgagggagttatgtttaaaactttacctcataatatggataggcacaatgcaattaagaaagcataaaaaagcaattcttctaggtataaccctattatgctttattagcttaatattagcttacatttttaacaaatcaataaattcaataataaatattattgtagcatcttttattttagcttatactttgactcctattagggatggatttgaggcaaaatttagaataagcaagaaaatatcctcaatagtggttatattaataattataggtatcataactgcatgtataattgttatagttcctacgctatttaatgagatatccaatatcagtaatatatttgataacgtaagcaacttacttgaaggaatgttaaagaaaaataacttggatgacttttctaccactaatgtaatttataatgaaattttagaaaaaggaaatgttttttggacaaatttttcagaaaatgcagtggaaaatttaatgagcattggagataatgcaatgtcactagcaataatacctattatggtttattactttctttgcgatggtaataaaatatatagtaaaatgctgttgctattgccaacttctaaaagagggcttactaaaaaaatattaagcgatattgatagagtattaacaagatatataacaagtcaattgatgctttcgggattgataggcggattaacattgatattgttattattattgaaagtaaaatttcctttatggatttctatattgaatgcaattttaaacataataccttattttggaccaatttttggtgcagttccggcggtaatagttgcacttttagattctccaataaaggcattttgggtaattgtgggtatgttcataattcaacagcttgagggcgatattttatctccgaaaataacaggggacagcacagaaatgcatccatttgttataataattttattacttataggagataaatttggcggatttgttgggatggttttagtagtgccaatagctgttattataaaagttttatatgatgatataaattactatctgttctagattttatagataaaaaacttaaagattggacttattagatgaacattttacaaagttactaaaaccttaagttcgtatctgcactagaaatcataaatatatttataaccacaagggcaataatatgaagaaaacatttgaaaatgagctgttaaaggtacttaagcagaaaacccaaaaagtgatgctccgaattttatatttggttagcagaattttcacacagtgcaactttatagccttagaatcacccatcataattacctagaaactggaacaaaagtatattattcatttcggtgagttatacacataagtatagattatagttgggttatctataaaaaagcttatgcattaggggtgtacaaataaagttgaatattgacataattatctatatgaaatataattttgatgaaataattaaatattaagcgatgaataggataagtaaatttatcatagtcatttcagagaaaaagtggttggtgaaaacttttggctatatattttgaagctacctaggagctataaattactaagtgatgtatgattatatcatacataattagggtggtaccgcggaattccagctttcgtccctatatctatttggggagagggctttttttatttggtaaattatacacctataaaaagagcagctatgctgcaattaggatcttttcgcatttgaaaaaggcagctatgctgcaaataataacttttcacctataaaaagagcagctatgctgcaaataataacttttcgcctataaaaaagagcagctatgcactactgaaaagagcagctacgctgcaatacggaacttttctgcaattaggatcttttcgcctataaaaagagcagtggttctgcaattaataacttgtcacaaataattatgaaatcttaaatcttcataagaagattataaacaataaaaagatattcacaatggatatcggagtcaactgttaactgaaaaaaatggaggaatagtttatgaaatttatgaaaaccaatgacttaagagaagcatacttgaaattttttgaaagtaaagatcatctaagaatggatagcttttctttggttccaaagaacgataaaagtttattattaataaatgcaggaatggctccgttgaagccttattttactggattacaagagccaccaaagagaagaattacaacttgtcaaaaatgtattagaacaggggatatcgaaaacgtaggtattacaagtagacatggtactttctttgagatgcttggaaacttttcttttgcagattatttcaagaaagaaataattccttgggcttgggaatttatcacagaagtgttggaacttcctaaagatagattatatgtaactatatatttagatgatgatgaagcatatgaatattggactacacttacagatgtagataaaactcatatatttagattaggcaaagaagataatttctgggaacatggtgcaggtccatgcggtccttgtacagaaattcattttaatagatcagaggaaataccaactaacgctgatgagttcgttaaattagcagatgaagataagataatagaattctggaaccttgttttcactcaatttgatggtgatggaaaaggaaattatgaaaaacttgctaatactaacattgatacaggtatgggacttgaaagacttgcaactataatgcaagagaagaatagtatttttgaaattgatacattagaaaatattttaagtgaagttgcaaaattagctaatgttaaatatggagaaaatcaaaaaacagatatatctttaagattaataactgaccatattagatcgataactttcatgatttcagatgatgttatgccatcaaatgaaggtagagggtatgttttaagaagacttcttagaagagcagcaagacatgggaaaactttagggattaaagaagcattcctttgtaacttatgcgatactgttataagagattcaagtgaagcttatccagaactaaatagcaaaaaagaatatattaaaaaagtaattaaaatagaagaagataaatttagagaaactttagattcaggaatggaaatattaaatggatttataagtgaactaaaagcaaagaatgaaaaagttcttagtggtgtagatggatttaaattatatgatacatttggttttccgatggaacttacaaaagaaatattagaagatgaaggcttatcattagatgaagatgctttccacgaagaaatgaaagttcaaagagaaagagctagaagtgcaagaaaagtttctaattacatgggaactgatgttaaaacattagatattataccaggagaaatcgaaactgtttttgatggatatgacaatgatactttaaatgcagaagttaaagtgttaattgaaggtgaagactttacagatgctataacagaaggaaataaagctattatagttactgatgttactcctttatacgctgaaatgggtggtcaaataggagatacaggtgtaatatttaatgatggttttaaagctaatgtgcttgatactaaaaagaacataggtggaaaaatagttcattttgttgaagttgtatcaggagaacttaaagtgggagatacagttactatagaagtggataaagttagacgtgaaaatattaagaagaaccacactgcaactcaccttttagataaagctttaactgaggttcttggatcacatgttcatcaagctggatcatatgtaagtcatgatagacttagatttgacttttctcactttgaagctatgacagaggaagaaataagtagggttgaagatttagtaaatgaagcagttacaagtgttacaccagttgttacagaagttatggatcttcaagaagcaaaaaatagtggagctataggtatatttgatgataaatatgctgataaagttagagttgtaagtgcaggggaatactctaaagaattatgtggtggaacacatatagataacacaggaaagattggtttattcaaaattatatctgaaagtggtattgctgcaggaacaagaagaattgaagctgtaataggaaaagaagcttataagatagtaaatgaaaagaaagatttattaaaagaaatttcaactaagcttaaatgctcagaaaaagaattattagctaaacttgagcaacaagttaaggagcttaaggaaaaagataaagaaataacagctctaaaatctaaattcgcatcaatgggaatagatgatatagtatcttcttcaagaaacgttaaggatataaatgtaatttcttatgaattaaaagacgttgatagtgatactttaagagatgtatgcgaaaaggtaagagataaagctccaaatagcatagttttacttatgagtgcaaatgctggaaaagttattatttgtgctatggcaactaaagatgcagtagctaaaggtgctcattgcggaaagttaataaaagaaatatcttctatgcttggcggcggtggcggcggaagaccagacatggctcaagcaggtggaaagatgccagaaaagatacaagaggcgattgaagaatcatataaaatagtggaaactttagcaaagtagtatactttttataaaaaataggttataatctaattatagttagtgaataaatttaaaaaataaagttaataataaatatggatatcgtttccttataaaatgattaagggggtgagttgctttaagtagcaattttatgagtaataatattgaacatacaatgcaatttgatttaagtaagaataaagaagctcttacaaaaacaatattaacagaggtttataattcattacaggaaaaaggatataatcctataaatcaattagttggatatttgatttcaggagaccctacttacatcactaattacaacggagcaagagctttagtaagaaaactcgagagagatgacatactagaagaagttataaaatcttatttagagataaagtagagagtgcccgtttataacgggcacttttaattttagtatatgaaagaaagcgtgatatcgagattttcttgatatttgatgcttatatgttgtgagaggtgctgtaatttgaggatacttggattagatttgggttcaaagactattggagtggcagtaagtgatccgctaggattcactgctcaaggcctgactacagttagaagaactaataaagaaaaagatatagcggaaataaaaaagttttgcgatgaatatgatgcaaaggttattgtaattggattacccaagaatatgaacggaacaataggaccatctggagagattgcgatggcttttggaaaggttatagaagaagaacttaatgtagaagtgaaattctgggatgaacgtttaactactgttgcagcacataaagcaatgcttgaagctgatttgtcaaggaataagaggaagaagatagtagataaagttgcatcaacttacatacttcaaggatatttagatatgatttcaagaaaataaatatctgatggaataggaaattttgaggagtatatgtataagattaatttcttatacaatatgcttttattaataaatatatattgcaaaaataatccttatcataattctaaaaaatcgcaagaattttaatcgcgattgtgaattgtgaaatgtgcgttgtgaattgcaacataaataaaaataaaatacagaagggatacatttatggataaggaagcaaaatatgtatatatacctgatcaagaaggaaatgacgttaagtttgaggttgttatatactttgaaatagaaaaattaaaaggccaatatattattgcaactcctgcatttgaagaaactgatgaagcttatgcttttaagatattcaaagatgaggatggaagcgatatatttatagcgttagaagatgacgatgaagaattcgaaatggtattagaaacttatgaaactcttatgaatgaagatggtttaattgaggaatagtatacaatctagtaatatgatattttctttaatgtttatttagagaaaaatcaattcatttaatatgaaaagtgaggtgtcatgtatggatgcatcaaatttaattgatatgaatgccttgaaggaagacttgaaaaaaaagggttataaattaacaccacaaagaagatcaattgttgatactattattgaaaatgaaggtcaacatttaacagcggaagaaatatatgatagtgtaaaaaaaagttgtccggaaattggattagcaacagtatatagaactattcttttgttagaagaattaggagtaatatcaagattagatctaaatgatggatgtagtagatatgaaatagtgcattcaaatgaaacgcacagacatcatcatcttatttgtaatatctgtcataaggttttggaagttcaggatgatttattagaggatttagaatctggaattgaaaagcaatataagtttaagattttagaccatagtttaaaattttttggcgtatgtgatgaatgccaaaagaagctaagtgatgaataaaaggacttttaatagaaaattaaaaataaaataaagtcaaaagtgtgccagatattttgccgtgaatgaagtaaggatatgtattttacggtttatatatttactaagaaaatgcatttagtgccatgcttaaaagggtatggtatcaaatggtaattgttattaaggtatatgtatttaaagtgaattaatatggctaaaccttatatgctaaataaagcaatgtaggcttatagattggaatgtagattaaggtcgcctatattaatgtgaaatatattgtcacataggacttgttattttttaatgctaaagaaagaacctttgtttataaatataatattaagaagaaggaggggaagtatgaaaaatgaaagagcgaagataaagataattcctcttggtggtataaacgaaatcggaaaaaatataacagctatagaatataaagaagatattattattatagactgtggactaaaatttccggatgatgatatgtttggaatagatattgtaataccagatgtttcatatctaatcaaaaattcagagaaaatcaaggggatatttttaactcacggacatgaagaccatataggagcgttgccgtatgtacttagacaactaaatgttcctgtttatggcactaagcttactcttggaatagttgaaacaaaactaaaggaacacggtttgttagcttcaacagagttagtaagagtaaagccaaaggatataattaaacttgatagtgtttcagttgaatttataaagactaatcactcaattgcagattcagttgcaattgcagttcatacaccacttggggtagtacttcatacaggagattttaagattgattacacaccaattgatggagaaatgatggattttggaagattagctgaacttggaagaaagggagttttagtattaatggcggattcaacaaatgttgaaagaccaggatatactatgacagaaaaggttgttggcgaaactttcctaagactttttggtaaggctaagggtaggttaatagttgcaacatttgcatctaatgttcacagaattcagcaaataattacagctgctgaagcttatgaaaagaaggtagcagtttcaggaagaagtatggagaatattgttcaagttgcaatagaacttggatatctcacagttggaaaagatgtacttgttccagtggatcaaatttcaaaatatccaaacgaaaaaattgttgtaataacaactggaagccagggggaaccaatgtctgctcttgcaagaatggcagcatcggagcatagaaaaattaatgtaattccaggcgatacagtaattatttcagcaacacctataccaggtaatgaaaaatttgtttcaaaagttataaatcaactatttaaaaagggtgctcaagttatatatgattctcaggaaaagattcacgtttcaggtcatgcatgtcaagaagaacttaaactaatgcaggctttagttaaaccaaaattctttgtgccagttcatggtgaatatagacatttaaagaagcatggtgaattagctatggaagttggactttcagaaaagaatttattaatacctgagaatggtgatgttatcgaagtagcaagaaattatattaaaaagaatggtactgttgtttcagggcaagtgtttgttgatggtctcggtgttggagatgtcggaaatattgtcttaagagatagaaaacatctttcacaagatggtatattaacaatagtagttacaatagagaaacaaactggaagggttgtatccggtccagatataatttcaaggggattcgtctatgtgagagaatctgaaggtcttatggatgaagcaagagaaattgttaaatctgtattaaagacttgtgaagaaaaacagattactgactgggctacattaaaatctaagatgagagatcaacttagagagtatctttacgaaaagactaagagaaaacctatgatattgccaataattatggagttttagaagtttttagaagtatgaaagaaaatagtgattctaaaactgcaaagaatatattttgttattgataattaaattatgaattaactaaatattaaattgttaaatatatattctttggaatagggttgactttttttgatgaaaagagtagaatttataatagttgtgtaggaattggatactttaagtatccaattttcttttggagaaaaacagttataggtttacatttatacgtgaataattttaatcgcaatttatttataataatagtaataatatattaacagtatgaagttatttacagtgtatacttaaattttaactaatttatatacaaactaaagagaaactataaaagaaaaattcgcagcttgcttgctgtttggaggaataataatggaattaattaaaagagaagatataagaaatattgctataattgcccacgttgaccacggtaagacaactttagtagatgctttgttaaaacaaagccatacatttagagctaatgaaaaagtagaagaaagagtaatggattctaatgacttagaaaaagaaagaggaattacaattctttcaaagaatactgcagtaatttataatgatataaaaataaatatagtagatacaccagggcatgctgatttcggtggagaagttgaacgtgtacttaagatggttgattcagttttgcttgttgttgactcttatgaaggaccaatgccacaaactaaattcgttttaaagaaatcattagaattaggtttaaagccaatagttataattaacaaaatagataaaccaaatgctagaccaacagacgttattgatgaagtatttgatctattcgtagaacttggagctaatgatgaacaattagatttccaaattatttatgcatcagctagagaaggctttgcaaaatataatgtagatgatcaaaataatgatatgactcctatatttgatacaatattaaaatatgttgcaccaccagaaggatatatggatgaaccacttcaaatgcttgttagtacactagatacaaatgcatttgttgggaaaattgcaattggtaagatacatcgaggtacagtaaagagaaatcaaacagttgctttattgaagaatgatggatcaagcgctaattacaaaataactagtatattcacatacaaaggattaaagagagaagaagcagaagaagcttcaatgggagatatagttgcagtaagtggtgttattgatgctaatataggtgatactatagcagattcatcatcgccagaagcattaccattccttgaaatagatgaacctactttaaatatgaactttatggttaatgattcaccatttgcaggtcaagaaggtgagttcgtaacatcaagacatttaagagatagattaatgaaagaacttgaaacaaatgtaagtttaagagtaaaagagcttactccagattgttttgaagtttcaggaagaggagaacttcacctttcagttcttattgaaacaatgagaagagaaggatatgaattccaagtttcaaaggcaaatgttatatttagagaagtagatggccataaggaagaaccaattgagtacttaacaattgatgttccagaagaatttatgggacctgttatggaaaagcttggaccaagaaaagcagaaatggttaatatgacatctgcagtaaatggatatacaagattagaattcacagttccagctagaggacttattggatttagaagtgaattaatgactgatacaaaaggtaatggaattatgaatcacgtattccattcttatgaaaaatacaaaggtgatattccaggaagaagcagaggatcaatagtttcatttgaagcaggagattcaatagcatatggattatatagtgctcaagaaagaggccaattattcataggtgctggtgttcctgtatatggtggtatgattgttggggtttctgcaagagcagaggatcttgaaattaatgtatgtaaaatgaagaaacttactaatacaagatcatcaggtgctgatgatgcattaaaattaactccaccagttgaaatgtctcttgaacaatgtttagaatttataaatgctgatgaattggtagaagttacaccaaagaatataagaatgagaaaaagagtattggatagtgctgaaagaagaagaatgattagcagaaacaaaaaataatttgctgaaaatactttaactattaaataaaataaatataattaaagtaaatggtctttatttggctatttacttttaattatatctaggagaaagtagaaaaagtttatgaataaatataaatcttttagaaagctaatactgttaattatattatttttatttgtaataactctgacgtttgtaatatcttatagtagtaccataagaaaaccattaaagtcgactgaagactcaattataattgaagtcaaacaaggcgaaggtttttatgatatattggataagttagacaaagaaaataaattgaccaataaacttcttattaaagtaaatctggctatagataagagaaaagtaaatttaacagaaggtatatatgaaataaatacaaattcatccttagaagaactgataaaatctttagaaaataaggatggggataaggatttggttaaattaactataccagaaggttattctatagaagatattgctaaaagcgtagaagataaaggtatttgttctaaagacgaatttattaaagacgttaaagattataaattgcctagtttcgtgaaaaataataataagaagagatataatttggaaggatatttgtatcctgatacatatttaatagaaaaagggtcaaatgcaaatgatgtaattaaatctatgttagatagatttgaagatgtgctgaagcaggcagaagatgagactaaagttgaaataagtgatggagatgttgaaaaaatagttactatagcttccatgatagaaagagaagcaagagtgcctggtgataggccattaatatcatcagttatttacaacagattagagaaagatatgaaacttcaaatagatgcagcagtaatttatgcattgggatatcacgttgatgtggtattaaacaagcatctagaagtagattctccatataatgtgtataagtataaaggcctgccagttggtcctatagcaaatccaggtttagactgcattaaggcagcattgcttcctgaaaagacagattatttatattatattatgaaagatgatggatcacattattttactaataactatgaagattttttaaataagaaaaaagagttgggatactaactgtaatgcacacaatgtacaatgcacaatcgatagttgtgaattgataatttaagttgttttttgtttatctataatacagatttatggaggaaattcatgagcgaaatcacatatgactatatggaagaatatattagaagtttaattcctgagagagaagggacattaaaggaaatagaagcttttgcaagagcaaatggggtgcctattgttcaaaaagaaacaggtgtatttcttgaattcatgactagtatgaagaaaccaaaaagaatattagaacttggaacagcaatagggttttcatcaatactaatgtatcaagctgcggggacagaaccagaaattgttacaatagaacgtgatgaaaaaatgattgaacttgcaaacattaatttaaagaaatttaatttagaccataagatcaaaattgaagagggcgattgtttagagattttagaaaaattaaatgagccttttgatttgatttttatggatgcaggcaaaggacattacaaccactttttgccacactgtttgagactacttaatccagatggagtaatagttgctgataatgttttatttagaggtatggtggcatcacaagaattagttaaaagaagaaaaattacaatagtaaagagaatgaggacttatttggaattagttactcaagatgaaaacttaattacatctgttataccaatgggagatggaattgcagttacaaagaggaggtaaattaaaatgataagaccagaaattttagcaccagcaggaaatttagataaacttaaaatagcaatagattttggtgcagacgctgtatatcttggcggaagcaaattaaatctaagagcatttgcagataattttactaatgaacaattaaaggaaggcgtggaatacgctcatgatagaaatcgaaaagtttatgtaactatgaacgtttttcctcataatgcagatttaggcggagtagaagattatataaaggaattatatgaaacaggtgttgatgcaataatagcatcagatccagcaataatttcagcagctagagaagttgcaccaaatttagagattcacttaagcactcaagctaataatgttaactggagagcagctaagttttggtatgaacaaggtgttaagagaatagtaatggctagagagcttagcttaactgagataaaagaaatgagagataacttgccagaggaatgtgagatcgaagcatttgtgcatggttcaatgtgtataagttactcaggaagatgtttaatttctaattatatggttgggagagacgctaatagaggggcttgtgcgcaagcatgtagatttaaatatcatttggtagaagaaaagagaccaaatgaattttatccagtagttgaagatgagaatggaacatacataatgaattcaaaagacttatgtatgattgaacatatagacgatgttataaaggctggagtatactctctaaaaatcgaaggacgaatgaagagtttatattacgttgcagcagtagttaaatcatataggcaggcagtggatgcatatatgaaagatcctgataattataaattcgatccaaagtggatggaaaatttaaataaagtaagtcacagagtatatcatacaggtttttactatggccagagtggagagcaagtatacgaagattcagcgtatataaggcatgcagatataataggaatagtaagagcatacgatgaagaaacaaaaatagcaactattgaacaaaaaaataaagtattaaatggtgatacagtagaagttttaagaccagaaggagataatttcgaagttgttcttcatgatatgacagaagaaaacggaactccaatagagtcggcaaatagagcgaaaatgatatacaaagtaagagtagatattcctctaaaagaaaaagatttaatagttaaagacaaagaatagtttatttaatgggagcttgctcaactttgacttgtacgaatgaataattcggagcaagctaaagttgttgtaagcttttatttttagcgctttcagcgatattttcatagcttttcggaacaaaatatttatgatttcggtaagttaccacataaatttagctttagagctggatatctataaatatataagtctagatattttgaataaaacatctcctttaaggctagaatctaagctagagagggaggtgtttttcatttttactggaaaatttgatagaaataagagattgattcagattctagctatgcttatgactgtaattattatgttaacagcgcgtttaacaatattgcaaatatatccatctgaaagagttgtgagttcttatcaaaatcaccaagaagaaaatattagcaatatgaattatatgattttagacactaatgggaaagatttaatgaagtataacaaaaaatacgtacttgtcattgatacaagaccattcagtttaaataactatgaagaaacacttgaggatttaatggcgtttaatttcataatgaaatctgaaaatcctgattttagttattcagatataatgaaacaaagtgggaaattatattttaacatatcagaggatacatataacaaaattaataatctaaaaaatattaaaggaatatatacttatatttctgatgaagtagatactaaaaaagcgtggagtgtcagcagtatgttatcaaaaatattagatgaggaacatgaagcaggaactcttgaaggtgatatgtatgattatctaaaagataatgaaaaacctaaaagtgaattttatttagataataaagctgtttatgcgaaacaatcagtaagtataagtgatgataataaaaatttaaaattaactcttgatagtgatattgaaaataaaataagagatattttggataaagaggaatattcatatttaagcaatgtaggggttactataatggaaagtgatacaggtaaaattagggcaatggttcaaaaggatgaaagcgctgctaatgtgaatttaggtatacagcagattggatatgaacctggatctatttacaaagtaataacactcggagcagctttagatatggggcttataaatataaatgatacttttgttggagcaggtaagatagatagaaaagtatatggtaaattatcagttgagcaggcttttgaaaagtcttctaatgatgtgtttgctgatataggagcaaaagttggctatgataaattaatggattactcacagaaattaggattatacgatagagtactaaatttaaatagtggaatcgtaaaagaggcacaaggggtgaaaccagaagaggagtccggaataaacaatatatctataggacaatgcatgaatgtaactccaattcaaatgctgggagctataaattctataactaataatggggtttatgaaaaaccatacttagtcgaaggtattttggataaagatgataatttaataaaagagtttaaaactgataaaaagagagtatttagtgaaacaacagcaaaaatagttaagaatgaaatgaggcaggttgttttgaaaggaacaggaataaaagcatatgaatcagaccttgatataggtggtaaaactggttcggcgacaggtagtgaaggtaaaacccatggatggtttgctggatattttagtgcaggaggaaaaaactatactatggtagtatttactccagacatacagatggataaggatgctaataatgaagatcttggtggtggcgatactgcagcaccaatatttaaagatatagttaaaactttaaatgcgaagtagtgaaatttaatcactgctatattatatacagtgagataataaatttacatttagaattctagtgaactaagtggtaaattaagcttgtgatatagaaatttaattgcaatataagtgttctgaaaaaattaattaataagaacatatattggaatatcggtcgctacaaaccaaataactttattaagagtgaattatatcatttagaacctatatagtaaaatataaatataaaaaataaaaatgtataagcaacttttttggtactccaacatattataatatcaagcactgctatggaggaaaaaggtgtttatattaaatagctttatagacctaatattaaattcactattcttaactggatatgtgacaaacaataatacatttccactacctttagatgaaacagaagaacaaatgtatttgaaaaaatttaaagaaggagataaaaatgccaaaagtattttaattgaaagaaacttaagattagtagctcatatagtaaaaaaatattcgtttcctaataaggatgtagatgaattaatttcaattggtactgttggattaataaaagcgatcgattctttcgatgcaggtaagggtactagacttgcaacttatgcttctagatgtatagaaaatgagattctaatgctgtttagaaatagtaaaaagcaaaaaagtgaagtttatctccaagatccaatcggagtagataaagaaggaaatgaattttgtcttatggatatactaagcagtgaaaaagatagcgtcttagaaaaagtcgaaagcaatttacaagttagagctctatataaaaagttgattgagtcattaaccaaaagagaaagtgctattataataatgagatatggattaattgatggaaaatgcaaaacacaaagagaaatagcagtaaatttaggaatatcacgatcatatgtatcgagaatagaaaaaaaagctttaaaaaaattaaaaaaagagttatttactaaaaattaatttagtgtatagagaattataaatctttatcactataaagcgatgcgctgctatttagtatataatatgtacttaataatatccattttcattcatattagtgtaatgttaagagaagttggaaggataaatattctatatttatataaagaatattgacatactttaaacaagggtgctatttttaatatagcaccttattttttataagatatactttttgaaattatggatagaggagaaaacttatggctaaaatagacaacttattagatagaattgatctaactagcgcatcagatattcacttaacttcagaattgccaccaatggtaagaatagacggtaatttggtcattgcagatgaaaatgctgtaccacacgaagttgttggggaatatattagagatttaatgccaagtaaatatgaagaattcttagagaatggagaaatagattttaagtataataagcctggcttaggcaattttagagttaatgcatttaaatgcaaaggtaattatgctatatgtatgagagttataaaggaagctatacccaaacttagagatatatcagatgcatctgtgttaaaggattttactgaattacaggatggtttagttcttgttactggaccaacgggatctggaaaaagtacaacacttgctgctatggtaaatgaaataaatatgactaaagaaaagcatattatcacattagaagaaccaatagaatatatttatgaaacaaaaaagtcgatggtgaatcaaagggaagttgggcaagatacaaaaagctatgcaatgggtcttagagctgccttaagacaagatccagatgtcatattacttggagaaatgagagatcctgagacaattgaaatagctttaagagcagcacaaacaggacatttggttttttcaactttgcacaatatgggagcagcaaatagtatatatagaattataaattcttttgaatcaggccatcaaaatgaagtgaaaattcaactatcatcattgcttaggggagttgtttcacaagtattattgccaaatgcttcaggaaagggtagaactgctgcaatggaaattatggtatgtacctctagtataaaaaatcttataagagaaggaaattttgagcagattaacagctttattcaaatgggctctaaatttggaatgcagactattgagatggatttgaaaagattagtaagtaataatactatatcgagggaagaatatgaaaaatggatacgaaataataaataaaaaataataattgcataaataaaaaaaggaatttgagtaaatgtgttgaatatattgcaattagtagatttttttctgcagagaagggaaagatttaatcatgcaacaagagataattacgtccttagattttggtactcaaaaattatctgctactgtagcgattagagagaaagacgaacttaaaattttaggagttcaatcatgcaaatcagcaggtatagagaaaggtttgttattagatattgataaatgcagggatgttgcagtaagcttattaaaggatttagaaaaaaagacgacagtaaaaagtgaaagaatatccattggaatttcttctaataaagtaagagttactgaagtatcaactgtagttaatattcaagaaaaagttacaagtgcggatataagaaaagcgctgaaaaatgcacaaagagattttattttaagtgacgatgaaagtatagtagatgtgcttatcaatttttatatattagataacaaagtaatacgtaaagatatattaaattggaaaggaagtaaacttgaaataaatcttacattagtaatagcagctaaaagtgaaatagaaaaatattatgaactttttagaaaaacagggtataatattgggtctataaaattgaatatattagtaggaaagcaagtgtttttgaatgaaaaaaattctatggaaagtatagtgattgcagacattggagctgggactactgatatagcattatttacggatggaattcctaaaagcataaattctattccaataggtggaagaaatataactaaggatttagcaatttgtgggaagttttcgtttttaaaagcagataatatgaaaaagatttactctagcaattataaagctttatatctagataattcgcttgaagaggaaattgaggtaggaactaccaaagtttccaggaaattattctatgaagtggtaaatgctagaattgaagaaatattaagccatatcaatataaaattaaaaaatactggtcattatgatagaatttgtagtataattctatatggagatggagttaattattttgaagatatagatgaaatcgttcgtaaaattttcaaaataaaaactaaagttataagaaaaaatgatctgggaataaaaaattcagaaaatataacttctatggctattgctaaagaagtatatgatagattaaatttattagaggatgataatataattctaactaataaacataatgataataaagtaattaatgaaaaagaacatttacacaataatgaaggtgaaaatcatattctaaaaaaagttaaagttttttttgataagattttttaaggggaggaattgttttgttagattttgagacagatatgcaagagttaaccaatataaaagttattggttgcggcggcggcggaagtaatgccgtaaatagaatgatagttgaaggactaaaaaatgttgaatttattgcaataaatacagataagcaagcacttatgctttctaatgcagatcaaaaaattcaaataggtgaaaagctaactaaaggactaggagctggagctaatccggaaataggaaagaaagcagcagaagaaagcagagaagaaataacagcttctataaagggagcaaatatggtgtttattactgctggtatgggcggcggaacaggaacaggtgctgcaccaatagtagcggaaattgctaaatctatggagattttaactgtaggagtagtaactaaacctttcccttttgaaggtaaaagaagaatgagacatgctgaaatggggatagcaacattaaaagaaaaagttgacacattagttataatccctaatgaaagactacttaatatggctgataagaaaacaacgctgttggattcgtttaagttagctgatgaagttttaagacaaggtgttcaagctatttcagacttaattacaataacaggtgtaattaatgctgactttgcagatataaaagcagtaatgcttaataaaggactagctcatatgggagttggtttcggtaaaggtgatactaggacacaagatgctgttaaacaagcaatttcatctccacttttagaaacatcaatagatggagctacagatgttattataaacttcactggaggagcagaccttggagcattagaagtatatgatgctgcggatgttgttcgtgaggctgtagatccagatgctaatataatcgtgggagctgttatagatgaaactcttaatgaagaaattagaattactgttatagcaactggatttgaaagtgaaaataacagattatcattaggttctatagtagaagaatctaaaaaagttcaacctcaagttaaggaagtcgcaaaagaacaacaagaagttgcggtagatgcaaaagaaccagaaatgacctctaacaattatgaacaagatgatttagacatacctgttttcttaagaagacaaaagagacattaataacggaatttataatattaagaaataaagttaaatagaatgaaaatttgttttagaagctgaaaaacctattaaatagttttttagtctttgatatacaagttttcattctatttttttttattttttagtatgttgtatttttctcagaaacttgtctgttacatcgtgccacttgctattaatggagatattatctttaaattatgaataacataatttgtaaaatatattattcgtttcagagagttatatgcataagttcgcgtcttagttggattatctatagggttctacaatgatattcaaacttataaaatttcaatatcgctggtattcaggaaatttgaacagtagatatgtattggtatcaatatggaaccctattagatagacaatttaagaattaggcttattagatgaacatatttacaaagttgcgaaaactttgagttcatatcttcactagaaatcataaatatatttgtgaagaaaacatttgaaaatgagctgttaaaggttcttagctgtaggttgttccaatttagcttgtcaaactgaaagttggagcatgctaaattggatacaacctgctgcttagaacattcagcgatattttcatagcttttcggaatcaaaatatttatgatttcggtaagttatcatataaatttagttttaaagttgggtatttctaaatttaaattacataattaaatttagaatagaatgacttaaaatttattccacttatttttagcaaatttatataagataaaagaatttatttttacatattaagttagttttaaatataaaaaagagtacaaaaaaatatagtgtaaataaatgtaaaaagttcaattaaaaaaacaaaaagatttaatgtgattgtgacaaatttttatgagaaagaagtatataataaaatccagacagactggaggcgttgagatggaaatttatgttgataccttggttttggaaaattgcatagtaaatttctttttgttaacagtaactatgaaatgcataaagcataaatgtaaggtaattgcgctcttaagctccagtttattgggtggaatttatacattggttttagttattccacagttaaacatattatcttgtttacctattgaattaattgttgcgttcatgatgctcagaatagtgtatggaaaaacaaatattcttaatatgatcaagattcttattatatttctaatgatgacatttactttaagtggagtatgttttctattttcattaaagcaaaatttatatttattaggaactacattcaaaatagagaagtattcaattaaatatattatgctaggagtaatgattatgtatataatttttagcagacttgtggaatacattagagacaagctgtttgtaaggaattttgtttttgagattgaattcaatatagaaggcaagcaatatagtattaaaagctttttagatactggaaatgagcttagagagccaattacaaatcttccatgtattttaattgaagaaaatctaataagtgatgtggattttaatagtatcaatacatatcatgtgctttacagttcaataggatatggaggaagtcttaaaggtataaaagttaacaacataaaaataagcaataattatcatctatatgaagaagtcgatgcaataatatgtccatgtaaagaaaaattaagtaaagaatgcgaatttaatgccttattatcaaggggaatagtctataagggggatatttatggaaaagttagttctgttttttaataaattattatgtaagttcaagttgtttagaaaaaaattatattatgtaggaggaaatgatgctctaccaccaccattatcaaaagatgaagaagaagatttggtaaataaattaaatggtggagatgaaaatataagaagtactttaattgaaagaaatttaagattggttgtttatatagcaagaaaatttgaaaacacaggtgtatatgtagaagatttaatatcagttggtaccattggattaataaaagcagtaaatacttttaatccagagaaaaagataaagcttgcaacttatgcgtctagatgtatagaaaatgaaatacttatgtatttaaggagaaatagcaagataaaagctgaaatatcattttatgaacctcttaatattgactgggatggaaatgaacttctgttatcagatatattaggaactgaaaacgatactgtttataatttgatagaagatgaagtagataagcagttattagttatggcattaaagagcttaaatgatagagaaaaagaaatagtaagacttagatttggtttaaatggaacaagagaaaaaactcaaaaagaggtcgcggatatgcttggaatctcacaatcttacatttctagattagagaaaaaaataattaaaagattgaaaaaagaaataagtagaatgatttagcttgtcttcaagtataaaagtattgcctatcggagataatgtttaatgcaatggattattactttcgaaggggtgaatacttgtgataattaacaaagtagaaatatgtggcgttaatacttcaaaactccctatacttaaagaaaaagaaaagaagcagctttttttacaaatgcaagctggagataagaacgcaagagaaacttttataaagggaaatttgagattagtacttagtgttattcaacggtttaataatagaggagaaaatatcgatgacttattccaagtaggctgcataggcttaatgaaatcaatagataattttgatttgtctcaaaatgttaaattttcaacttatgcagttcctatgataattggggaaattagaagatacctaagagataataattctattagggtaagtagatctttaagggatatagcttataaagctcttattatgagagaaaaatttataaaagacaataataaagagcctactatatcgcagattgcaaaagaacttgaattgccaagagaagaagttgtatttgcgttagatgcaatacaagatcccgtatcgctatttgaaccgatttatcatgatggaggagatgccatttatgtaatggatcaaataagtgatgcaaaaaatacagatgaacattggcttgaaaatatttcaataaaagaagcaatgaaaaaacttactgatagagagaagcttatattgaatttaagatttttcaatggaagaactcaaatggaagtagcagatgaaattggaatttcacaagcacaagtttcaagattagaaaaaacagcactaaagcatatgagaaaacacgtataagaatgagagtttaataatattataatggtgggggataattatggaacttgaattacattcactcaatgctatgagaagtatggaagttatagatatattaacaggaactaaaatcgggtttataaaagattttaagatagactgcgatgaaaataaaatagttgcgttaatattaccaggagaaataaaatcatggtttgcaaaagaagatgaaaaagagattttgtggagcgatatagtaaaaataggaacagatgttatattggtgaaggcaaaagataaagaaaaagtaaatgcaaacaatgtatagccatatttcaaaaatatagttataataagtataggttttgatatacgaaagcaaagaggtgaatgaaagtatgaaatgtccattttgcggatttgaagaaagtaaggttgttgattcaaggtcaacggatgacaatacaacaattagaagaagacgagaatgtttaaaatgtaataagcgttatactacatatgaaaaaatagaggattttccaatcctagtaattaaaaaagatttaactagagaaaatttcaacaaagaaaaaataattaacggattaattattgcatgtcaaaaaagacccatatctagaaagcaaatcgaagaaatagcatatgatatagaaaaaacaatatctaatagtatgctcactgaaatcccatcaaatgaaataggggaaatggttatggctagattgaaagagttagatgaaatatcatatgtaagattcgcgtcagtttatagacaatttaaggatatagatactttcctagaagaaataaaaaatcttagaacataatcacataattaaggatgttgaaaagttttcaatgtcctttttataatgaaaaatgttatatataagttaaacttcagttaataaagatgccaagcagctaataaaatgttaatattaagtaaagaattaaaatgaattaaatggaacaaggattttattcttataaaaagtatctagctgtatataagaagatttcatggtggctttgtgacttttattttcatatacattattaaaaaagtattaatttattggaggattagagtgaatacattagagttgaaagacttagaaattaaagatgattttacaataataaatggtaaaaaatttgaaattatattcacaaatgcagaaaaaggaagaagttttaatagaaatacagaagagggagttagagaattaaattcattaaaaaaagaatttaatgcagataatataatatatataaagcaaattcatagtggtagaatattaaaatatgaaggtaatgggaaagatattatagatgaagagggagatgcaataataacaaatgaaaaaaatgttattattggggtttttactgctgattgtgtaccggttatattggtagatgaggaaaaagaggttacagctgcgatacacagtggatggagaggtaccttcgagtctattacattgaagacaatagataaaatgaaaaatgaatttggatctgatgtaagaaatattaaggcttatataggaccacatattagaaaatgttgttatgaagtttcagaagatttaaagcagaagtttattgaaaagaaagatacaataaatgaaaaagagctatttaatggaaataatcttaatcttgaagcgtgcataatagacgatctaaggaaatctggaataaatgagtgcaatataaatagtttagatttgtgtacttattgtagtagtgatattaaattgcattcatatagaaaatctcagggttcctatggtagaatgttttcttttattatttcacgttaagggggaagatgaaatatggctaatgaaaaaattttgattgtagatgatgaagaacatatagttgaattattacattttaatttagttaatgctgggtatgaggttttaagtgctaataatggtattgatgcagtgaaaatagctaaggctgagaagccgagcttgttattgcttgatttaatgctgccaggtatggatggatttgatgtttgtaaagaaataaagagagattctgaaatgaaaaaaacatcaataataatgttaacagctaaaggcgaagaacttgataagatacttgggctagaacttggagctgacgattatataacaaaaccattttcggtcagggaattacttgcaagagtaaaggcagttttaagaagaacaagctcatttaatgaggcagaagatgatgtttataattcagaaaatcttaaagtagactttgaacgtcatgaggtatatgtgaatgatagaaaggttgatttaactttaaaagaatttgaacttttacaaatactaataaagaataaaggaagaatactcaaaagggaaactctattagataagatttggggttatgagtatataggagaaacaagaactgtagatgttcatataagatatcttagaaagaagatagaagaagacgataaaaatccgagatttattgaaactataagaggagtaggttatagatttaacccagctgagtaaaaatgaaaaacaaaatattaacttcagttattataactgtgctatttgcactattaattgtagcatcttcttttatcacaataataaatttagaacaaattaaaaatacaaaagaacaacttagaaacataaatttgctagtttctgaacttaatgatgttactgatattagtagaaatgattatgaagagttaaaagcattaaataatacgaaaataaatggtatagacgtaagatttacccttataaatgataatggagttgtcttatatgataatgagcagaagagtagtgaaaatcatagggatagagaagaagttaagaaagcaatggaaactggtgaagggtattcaaagagatacagcgagacaattaagtcagatttaatatattatgctactaggcttaacaataactttgtaattagaagttctgtaagcataaattctgttactataatacttaaagaaaatattaaatattgttttggaatattacttgtggttatgccattttctttatttctatcattaagactagttaaaaaaattattgatccagttaaagagttagaaagtgtaactttgaaaatgactcatggggactataaaataagagccaatatcaatacaaatgatgagcttgggactttgggaaatagcttcaataatatggcggaacagctacaaataaagattcgtgaagttatagataatcaaaataaaatagaatcaatattaaaaagtatggaaagcggagttatagctgttgataattgcaatatggtaatttcaattaatccgtgtgcagaatcgttacttggcattaaaaaaaatattgtaggcgaatgtttattagaccatataaaggactatgatataatcagattcttagaacaagatgatgtaaatgataaagaaataaaaatacgtcatccaatggaaagggatttcaaaattaagaaatcagctatggtagatggaatggaaggcgtaggaaaggttataacttttcaagacataactgatataaatagagtagaacttatgagaagccagtttgttgccaatgtatctcatgaattgaagactccgttaacatctataaagggatttgctgaaactttaaaatttgttaaggatgacgaaacaagagagaaatttttagatattatagataaagaagctgaacgattatcaagacttataaatgatatattagtgttatctaatattgaaagcaacttagcggttgatatgcatgagttcgaaccagggtcagtaattgaagaagtaattaatataatgagaaaaactgcgattaataaaaatattaaattagaatttaaagataatagtaatgagaagatctttggagatagagataaattccatcaactagctttgaatttaatagaaaatgcaataaaatactctaaggatacttccggaaaagtcgaagtgttaagttataatgaagataaatattattgcttaagagtaaaggataatggattaggaatacctaaggaagatatatcaagaatcttcgaacgattttatagagttgataaatcaagaaaaaaaggtggaacaggtcttggtttagcaattgtaaaacatattgttaaaatttttaacggagagatttatgttaaaagtgagcttggagtaggaacttgttttgaagtaaaaattccatatttataacagataatgcgcaaagtggtaaaaactttgcgcattttttaattattataaaaggtatgttaaattttcttaacaccactctaatataacttaacaattctctaataatagattaactaaatgggtatattattagatatgtaataagaaacaatttaaccaacataatttatgtcgaatttattgatggagggaatttataatgaaaaaaagaacattaaagttaatcgtaggggctttgttagtgacagttataggaagtgcaatggttgggtgtggaagctcatcaaataaatcagaaacaggtacaaagactgaatcaagtgataaagtaagtggatcaataacaatgagtggttcatctgcattgcttccactaatggaacaagcaattgaaacatataataaggaaaatccagatgcacaaattagtgctcaagcaggtggatcaggtacaggtcttactcaagtactagatggatcagtagatgtaggaaattcagatatttttgcagaagaaaaattagataaagataaagcaagtcagttggttgatcataaagttgtagcagaaggttttggtgttgcggtaagcaaatcacttggaatagataatttaacatcagctcaaattaaagatatattctctggaaaggtaactaactggaaagaagttggaggacctgataagccaatattattagttcatagaacagcaggttctggaacaagagcaacattcgaaaaggtaattcttggtggagataaatcagcagaaaacgaatcattaggagtaactcaagattcaaatggagcagttttaagtgcaatgaaacaaaatgatggtgcaattagttatttaggtcttgcatatatgaacacacaagaagctaaggatgctataaaaatagtaaaacttgacggagttgcagctgaaaaagcaaatatatctgatggatcatataagttctggtcatggggacatatgtatactaaaggcgaagcaacaggagtagctaagagttttatagattatgttacaaataaagttgataaatcagttttagataatttaggatttgtttcaggaagtgaaatgaaagtaaaataatttcaattaagggatgagtaaagatggaaaaaagaagttttaaagaaaggcttaaaaatgagtatttgggccaaggctttgcaaggctatgtgcaatattaataatagtgataacaatatcaatcatagtatttatagcttcaaaagggataagaatattcacaaaagatggatatagtgtcacagaatttttattcacaaataattggaagccaaacaaaggtggagagccttcctttggagctctcgctttcatcttagggtcaaccttagtatcaataggtgcagtagttataagtgcacctattgctattgctttggcgatatttgtgaatgtcatatcaagcaaatttgggagaaagataattaaaccttcattagaagtattagttggaataccttctgttgtttatggttgggtcggtatctctgtgttagtaccatttataaaaggaagttttggaggaatgggattttctttaatcgcagggattttagttttatcattaatgattttaccaactatagcaacgttatctatagatgctataaaaacaatacctcaagatcacattgaggcatcatatggccttggagctacaagatggcagacgatttataggataatagttccaggcgccaaatcagggatattaacaggtgtagtacttggtattgcaagggcttttggagaagcgttagcagttcaaatggtaattggtaacactgtaaagatacctgatagtatcacttcctcaatggcaacattaacaagtataataacaatggatatggctaatactgtcggcggaacgccatggaatgatgcattatggacattagcattaattttacttgtgatttcttttatatttatagttatagtaagagtaattgagaaaaggagtgcggtataatgaatgcaaaaaaagtagataaaattgcgacagttatattttatataataagtatgttcatagtggttttacttggtgcatttattttatatattttatataaaggtggaagtatgttaaaaccgtcattcctttttggtaatccaaagcttacaggagcaggaggaggaatagcaccgcaattatttaattcattttatatgcttgttatttctttggttataacaattcctattggtgttggagcgggaatttatttggcagagtatgctaaagaaggacctattcttaaatttataagaatgtcccttgaaacaatgtcttcacttccatctattgttattggtatgtttggattattggtttttgtaaatatggcgggatggggatattcaatacttgcaggtgctttatctgtaagtatattaaatataccttcaatgactagaatttcagaaaatgcaataaatacagcaagtaaaagggttaaagaagcatctttggggcttggagcaactagatggcaaacattagcgaagcttacggttccgacagctatgggagagatattaacgggtataatactagcagcaggaagaatttttggtgaggcagcagcatttttatatactgcaggattaagttctaaaaatttaaatttcaataccataagtatggctgggaacaggtcagcattttcactttttaggccagcagaaactttagctgtccatatatggaagctaaattcagaaggcgcagtggttgatgctgctcaaatagctaacggaacagcggctgtgcttataatagcggttctcttattcaatgtttgtgcaaggttaattggaaatagattgatgaaagcttatagtgggaagtaggagatagttatgaatattatagaaacaaaagatttatgcttatattatggtgataatcaggcccttaaagatataaatatgtccataaataaaaatgaagttacagcacttattggaccttcaggctgcggaaaatcaactttcctaagaactttaaatagaatgaatgatttaattgagattgtaaaaataactggggaagtgttttttgaaggtaaggatatatataaggactatgatgatatatatttaagagaaagaatcggaatggtattccaaagaccaaatccatttccaatgtcgatttatgataacattgcatatggacctagaatacacggcacaaaaaataagaagatcttagatgaaatagtagaaaaaagcttaagaggagcagcgctttgggacgagactaaagataggctaaaatcaagtgcgcttggaatgtcaggtggacaacaacaaagattatgtattgctagaacattggcggtttctccagaagtgattttaatggatgaaccaacatctgcattagatccaatatcaactggaaaaatggaagaacttatggatgaattaaagaagaaatatacagttatcattgtaactcataatatgcagcaagcagggagaatagctgataaaactgcattctttttaaatggagaagttatagagttcggaaaaacagaagacatattttataatccaagagataagagaacagaagattatattacaggtagatttggctaaaagggggcaatgataattatgacaaggggatcgcaggatacaagagtaaaaaatataaatagagagctgctaaaaatgtctagtctagttgaaaagcaaatatatgagagtttgctaagtttaaaaaaatatgatctagaaaaggctgagcaagttattaagaatgatgatattgttgatgatatgcaaaaaatgatagaagaggaatgtatcaaatttatagcaactgaacagccgctcgcaacagatttgaggagagtatttacagcatctaaaatagtgacggatttagaaagaatggcagactatgcagtagatatatgtaagataacaaagaggattgggaaaaagataagctcatttgaaaaaggttcagaagaattatgggagatggacgataaagttagagctatgataagagcttctgtagattcatatattaacgaagatgaggaaatggcatataaggtttgcgaaaaggatgatgaaatagatgcattctataaatctttattctccactttgattaactcaataaaagtagatgaaaagctgcttcaggaaggaactcaattactgtttgcaataaaatacctagagagaataggagatcatgtaaccaatatatgtgaatggactattttttcaaaaacaggttcctatgttgatttaaatgaataaggtataagtattataaagtgtccttaatttattgaggacatttttatcatttggctatgaatttcttgacttaggtattatattaatgtaatatgaaaaaaataaattgaaagcataaatgaaatatatcatataataaaatgattcatagtagttaatcggaaatttaataagaatctagttaatgattattttttatatgtaactaaggtgtaattaggtgtaaacgataaatttaagtatgaaggggcaatggaagaatgacaagaggatcacaagatactaaagtaaaaaatataaatagacaactagtaattatggcagacttagtagaaaagcaaatatatgaaagtatgctgtgtttaaagaattgtgacgtagaagcagtagaaaaaattattaaggctgatgataaagttgatgaattgcaaaaaataattgaagaacagtgtattaaatttattgcatcagagcaacctctggcaacagatttgagaagagtattcactgtttctaaaatagtgacagatttagaaagaatagcagattatgcagtggatatttgcaaaataactaaaagaattggtaaaaatgttaattctcttaaaaaggtttcagaggatttatgggatatggaaagaaaagcaagatatatgataaaggcatctatagattctcacgttaatgatgatgatgaaatggcatatagaatttgcaaaaaagatgatgagatagatactatatatagatccttgtttgcttcttttgttaaagcaataaaaaaagatgaaagcttacttcaagaaggaactcaattgctatttgtaataaagtatttggaaagaataggagatcacgtaactaatatatgtgaatggactatcttttcaaaaacaggagcttatgttgatctaaatgaatagtagtatataaatgtaggaaaatgttctttttattaagaacattttttattctctaggaaattatcatatgtgttgattaaccaaaaaatagaagtgaaaatatataaaaaatgaggtcattctgtagtaatattaaagtgcgaaccaaaataatacttaaggagaatgccctcatgaaaaatactaccact

SEQ ID NO: 25 - DNA, 71677 bp, Clostridium beijerinckii
aacctaaagtccgtagcgaagctgtacgtatatttagaaaaataattaaaaattaagaaaagaaatagctaatagcatgaaaaactaactttcttatgttattaactatatctatgaataattcaggataaaatgttctattattctccttttctcgataggtcccctttcctctacattagggatatatatattaataggtattcttcttaaaaaagttggcaaaaattcagatagattttctgttgttgcaaaaactaatcgtacatctgcttttctctttacgccattctcaccaattcttgaaaatactcctgtatccataaatgtgaacaatttttcttgtccttcgctattaagtctatgtacttcatctagaaataagattccgccatctgattgttcaattaaccctgcttttgattctgtagcccccgtatatgcccctttagcatgcccaaataatataccagataataattcaggattattataatactgagcacaattcaaaacattatatggtccatctttttctaaaacattacagcttacactgtacttgtagattatctctgctaaaaagcttttaccaactccactttcacctgtaagcataacagttaatccccctttgggatataaaactgccgttttgatttgctcaatgacttccttcagactgttatcatagccaattatattttcaaaaataatctcctgttttaatgacttacattcctgttctagctcgtatatatctttatatatactcttctttgttggcccaataatatcattaattttttttctaggaagaaatttaactggacgattatttatcttaattaaatcgttagatttcaccaattcatttagtaatctacttgcttgagttctgctcatcttaaaagtgctagctatatattcagtctcaattcctccatacttttctaattccttaaagctctcaaatacagcttcagagctaataaattctaaaactttagtaatcataaattccctcccgtacatataaaaatttattttaaactagtatactaagaaacatttccctctaaaatttttatctcatctcagcaaattatttatataattttatcacattgttagtaaaactcaatcatatttaacatattttattttttgcgcacctttatttttcctttatcaaaactcaccctttatttttatatatttaatatatttaatatattacaaatatcatactaagttttataaataaaacaactatctgtactataactaattcaaaaaatgacaatgcacattaactatttgtctaaaaaaatatttaatgatatgataactttaaaattacttacctagtttccttaaaataaataactctaaaattgtttataattctttatgatttaaaatgaaggagaaatgcctaatgatagacttacacattcatacaaataattctgatggagattttgatgtaatagacatcttaaaaatgtcggaagaaaagaatttagaatttatttcatttacagaccatcaatctgttgatgcatataaaaaaattagcaacttaaatataaaggatttatacggtggtaacataattaatggaattgaaatcgctttttcatttggcggaatcagcatggatatgctaggatataatattgatattgattctatagaaaaatcaagaatattacaagttaataaaaatattaatgttattgaaaaagaaaattctaaattaaattatttaataaatgtttgtaatgaactaaaaattctacattcctctaatttaaatataaatggcagaaatactcctgctaacgatgttatttgcgatgatattttaagctatgatgaaaatttgcatattctaaaaaaattagaaattactgatagaactactttttatagaaaacactatttaaaccctaatagtcaattttatataaagccaacagaagatcttccaaatatctatgaagctgcagaaaccattcatagttcaggcggtaaatgttttttagctcatccttatgtatatgacgtagataacatatataattatatcgacagtattgtcaaattaaacttaatagatggtattgaatgcatacatcgtaagcattctcactcacaaataaatgaaataattaattattgtgacagccatgacctgttaaaaagcggaggcagtgattttcatacttcagctcatacattaggatttggaaatgaaggtaaaataccaattaattatcccatagctaaaaactggctacaataattcattcatatttatttagctttaataatatattgtgaactcccttttattatataccttgagtttcgcttaataagaatgcagataaagtgaacccttttaagtaaatcctcttctagcattttcagctttctctacttaattgggttcacttcataataatagttcttataattttcatataaatatatttttttattttataattatctcttttcctttataggctttccatatccatatgcaccttcaatcatgcaaatatctgccgaataattacttgccttttcaaatgcactaagtatttcattttcagttaatttattattatctttccacccaaatcttaacaaagtgacaataaatgccgcgatgaacgaatctcctgctcccattgtatccactggattaactaactttacctttccattatagtatttatcgccatcaaaaaatacttgtccattttttcccatagttactaagacatacttacatccaaaatcatgaatcttcttttgaaatatttttatctcatttatattcatattctcacatgaaaataaagctaaatctatatatggacatgtcttctgcaaatagtcatctgttctatacttatctttggtagaaaaatcaaaagttattattgaatctatcgcttttaacttatatacttgatcttctaactttgcattacaactactatgtatgagatcaaattcagctaaatactctaactcatccttttcaattcttataggcttaggccaatttgctcctatatcaacatttaatagatctctctccccatcgattatatttatatcacacctttttgtggttccattttccaactttctacattttgatatatcaacccctaaatcttctaaggaatattttattaactctgcttcctcatcatccccaaatactcctagatacgcagaatcaacttcacattttttcgcatttactgcaaaatttattgcatttcctcctggatacatcatgttcttattcatatatctatctattacgttgtctcccagtccaataactttcataatattatttcctcactttcaaaaagaggttatcctaaaagttaattttaggataaccattattattatttttaatattcaacctttctgtagtaacgtcttatttctaatgagtgattacgtattacttctaggtgcgcacttatccttcctagtattgcccacattactactggagataataatttcctatattcttcacttattcctggtagttcataatcctttgtatcaaatactgtaaatttatcagtataatcaactaagaacttttctactctgtcatctaatggtctagtttctgcctctgtttttaataaagttgcacacacatctttttcaattagttctatagttccatgaaaaaattctggtgaacttacagatttagttctcaaccattgggattcttctaatacacacattgagtatgaataagtagttccccaaaggtttccagacccaatccaaatttgatatggatcatttttatatttttctgcatattctcttgctttttcatcgcttgcttttctaacatggttcaatgcagctggtaagctttgtagctcttctgcaaacttattataatccgtaaattcgtgattgttatttaataacttaccaattaatatatatagaattaattcttgtggtctaccatccttgtatactactgaatatgttgatagttcttctaggatagaattctctttcccaattatagaaatagtagtaactcccttttcctttaaatactttgctgcttcaacagtctcttttgtatcccctgacttggatgctaaaaaagctattgatttatcagttatttgagaatttcctgttaataataattctgctgatatttctgagtatacaggaatcttagattttgttttaatcatatattcaaatggttgcatcattgctatagatccaccagatgatgtaaataatatattttcaaatcctttttctgttagcttgtctgctatttcttcaatagcctcccttttactatagatatattctccattttctagcatctttttttcatcaaatttaatcataatatcctcctaatttttatatattgatatctacgtaataaatatttatataattgcatctctaatattaagctgcaaatattcctaaaaatgtgcctaatatgcctaatgccattaatcctattagtatatatataacttttaatttcctctgcaataatgagtaaattatagtagtaagcccaagaggaagaatatatggcattattccatctattatcttctgtatttcaacagcactatctccagttcccatcattccagcaattttaatgttcaccattccaggtatcattgctcctattataattaatccaattattgaagccccatatgttaacttaggcattaatccagagtcttctattttttcaagaaacttcgttccaaatttatatccacttatcatacagacatatctaacaataaattgtggtatattaaataatagtaaaaacaatattggtcctaaaatatttccttgtaatgataatgatgttccaactcctgtagctattacccttaatgttccccaaaaaagcgaatctcctattcctgctaagggactcattagagatgcctttacgctgcttattgaagatgtatcaaaatcttcattatttgcgttactctcctccattgctgtagatatccctaatactaaagttgatacatatggtgttgtattgaagaattccatatgcctttttacggcctctatttgctcttcttttttcttataaagtttcttaataatcggcagcatagcatagcaataccccatattttgttggcgttcataattccatgaatattctaaagcaaggcctctcaaaaacatcttcttaagatcatttttagtaactttaacatcatttgattgttctaaattattagaaatcttcatctagcattacctcctgtttctttacattattgttttgtaatcccacaagaactatcgcaatgatagttgcaaaaattgcaacacctagcataggtatttttaaatatgcactaattgcaaatcctaatacaaagaatataaccaatttttttgtcaaaatcatttgtgctagaagtgatattcctaaagctggaataaatcctgctgcaactactagcccattttgtacaaattgtggaatgctatctagaacggcgctcataaatgggcttcctaaatataatgctagtgcaacaaaaattcctcttggtaagctctttactacaaatccccctaaaaagtgcatcctacttacaccgttgaaatttccctcttctacatatttatctgctttatgaagaaaaaatggcattacaaaaagtgtcataacattatcaactaatagaaatagcgttgctattggaaatgccaatgtcaatgcaacttctgctccttgccctgttgctatcgcaaaagctgtacctaagatccctcctgttataacatctggtggaactgctgcacctaatgtaactgctccaataaatgccatttcaagagttgctcccattataatacctgtttgtaaatcgcccataactaatcctacaagtactcctgttactattggccttgttattaagcatgatcctaaacaccattcaaacgtaacaaacattgcaatcaatcctactaaaatagcttgagtcatacaattttacctccttataatacgtttttaactaaaattttcttatcacctggaacctgtcttatctctaattcaatatctctatttattagttcttgtaatattctttcctcctcctttgatattggaactgatttagtgattgttcttgtcccttctctaggcataacacctcctatattaattgattttatatcaggcaattcattgcttaattttgctgcatcttctattgtttctactataatgaataacttatatttatctgtaactccactttttatagccgcaatggaatcctctatattcttaattactaatttaaccccattaggtttagccaactttattgttgtcttctttatctcatcttgcataagtttatcatttgcaattaatatacaatctgtgttaatttgttgagtccatgctaatgccacttgtccatgtaacaaacgatagtctactcttaatagtttaatcatataaaatcactcctttaaaattcttcgtctctaattgatttagccgtatgaaatgttttattacaatatcttatattctcttgcgtatttttaattgtttcttcgattaatttttctgtactctcttcttggcttgttattaattcaattacaagtggtaaacacatactcgaaataatgtgtaagttttcataattaatgtatttcataaactcattatttacacttcctccgaagatatccgttattactattaactcttccccatcttctaaattatttatgacctcctttacttgttggcttaaatttttttcgctgcttatgtatgcacaaagtgttgatatattatcttgttttcctattattatctttacagattcatgcattccatctgcaagtcttccgtgacttgctaataaaaatcttctcttcaaaatttatcatctccatccaaactcatgatattataaatcttatttcacttctcatagcattataaaagcaagaagcgtgccaatgtctggcacgcttctttattcttcactatctctatcacttaaaactcagtattttcagtactttgatacatcaaaatatcataaataaatcctatctctggtagattaattttgacattatatattttttcaatgacactaaatgaattttctatagtttttatcatatctttttgacactctataaagttttctaagtttggatatgcatctatttcttcgtgccttatcagtctttctactaaacaacttatgtgaactaataaagcaatttttttctcattatttaatttctttttcatagctatttctaagttatctaagcattcctctatatttcttagcaatttatctgtgtctaatatagttaatgtatctattacccttcttaatgtaaaattgtgaactatattatcattaatagttttcaagtcattttcatcagctattttttggagtatacgtcttaattgattttcccctcttccagacattaaatcttctaaggaaatataattaatatgtttaatttccggatctgcagtacctactatagttaaaacatcatacaattggaataatgcttcattcattccaaaagtttttagcctctcatagtcatgtgctatgaccttaatcttaagtttttctgggatactgtcctgcaataacttctgaagttgtaacgcagttcccatcccagtaaaacaagaagttacgattacctttttcttattttcttcagggtatagaattttataacttgtttcattatgttcttttagattttccacaagttcttcaagatagattttattttttaacatttcaccaacaaatagcgccatttgagtagacacattattaataattactactggaccatttatataactatttatgcttttatatatatcatttagcgaacccatatcaacaagtattaccaatcctttagatacatcattttcttcaataaaatttattaacttttttgctatttcatccatttttatatcaataggcatatcaaaagcttcaaacatattcatttctaacattctatttgctacatttgcaatactactagctgttgcataaccatgagccaaaattacagttttagttccgttattagattgctgaatgtttaagcttttcaaataaaaagataaaaaaatcttatcatatatcgtaaacttaatatccatcttgctctcaataagcttaattaatttaattgcaatctcatgttctagcttattgttttttaaaatatagttatacaaactatctcttaattttctttgttcctcattccattctaatgaatcttcactctttatatataaaaaatatgatattgcataaacgctattaccattaaattttatattataatttatctccatgtatctaaatatctcttgaatactcgctgttatgtattgaatcataacatttttattttcttcttttctttcaaatattaatttatcaaacaaagcatatacttcttgaaaaacattagtctcaaaatactcaatgcttacatttttcttttgaatatcattaaaaaaactcattatttgaatataagtattctttattagttgctgccaattcccatctttttttaatatcattggtacagtagtatctggtaaaattaatatatattcactttgttttatctttatatcagatttcttaattgagtcttccaacaactcttctggaaaatccaatacccctaactgtatcatttctgaatttatttttttagtataagatttagcacatacatatttaactgtgttttgcagttcacctatattccctttaaagctataattcaacattagatctatagccctatttgaaattgaaatctttttatttaatattttcgcttcttttattaaaaattgatatataaattgaagtttttcatcggtgccacgcttatctagatctggtattgagactgatataggaattcttcttaaaaaagttctcaaaaaattttctgatagtgattctgttgtagcaaaaactagtctaacgtttgctttatgccatcctgagctttcacccattcttctaaaaaccccttgatccataaatgtgaataacttctcttgtccttcctcgtttagtctatgcacttcatctaaaaagagtattcctccatcagcttccttaagcatcccttcttttacgctttctgccccagtgaaggcaccttttatatatccaaaaagatttgccgataataattcagggttattataatattgagcacaattaaatacaataaatggggaatcttttgatattacttgtttttctaccgaataattatatatatactttgctaaaagacttttaccaactccagttggcccactaagtataatcggtaatccgttattaggataaaatatagatgtttttatttgttctaacgctttttctagacttcctttaaatccaattagctctgaaaacttgtccttttcttcatctaatggtttttgaaaaaataattcttcaatgctattatatttgttgccttttattccaaaaaaacacttttcaaattgactataatgcaaaaaataaacaggtcttgtattaatttttattatcttaccttcgtcaaccatttgatttaaataatggcttacagtatttctcttaacatcaaacttctttgcaatttcgctagctgtaaacctagaattatcaccagctcttccaaagtagcatgtttgctcttccaaatatcccattatatagtctaacaacatatttatcacccttatatattatttttgagaaatgaaacaagagtatataaataaaaaacttttttatattatactatatttttctacattagaactatatcttaactttatatttaaatatttttacatgacctgtactttccttttttataacttacaagaaatatatagtctcaagaataattaagtactcttttacagatatttctatattaaatgcttcttccattggttttaatatttctctaacaaaattatatttatctttattctcatctaacattttctcactatacttacgatatataattttttcgccactcaacatacgctctattacacatgcaatgtgtaatattaaccctattaatgcagaactattaagttcaactttattatttacaagacgtatgtaaaagctcctaaaacactcgatatacttatatgaatctatatttacattttctccaattacttctctcatatcatatatctcttctattagacttaatcgtgattttagtagttctacttttttcttatcaaaaatatctgatgttgatatatacaacaaagactcatcatctggttttactgcacttaccactgccaatatatccttttctgcctttattttttgtatattatgattgaattttttcttgtttactatgtctatattaagtatgtcgatgtcattgctagtgatttctagtttcttttccacaattggcttgagttttatagcagttccttgtcctgtgatgcaagctgttataattactttctttttaagtgttgaatttatactaaaattatctgcataacttcgcactatatgtggattcaaatttatgcagcaatcataaatttcctccaatgaggcttttaatgttgcttttcttgtagcttcaagaacaataggtgtagacaccatttctattgtttttaccggtacctttgtcttttcgtaaatcatatcaccaaataaaacaagagatcccatatctactaacagcaatactcctctacctttatctatttcttttactatttctgttaaattctctagtgcagtctctggtttctgatccaatggcatatcatagcctatagcatatttctcacccaaaagtctattagctacatcagccattgaacttgctgtatactctccgtgcatagcaacaataattccaacactactctcattttcataatcctctttatctatacataaaaacatagttataaatccaacttcatcttctggaattctaatatgaaatgtgctttcaactttttctttcaaatcatacgaaatttcatattccctggaatgcatctttttaatatcttcaagctgatgatttttaatttcttttccatttaaaattctttcaactgtacttgctacatgcattgatagtccatataaaattttactatcaaactgcattaacaatttttcactagccttatttaaaaattcactaactagatctacaatttttctatcaactactttatataattcttctaaactatccttatctatattcagtatatattttttaaaatacgtatctatatcaagactcattataagttttatgtccttttcacttattccattagactccaaaagttttcttttttcttctaatgctccataaaaatcaactatttttatatcttcttcttctcttacattattttcatccaaacaaaactttataacatcttgatttacaaacctatcaatttcacttcttttctctttatacttaaataatccgctaagtacatactgaggcaagtattgactatgaatgcatatattcttatctcttttcatcatattctcaagaaaagcttttgagcagcttagttttatatcgcttttgagttgcccaatattattagaacaattgtatagtaaaaatgcttttagcgcatttgctgtaatacttatgctctgcttaatgcaactcacttctatctttaaaaagtttttaataagttcgtatctttcttctatagtcctatcttttaatgctggtaaccgtataatcataggaatccttctagtaaatgttttcaataatgccgattcaacattttcagtagtagcacatattataagtagtttaactttatactcttcctcagaatctccaagtctcctatatatgcccttatcaattatagaaaatagcatttcttgaccttccgatggtaatctatgaacctcatccaaaaataatattccttcattagctttttcaactaatcctatggtatctctgctagcaccagtatatgcccctttcttaacaccaaagatgtgactcactagtagctgtggattatttgcataatctgcacagttaaatgaaataaatggcgcattggcttttattttgccaatttctttagcatacttatacataacttctgcaaacattgattttcctgtaccagtttcccctaaaagaagagtatgaagtccattgggaggatatattatagcagctctggcctgttgtgatgcgtttttcagactgaagctagttccaatgatgttatcaaaagcatcttttaaaactttttctgtgccttgccctatctgaatatcctcctcctttattttatatagtaccggcttcttcaatatcttttctatttttccatctctataaagtttatttaaatcactagatacgtttgtcctttgaatattcattattaatgaaatttctgtagctgaaaaaccgttgatgcatctacgttcattatattccttactacacagatcccttagaactttataaatattatcaatccttctcattgcttttcccctcatatcctattcgtataactctcttaacgttaacactctaggtacgtaaattaaatttaaatatctttaactaataagcttattatacatgatttaccatagaatttgaataaacatatcaaagagtggattattcaagttttattaaataacccactccatttttactatttgctgtttttacttattatacattgcatgctatttctttttctttaaacttttcttcatacattttaataagttcacagataagatctttagctaaagatgcagtcattaaatgatcttctgcatgcatcagtaataaagataattcttgtttattacctgcggcctcttcttgaattaagccagtctgtatattgtgaactaatgaaagttcttctttagcttgtttcatacatagattgactttatcaaactcaccatttctagctaaatttaaagcctcaaaacaagctgatcgtgaattacctgcgtgactaattatagtgaaaactatttcttctaattccatattcattttaaatcctccattatttatccattaagtttagtgcaagttctagaacactttttccatctattcttccataaagttgtactggtatgcaggcataaggcttacctttttcatcaactatttctttaacccatttttctttatatttaacttgaggcccaagtaaaaatacatcataatcatcaacattttcatccaaatcttctactggttcagcattaataactaagtccttgtgacctatttcctctgcatatttttgcatttttgttactagcaaacttgttgacatacctgctgcacacattaataatatcttcatgctaaattcctcctaaatttcattctataaatatttttctaattaatacactaagcttgtactgtatttaaattttcttctttcccttcaatttctaattgttgtttttcagcaaatttaaagaatgggtagtaaattattgctgctataaccatttctacagcagaccaaactgctgctctccaatctccaccagttgcaataaatggtcctataatagggggcattgtccacggaaccatagctactggtctaccaattatgtcaaaatacatcataaaataagacaaagtagtaagtactaaaggtaccactgtaaatggaactagaataactggatttaaaactactggaaaaccaaatatgactggctcgtttatttcaaaacatgcagatggaaatgaaacctttccaagtgatttataaagtttgctctttgaacggatcattaataaaactaaacaaagagttgcacctgttcctcctacattaacaaacaatgagtaaaatcctgatgctgtaatgtatggaatcttttcatgtgctataaaagctgctgtattaacagttaaaaattgaatatatattggatctgctataccttcaagcgtcatgtctccatgaatacctgctgaccaaagtaatgtaactaatgcgctatatattaatattcccggaagagtattaagggcaaaaacaactggactaaatatcatagtaataaaatcagttatattaaatcctataactactcttattagccaaactgtaatcataactacaagagctggtattaacgcaataaatgaatttccaactgctggcggaactccctctggtaatttaataacaatatttctctttacgaaaaatcttaatacttctactgcaaacatacaaactattatagcagtgaaaagtccttctgctccaaatttactagtatctaattgaaaatcctctgtcacttgtgtaagtaaaaatgctacaaaagatattactgatcctgtaattggatctaatttatagcttttagctaagtgatatcctattccaagggctgctaaaacgcctagaactccaaatgatgaatttacaactacattcatctttgggccaagctctccaatataatctgcccaccaatcaaatggaaggttacctaaaataagaaatatacttcctacaataatgaatggaattgtaatagctaatccattacgaattgccattagatgcctttgattaccgactttaactaatggtggtatcatcttttcttgaaaaaaatccataaatctttccataatttcttctcctccataattttttcgttctgttaagctgcataaacatctttcaattctatttaagtagtaatcgcaagcttgctaagtattgaatatctctgctaaagtattaaataatagaactgaagaaaacaaacataaaaattttctatcttacgataagttatataaaactaattttaataaacattatattcaaacaatgtattatgaaaaatgaaatccataacttttgcataatattattaatactcaaaaatgaaaataattaaatcacataattatttcagcatactaaagtaatcgtttttatatgttacagtataattttaatatttataaatgtataagacaaatataattgaattattgtttattattactatcacaatataaattttcactcaatatataggcaaaagattacgtttattttttataaaatacaagagatttgaggtttatggtaaataactaagtttgtttattaaatttatgcttaagtaggattaaactaaaattatataatcgctaaatagtaaaatttctatgaagtattaaattatttcttctagcaactcacagaatgaatttatttttacatagaattatataagcaattaccatgccaatactctaaaatactgataaaactcagacttaattgattcagtataaaatcaatacacattttacagttttctaaagatataatacacgtatgtgtattatatcttttctacatttcgtttttcataactaaaaggcttaaaatactgccatatataattaaacgccagtattatgccattaattgattacgtagcctactaacgctttgaatataaatttgttatcacaacatatatgcatacaaaattaatatttaaaagtgcaaaaatctgtataaactaaaaaacaatattaatacttgtccatattaatactgttttttatctttatttatataattttattgcatagctaaaaatctaattactatcctgtttacattaattttagtagctatcacaaattagtataagaaaaacctgttcttaaaccattaattaatactaataaacatcaccatctatattgaaagtatctccataaactgtaaaattaaagtctggtttcaaatctacattacctgcttttaataattttctgtatgcattaactctatccgaaccttctggatcatcatctttaaggaatgcatatctataatccattacactagaaagaaatttattttcatctataccatccttaggtaatccacctaactttttcttagccgaattaatatattcttttgctccatcttctccatgatttacacacatatcatatataaatgctaaagttagttgatgtttagcgccaatggaagttgctagagatactgctggtttccaatacatttcatcaagttcatataattgagctttcttaaataatgaatcattacatgcctttacatcttttataaaattatctaggcctttaatatcatcattttttccatcctcatcatgttcttccttgtctattctatctaatgctggaatatactttgccaaattattattgggatttagcttagtataataatgtattaatatatttccatcgtaagttcctgtagtaaatcctatacatccaaatgtaattcctcgtccatcaaatgagccaagcttctctgcataattataaacaaactttgttttactattttcacatacagtcgttaactgaaggtccactgctttttgttcagaatttgcagtaatggctaatgctgctgaagagaatgagagacacatagtcaaagatactgctaaagtaactaattttcgtaaatttttcatataaaaattccccctaataattattttatctcaattatatataaagcaaatattatgccaattataaaatacaaataatgtatattgaaaacagatgctttatagataaataatacatattatttaatgtgtattctaaaaatacatgtacaatacacataaatgtattaattacataatatgtaaatcgcatataatcttaaaaagtaaaagctttgtattgaattacttgatccttttaaatattaataattcaatacaaagcttaattattatgagaatataattttctaatcttcaaggatagcagctacaatacttgaatttttcaacataaagtttttttatctaaaattaaaacattatcgtaacgttaacacttttgtttacatataataattcatggtaatagttcaagaatatatatcttaagataaaataatattatggaggaaaacaaatgactaaaatatatgaaggagacgctataaatcaatatactggcgtaaaaccaactgaattaatgcaggaatcatcaaatcttttatttagagttcctgtattcctaagccatccaagtagattgaattctattcaacaagaatttgttgatgctataatatctaaaataagagaggctttattatttccacgtaccctaccagtaaccgaacaatatcccgaaactccattaacaaatatcagaagaatgatgctatctagttatggatttatttcacttaatcttaatcaacgacaggtatatataattcaaaataatcttggtcaacctcaaaatcagtttgctcttgagggtagtccttttgctcaaattgaaccagctatggcttatcaatacggtcttcctattcttcttataagagaagctggagtagaacaaagtgggatttggtcatttggtataggtccatttctaattttggagtgggatcctacaaggccacttgaagatttctttacaagcaatgcgtggctagaaatatttcaaaattggatatcacaggtaagaaacggattttatcttcaaactcaacctgaatttaaatattcttgtaataacactgatgtaaggtaaattaaaaatatttcttagtttttatactccatctaaaagatataaaaaagctgttacatcacaaagaaattctttatgtaacagcttaacttttcttttaactgacattaaagtactttttaaacacgattcttaattgttcattataatccttattaagcctccaaaacttccacacgctaaaaatccccatgataatttaatctatcatggggattaaacaaatactagtaatatctgaattaacaaaatcaacatatattaattaatatctatttgcttcttattattcttcctctaaaatttcttctacttcctctacactaagccctgtggcttctgcaatttcatcaatttcttcaaagcccattaaatcacgagctaatgaaatcataagctttttcacattttcttcaacacttggtggaagctcagacatatcagttaaattttctgttaaatcaaaatattcttctccataagactcgtcttcttctccttgttcaaaaagtcttcttttcttagccttttctctatcaaactcattaaggtatactaacttactattgtttacttctaagtcttcatctgaaaatactgttataccttcattctccaataaaagagctgtaattcctttgccttctatcttattacctgtaaaagtaccatcatagacaaagttagctccacatgaaggacttccttcttttaatatagcttttgtggctccaagttctttcgcaatttttaatgtttcatatgcaccatctataaattgcttagtaaaatcctcacctttattacttaatgcttttccattcccatctaacacttcacttgctgcactatttagctcaacaggatttcttggagttggtaatccgcctaattgttctggacaaactagaaccgctcttccttctctaaataattttaaacatctatcatttagattatttttaccactatatttacaattaactccacacaagcatgcacttattatgtacatattatcacctcttatctaacgtacacttaacactataaaacaaaaacttaagagaaatttaattatagctttacttaattatacattaatatttgtataatattcttactaacaataattttaatgatatttttaacttaaataagtaaaaatattaggtatatgaaaaaaataactaccccttaagttctaccatagtaactccgtctccaccttcaccatatgcacctagcctatatgattttacatgtggatgtctcttaagcatatcatttattgctttacgaagtactccagttcctttaccatgaactattgttacttcccctaaattagccatatatgcatcatctaaatatttatctgctttgtagcacgcttcttctgcatctaatccccttaagtctactctagattctacattacttagattaagctttacttctctttttcttcttactttttcttctttggtaacttgagtttttcttaaatctttaagcttaacatttactttcattattccagcttcaacttgaacttcgcctctgttatctggcatagaaacaataattactttttgatttaatgaaggcaggtaagcttccattccaagagttacattagttatagattccccctcattttccttcatcttgtgaattcctttttctctttcttctaaactatctttaagtttcttcctctcttcttcaagtctttgccttccgccacctgctattccaagcttttcaagctctctcatagcttttaaaatatcatcagcttcatctttagcatttgcaattatctctttagcctcacgtctagcatccatataagctttttccctagtattttctaatttttcaagcttttcttcatacttctttttaagatcttctgcttgatctctaagtatcttagcttcccttgcttcttttttagctattatacttttttcttgaagttccctgattagattttcaaattgaagattttcctcggacatatattcttttgcgcgtttaatgacaccttctacaagtcctaatctcttagaaatctcaaaggcatttgatttacctggaacaccaattaataatctataagttggcctcaaggtttctatatcaaattcaacagaagcattttctacaccatctgtttttaatgcataagctttaagttcactatagtgagttgttgcgattagctttgcgcctctatttcttaaagtttctaatattgatactgcaagagctgctccttctgctggatctgtacctgcaccaagctcatcaaataaagctaaagacttgtcatctacatgcttcatgatattaactatattagtcatatgagatgagaaagtagacaagctttgttcaatactttgttcatcacctatatctgcaaatatttctttaaagaaggctatagatgagttatctctagcaggaattaataatccgcttaatcccataatatgaagcaaaccaacagtttttattgtaactgtcttaccgccggtatttggtcctgttatcatcaaggtttgaaattcttcccctagatatatatctgatggcacaactttatcgctttctattaatggatgccttccagagaatatgctaaatgctccatcttctctaactataggctttacagcatttaatgcagatgcatatcttccttttgcaaatataaagtcaaactcaacaagtacctttaggttacttaaacatgaatctccattaattttaactttcaatgaaagatcagaaagtatcctctctatttcagctttttcttttaaaaacaactctcttatttcattgtttaaatttactagactcataggctctataaaaaaagttgctccagttgaactttgatcgtgtacaagtcctggaacttgacttttatattctgattttacaggaagcacatatctatcgcctctcatagtatataaatcatcctgtaagtattttgaattacttctaacaatagaacttattttttccctaactgaagaattcttttcttttaagcttcgtctgatattataaagagtttggctagctttatcactaatttcatcctctgatactatagctctttctatttcgtcttctaatgcttttactggagctaatatgtaagctaagtcttcaagttttggatatgacttttcaacttcttctcttttaaagaattccttcatatttctcgtagctttaagcattccaccaacttttaataattgtcctggtgataaggttcctccctttttagctctttctataccttcatgtatatcagctaatccttcaagtggtggattcccctttgatattaagatttcaagagcctcgtttgtctcttctaacttattatttatttcatataaattatcataaggctcaagagcctcaacttttactttagcagcatttgttcttgcatattttttaattttttcttttatcttattaaactctaaaattcttagagatctttcattcattatcccacatcctaacaatcaatcgatcaatcaataattgacagcatataagagataactaaaactttatacttataaaacttaaaatactctctttctaataagtttcaaagtaattttcaccttaattatcaattacaaaccgtcaactattccttggtattattctactccacgtttatagtggcccttagtatatttattattttcattttttgctttacgagtaatttgatttaaaacatcttttacttcatcataactttcatctttaaagtctactctaaaatttgaaatattaaaagacttaagttcttccatttcatcaattaaatttgtagatattgaatttaaaatataacttctacagctattatcacccaaaacagtaaaactttcgttcattctatctattaacttaaagttgtccttcatacacacaccactacattcttttttagatgacttattgccaaaagtacttcccataggacaatattcactaatcataagctcagtttttccataaatatttattcccatgttgcagttagtgtgcttcattaattcttttatttcttttcgatttagttcaagacttaagaatggaatgtcaacgtcttgcgcataaaatccagccgcttctttattaaatatatttaacttataatctcctattataaatagtttatctttatagatttttattattccagcattagatgtaattattccctttatataagattttagttcatctattatctttactatgctattaaattcctgcttaataatacttggaacttttaaatatatatttttatcttttgaagtttcatataaattctttaaatcatttttattcaacgcatgtttttgcctgctgaaaaatatatctaacgctatattttgagccttatcatcctcaagtagtgcctttagttgatcttttgtaatacaactataaatatagcctaagttttcctgacattttgcattatattctttaatagttccttctgttcttttccttctatatgaacttatttcttcttttaaaatcttttcaaataattctcttcttagattatttatagatgaaattcttataaatccatcgtcaaaaacatcaaaaattatcttatcaaatttatatggaatttctcctgattttcttaaggcttcctctactctttctcttgttaatggtttattcgttgcttcttcaaccatttctccataaactctatattcttttttattgtattttgctttaatacaaagaggtgcattaactttaaattcaatctctccagttaaatttatcttccttttataaggttttaaatcatcatttaactcatcataaagttttttatcagacatcttatatagcttataaccttttttgtatcccccagttggaaataattttactgtttcacccttaaaagcttccttaacttcattattattatttaaaattttacttaaagtaaatccatcgtcattaaaccttataccatcacccaaagatacacttgattctagtttaacttctccactgttagacacctgacctatatatacaccagtatttttagggtaattataactcatcatatcttttcctacatttttatatagatatgctttagcaaaaccttctctattaaatagctgtgctaattcttgtcttcccctttgtaaatcaaactttgtatttactaataccttatcaatagcttttctataattccttgtaactccagcaacatattctggctttttcattcttccttcaacttttaatgacgaagttccactctttataatggcgtccatatcatcaataaaacatgtatccttaggacttaaaagataagcctttctttctccaaaattttcaccctttaaggtatactgcattctacaaggttgtgcacaccttcctctatttccgcttcttccgccaatcatagaactcattaagcactgtcctgaataacatacacacaaagcaccatgcacaaatatttctgtctcaattcctaagtcttttgaaatatacttaatttcatctactgtaagctctctagataaaactattctctgcattcctttttctctaaaatataaggctccctctgcattatgaattgtcatttgtgtagatgcatgaagttcaaaatcaggatacacatctcttattaattttactagccctaaatcttgtattattattgcatctactccaatttcataaaggtatcctgcatattttaaagcttcctttaattcactttgttttaaaattgtatttatagttacatatacttttacattatagctatgagcataatcaacagccttcatcattgtttcattatcaaaatttgatgcataagctctagctgaaaatttatttccaccaagatatattgcatctgctccattatttatagcagcaattaaactctccatgcttcctgctggagccagtaattctatcttattcatatttctccttcattgattatcttttcttttttacaataggacctacttgttcttttttagctcttgcaatttctatttctttgtttattatttctgcttgtagctcaaataacctattgtgaaaagttcttgcttcttgattaagtttatcattttcattagctaattcttctttttctttagctagtgttgacatctttccttgtaaatcatctattgataccttacttgtattcaaatctttttccttagcttctatttctctttttaattttaggaaaatcccttctttatcttccaattccttttctaatctagctaaagctctctctctacttgctaattcttctttaattcttcttaagtcattttctttacactctaatgtattgcttacttcctcaatctcttttaccttaatgttaacttctacttctttttcttcatgaacttctttaagttcaccttttagcttttcattatcatttcttgttatttttaattccccttctaatctttctttttctctatcagaattctctatttcttgtgataatttatcgttagtatcattgatatttttaatttcattatttaaaatatcttgttttttatttaatttattaatttcgcttactaaagtatccttttcttcatttaataaatcaatttgacttactaacccttcattttctttattcagcttgctcaatttttgcttacattccgtaatctctttttctgattcttcaaatagatcattaagctgtttattaagatcagctttttccatattattatcttgaatttcttttgttaatttaacagcattatctttttcaagttttaaactatcatttaattcctgctctctttcaagtaattttttaatttttttatttaattcttcttcacttagtaacaattctgtaattttattttttagtatttctttttcttctctagctttagaagttattgcattattagtcgtaatttgattttctaacttttccttatactccgcaagttctttagcacatttatgatgctcctcatttaatttttctaaatttgctttacatgaggtatattctttgtttataacctctttattactaatttcatattttaagttttcgcttgctttttttaattccttacacacattattataatcagcttctagcgagatattcttttcttgtaatagaagcatcttattttctaaatttaacttagtttgagtaagttcttttatttgcttatctaactcaaaatttacagcagtcatttcgtttagttgttcagtcaccatatctttttctttgctaactttagtaagttcgctagttaaactacttacttgttcattagcttgttgcacttgcttatctaatctatgctctttgtttttggcctcatctatcttcttataaagaatcttgctcttctctttatagtcggaaatatcttttgttaaggcttcattactattcttatttctcttattctcatcagttattaatttattttcttttttcagcttttcattttcaattttcagtttattaatttcatcacttaatgaactaaattttacttctacattattatatttcccatgtagttcttcttctttcttctgaaaattattttgaagttctgatttttctctatttatattttctaattgcaagctaagctcgtctactttcttctttaacgaagaattttcaccactaatggcttcttttattttaattgctttatctaattctaaatcacactcgtaaagttcatcagctatattcaccgccgctaaaacagaagcatctgttgtactaaaactagctttcttagacagaatttctttaattcttgtatcaacaaaatttgctaccccaagcaaatatttttcgtctttttccccttttaagttataattcataccatttatattaactgttaccctaatcataataatagcacctcgtaaaattctttattacttctaattatatggtatattcactaataaaacaattatgttaggttaactgaaccttgaattcttgcactttttctttaaatttacgaaaaacaacctatatctattcaattgctaaaaaagttttcgtacttcttaaattttatgctatacttattttgattattttattgtttaattgtataaaaatgattaatattactttattgtgttaatcattcttatatataactagaattgggcggtgagtgaaattaatattaaatctattttaagcatattactatcaaaaattactgcgttttctgcaaaacacattgtaaaaggtggaagtaattttcctggtaagatagctttaaaaattgataaatcaatcttaaaacatgttagtaatggatacaaggtgattctagttactggaactaacggaaaaacaacaactacaagcatgatttataatatcctaaaggaaaataaattacacgttataacaaatagcactggagccaatttatacccaggtatcgtagcttgttttgtttccaactattctttttttaagaaaaaagaaaatccttatgcggtaatagaagttgatgaggctaatgtaaaattcattacagaacatataacccctgaaataataactgtaactaatttatttagggatcagctagatagatatggagaggtttatacaactctagttaaaattttagaaggtgtgactaaagttcctgagtcaaaactagttttgaatggtgatgaatctttactcggaaagttagatataaaaaatccagtagtatattatggttttaatacacctattaaagaagatactacattggaaataaatgctgatgcaaagttctgtaagttctgtaaggcaccttattcatataatctagttacttataatcacttaggcgatttttactgtcctgaatgtggttacaagcgttctgaacttgcttatgctgtaaataaaatttttgatttaacacctgaaaactcttctgtattaattaatgacactgaagttttcataagccaatcaggtgcttataatatttacaacgccttatgtgcatttgccatttcaaaagaacttggaatagaagactcagtaattaaagcttctcttcaaaatcaaagttcaagctttggcagacaagagcaaatatctattgataataaagatgtacaaattatattagtaaaaaatccagctggatataaccaagctttagacacccttgctcttaatacgagtgaattttcagcagttttcatgttaaatgataattacgctgacggacgtgatgtctcttggatttgggatgtagacttcgaaaaaatatctagtttaaaaatagaagatatttttgtatcaggaattagaatgtatgatatggcagtaagattaaaggttgctggattaaatgtagataaatttattttaaaagaagattatgaagagcttacagataaaattaaggaatctgcatctaaaaaaatatatatattagcaacttatactgcaatgattaattatagaaaatatcttcattcaaaaggttatataaaaaaactttggtaagataaggagaatactattatggaattaactatttgtcatttatatccggatttactaaatgtatatggtgacgtaggtaatgtactcattttaaaacatagagcagcccttagaggaattgatgtagatataataaatacttcaataggtgaaaacatagataaagacaatgtggacatcatcttcttcggtggtggccaagactatgaacagtctatagtctctaatgatttaaatgagataaagaaagatgctttaacaagttatattgaagatggcaaagttatgctagctatatgcggcggatatcaattattaggtaaatactacactgctccaaatggagaaaaaatagatggacttggtattttaaatctatataccgaaggcggggatactagatttattggaaatacagaaatatttaacgaagaatttaatgaaacttatgttggatttgaaaatcattctggtagaacatatataaatgaccatactccccttggaaaatgcattcacggatatggcaataatggtgaagatggatatgaaggatgtatctataaaaatacatttggttcgtattttcatggctcttttctttcaaaaaatccagaatttgcagataggcttctaacattagctttgaagaacaaatacggagaagatgtaaaattagaaaacttgaatgataatttcgaattaaaagcaaaaaattctataatacaaagactaaagtaaatattacaaaattgtaaattctcatatattgtttgtaactttttacataacatttattgttatagcattacataaatgttatacttaaaatgttttattatacttaaggcatgttaaaaaagattattattttatatatgtttaaaagaagtggagagatttgacttgaaaaaaaatttaattttaaaagcatttgcattaaccctttctctttctttatttagtccattaagtatggcaagttatgcagcaagcaattctgcaaaacctaatactgaaacttcatcagagaacttaccaaacattaaagctgaagctgctttaactatggatttagaaacaggagagataatttattgcaaggatgctgacagcaagagatatcctgctagtacaacaaaacttttaactggcttattattagctgaaagcaaagacaaagcagatcagcttgaatatactaaatctgcaaaggaacaacctgaatactctttaaatttaaattatatgcataatactatgcagcctggtgacaaagtaactgccgatgatataatgaagggcttactacttttttctggtaatgatactgcatatgtaatagcagacaatatttccggagatgttaaatcatttgctgaattaatgaataaaaaagcaaaagaacttggagctaataatagtaactttgttactcctaatggacttcatgatccaaatcattacactacagcatatgacctttcaatgatcatgaaggcagcttttgcaaatccttgggaaagagaaacaatggaacttgaaaaagctcctataaatttaaaaaattctagaataattttagaaaatagaaacttaacacttggtaaaaatggtaaccttgctggtaaaactggtacaactaatgaagctggcggttgtttagcgactgtttatgatagagatgggcgtcagttaattggtattgttcttaaaagtagacaaattgataatgcagatatgacaaaatttaatgatatggatgctattatggattatagctatggtgctaaaaaagaagtttataaatcaaatggtgaaagtgttggaaccgctgatgtaaaatataaaccatttatattatttgggcctacaaaaactatctctgttccaattaaattgactcaagatgtgaactattataaaaatgctataaacgattctgaatctcagattacttataaaggaacagattctactgcatggagtttactattcaataaaaatactaaacttacttatagtacaagaaatcattctgaagaagttacaggttcagttgatatttcactaggttcaataattaaagataatttaattatctacatttctactttagtaggtttggctattatcgtaactcttattgctcttattaaaaatgctgcatctaattcaagacgcaagaataaaaattactatagccgttctaacagaagaagaagataattaaataactttacttaatttctataatatatcttaagcatcttcaaaaataggttgtattcttcctaggtatttgaagatgcttttatttaaggagtaattaacatgaataaattgaattttaaaggcagtgttatgcttaatcccacgcctgtagtacttgtcacatcaaaaaacaaagatgataaagttaatgtttttacggttggctgggtaagtactgtttgcactaaagaacctataatagctatgggaatacgacctgagagattatcttatgattacataaaagaaagtggtgaatgcgttattaatttgccgactagagaaatggttaagatcgttgattattgtggagttcgctctggaaagaaagaagataaaattaaacattttggtttgcaacttaataaaggtgaaagtatatccacaccttcattgcaaaaatcgccgatagctttagaatgtaagttaaaatcaattacgcctctaggtacacatgatctattcctgtttgaagtaacaaacgtaaaggtcgacgaagacttaattgattcaaatggtaagatatgctttaacaaagccaacttgatttgttatagccatggtgaatattatggcctaaacgctaaaccattgggcacatttggatattcagtaaaaaagaaaaaaaaagtacataaaaaataataatcctcaatttatttttatatttatatgttgcaattcacaattcataatttcagctaaaatttttgcgatatttttataattatgatgaataattattttgcaatatatatatttaaatttaaagcagttacaatgtctttcgctatgtaactgctttcttgtttatataatatattttcaatgtagaataaatttaatattaaaagacaatctaatagtaaatcttacaatttgaaattgtcatatggaggattgaaatgaaaatattaaaaaagatactatcgttcataattatattagctattatacctacttataatcttaaaactgctttatatgcaaatgcacaagttcttccagagaagccagtaaaggtagccacactgttatttgctttagatgatccttatatatctttagtaagaaatagccttgaggaaattcaaaataaaagcaaagattctattagctttacttttttggatggcagaagaaatcaaggtatacaaaatgctttattagattcagcgctccaaagtgattacgatcttttattaataaatttagtaagcttagatagaaatactgtagaatcagttattagaaaagcaaaacaaagaaatattcctgtgattctatttaatacagtaccttttgatactgaacccatcaaatcttataatagagctcttgttgtatcaacaaatgctgatcaatctgggattttgcaaggaaatctaattgttaaagaatggaattccgataaaaaaactatggatagaaatggtgataacgtattacaatattttatgttaaaaggtccaaataatagtactgtaacaaatgcaagaagcacatactctatatcaactattaatgatgctggaattaaaacacaagaaattttatctaaattctgttattgggatgaaatatgcgccaaagattctactgaattactatttttgagatatggagataaaatcgaggcaataatttcaaataatgatgccatggctataggtgcaattgaagcattacagaaatacggatacaataaagaagataaatcaaaatatatacctgttttcggaattgatggaataccagcagctaaagacctaattaataaaggtgttatgacaggcactgtttttcaggatcctaatcaaacagctgaagccctttattccataggaatgaacttagttagtaataaaaatcctcttgaaaatacaaattataaatttgatgaaacaggagttacaattcaaatgccctatcaagaatatactcctcaaaaataacactatacacattctattaattaataaggctgttttaaagtaattaagatatatatatacccaattaatttaaagcagccttattatatgtaaatttacaaattaaaataacccagctcatccctatgtccgccaagtaaataattaatgtaattttatgaacttacttataatataaaatgtttttctaattcttcaatcattttagatttaaaagcagtaaatttattattatatttacaaattactttttcatgcttcttgtcatataccacaaaagaaatataaactgtatcattatcataacaaagcaaatatcctagttctgaattttcttctaaatctatttttttatactcattggatactatttcatataaattggtttcttttttttctaaaataacatattgtgatctcttctcatcattttcattcatattacaatatctttcatcacttaagtttataaaaatattatcatcattatatttcccaaatggaagatacaaatacctcttctctttaatgaaagaaataacagaatcttttatttcgtcttttctccccttgtattttcttccatccttgttgattgaaaacattaaatccgtatactttccatcccatttaaaatatttcctttgccattcctcaagaaacaataacatattcaagaaatctaattcactgtacttcttttttattaaatagtccttcttaagtaaattctctaactgctcccctacatttttatctatttcttctaaaatagtagcttgtcctcgcttactcaaaaaatctccaaattcatctccaaaactacttgttaaaattatcttaagaatcattttgttatacttcaaggatttttctttaatattcttagcgtatgtattttcactacaactatctaaatattctttaatcaaagttgaatctttttgaatatacccttcttttctcagcctcatctggcttagatccttttttacatactcatccataagatgattctgcttgtccacatctttggcttttatcgatgtaattataggtatagtctttgatactttttcttctaaagcttcttccacattagttaagtagcttttaggaaatttcaaagcacatttactatctaacttttctttaaatttgttaactatatttatttcttccataatatttacttcttttttagatacaactttttcctctacttcagatataataagcaatttacttctttcaaaagcataccctagtccataagttataagaacttcatcatcgtgagccatatttaatcttctcctacaccagcattaattttttaatatcataaactatcattttttaaattattcataattactctatcttaaataattataatttgcttttcttcctataatcaacaagtaaatattactaaacctcttttatagtcccattatttataatatacatgtataaatatattttttgtaaattctaatacttatatttaccttataatctacctattccacttcatatattgccacttataagaaaataacggattatttctaaataatttctttagaataacccgttatttttactgctaacttttaatagtctttttaagcttttactttattatatgatatatgtataatgctaaattatatactaacggagcaatcatcactgtcattattcctgcaatgccaattgatagactactcattgccccttctacttccccaagctctaaagccttactagtaccaactgcatgagatgccgttcctatagatacaccaactgcaaccttatcttttatcttaaaaattttacatatagtcggtccaaatacagccccaactatacctgtgattataattgcaaggactgttattggaacaactcctcctaattgactgcttattgatattcctataggagttgttactgattttggaactaatgattttattacacttgaattaagtccaactaaataagatattcctattatagaaattatccctatagcgctaccaacaaatatacctgttaaaatggccttagcattctttttcaaaagatccagctgtttatataaaggtactgcaagtacaacagttgatggtccaagaaacatatttataaattgaccacctttattatatgtatcaaaatcaatatgaaatgcaaacaaaaaacatattataattcctattgcaattaatagtggatttaaaattggtattcttgtatttctgttaatgaatataccaacttcaaaagccgcaagtgaaagtactagtccaaataaaacattgttcgttaatatttgcatatattctcctcttttcttatcactttatctgtacgtaaactaactatttttccttggctttcttgaaacagcctgcacgacaataccagtcactccaattactattgtagtcgtcaatatacatactaataataattgccaccatgtcgcttttattattccaagcgacgtcattaaaccaactcctgctggaataaagaaaaacgccagatggtctagtaaaaaatttgttatatttgaaatgctctccactttaattacctttgtgtataataatataaataatattatcattcctaatatatttcctggtatcggtagatgaagcattgatgatataaattctcctaatagataaattccaaatataattagtgcttctctaaataacttcaattttatcacactccaattatttaagcatatttgttaaaaaaccaacttctctctattcttaatatgacctttacaatttaatttaccatcattacatggataagtaaaattcctttacactttaagtaaaggttacctttttgttaaatatccttatattttcagtattatatattaattgcactttaaatataagtttctaaaaatatgtttaattttattcattataaaaattaaaacgacttatttattttataaataagtcgttttaagagagtatttgtaaagtttaatagtatacttttaacttctatcctttactagtttattttctactattgcaaccacctcatacatgataaatgcaattgctgataatatcacaatgctcatcattaccatatctagctgagccacttgtcctccatatactatcaaaaatccaagaccattcttcgctactaaaaattctcccattattaccccaacccaagataaaccaacatttatctttagagctgatatgaggataggaacagagtatggaaatattaaatatcttaatatctgtatttttgtcgctctaaaagtattcataagcataattttctctttatctatttcattaaatccagttaatacacttataattgttgttattactgatattaaaagagcaatgactattattgctggaataccatttccaatccaaaatattattattggggccaaagcaactttaggaagtgcatttaaaactactaaatatggatctagtatttttgatacaaaaggactccaccataagattactgcaattagtgagcctaggattgttcctaaagaaaatcctaagatagtttcatagcatgtgactgcgatatgcttaattaaacctccaccttcatataaagatacaaatgattcaattactctagttggactagatgtaagaaacggatctatccacttaagatttgcagctatttgccataaggctataaaaataaccaatataagaattctagtaattaaaatttttctttttgttttctttaccttattcaaatatatttcgtgttccttagatatattatttgcttcactaacatttacacttttcttagccatttccatcattcaactccttccataacatgttaaaatattcactaaactctggagctcttctcttttggaaaggagttaattcttcatcactaaaatgtataggaatttctgccttcacactagatggtctcttagataatactattactttttcagacaaagaaatcgcttctgctatatcatgtgtcaccattattgctgtctttttttctgtttttattatcttataaacatcatcacataccaaaagtctcgattgataatctagtgctgaaaatggttcatctaaaaagagtatctctggatttaatgctaaagtccttataagtgcaactctttgcctcataccacctgaaagttcactaggatgatggttcttaaatctcgttaacccataagcatctaataatccacttactctttcttttgattcactatttagctgcttttttatctttaatcctaagattacattttcccaaaccgtattccactcaaataaatgatccttttgaaacatatatcctatcttatccaaattcttttttacatcttcacctttgtataatacgctcccattagatggttctaacagtccactcattatatttaataatgtagattttccacatcctgacggtcctaaaatagaaataaatttaccatcatctacttgaaaattaacattatttaaagcctgtgtttcacctttaatagaatgataattcattgatatatttgatatttctaacaagctcaaataaaatcaccaccttttcatctttatgtgacctttatttagctgctttttcagcaaaagaattatctacgatcttgctaaattcaggtctttgcggcattaagcttgaatcataatcagtaattatatccataagtctatttaaattttcttctttaatttctggtgtatgagctatagcatcaatctttttatagttatctataactgtcataattgtatctttatctgtacctgggaaataatcaattatgctatccgcaacttcctctgtactatgactaaaaaaccactgctgacctttatagatagcatttgtaaaaccttgtattacttgtggatttttatccatataggattttgttgcaaaataacaagtataaggaattaatcctgattcttcaccaacagatgcaagaatatatccagttccctctttctgaattgcagaagctgtaggttcaaagagagccacataatcacctgtaccgcccttaaatgcacctgcagttgcagcaaaatctatattatttaccatattgacatctgtttttggattaatattattgtgtttcatagcatattcaaaagccatttctggaacaccacccggtcttcctcctataatatttttccctttaatattttgccacttaaaattgtcttccttagttcgtccaaccacgaaagagccatctttttgggtaagctgtccaaaaagtactgggtagtcttctcttccttgattattaatgtaaatagtttgttctggtccacaaaaaccaatatctgctgatttacttaaaactgcttgcatagttttatctgcgccttgacctgtttgtaaatcaatttcgattccattctctgcaaaatagccttctttcattgcaacatacataggagcgtaaaaaactgaacgtgtaacttcatttaagcgtacagttactttaccttccttagttttattattgctactacagccaaacatagatatggcagttatactcgaaatcaataaagcagttaatacttttaacttttttttcattaaataaagcatctcctaatactgttttatgatgtatcatatgatatttaatcaaagattgttctaatatatatgctctatttgctggatacaataagtcttaatttatataaactatttgggcttaaaactttattttgtaaacaattcacatttaacaattttagcttaaagcaacgcacaaagtataaacttctaaatttaattgtcgatttttaaataatatgataatataatcatatcgtttttataaaaaaggtattttatccacttatcatttctaagaacaatatcaacaacattaaatgtatagaaaggggaatttaatatgaaactatggtccattatagcaataggagtatatttacttattttgcttacaataggatactactcttacaaaaaaacatctaatctttcagattatatgataggaggaagaggactcggacctcttgttacagcattatcagcaggcgcaagtgatatgagcggttggatgcttatgggacttcctggagcagtttacctaactggtatatctaatatttggataggaattggtttaaccgtaggtgcctactttaactaccttctactggctccaagatttagagtctacacagagattgcaaatgactctatgacaattccagactatttagaaaatcgttttaaagataagtctaacatacttaggcttgtatctggtatcgtaatacttgttttctttattctttatgtttcatcaggacttgttgctggaggaaaattatttgttgatacatataagctaacttatacaatgggtgtagttgtcactctatctgttgttgttctttatacgtattatggtggattcttagcagttagccttactgacttcttccaagggactttaatgtttatatgtttaatcactgttccagttgtagcgtatatgaatataggggtagatcctggaacatttgtaaataaggtaaaagcaattgatcctaaattatttgatatatttagagggactagcatagctagtattattagccttctagcttggggcttaggctattttggacagcctcacattattgttcgtttcatggcaataaaatctgcaaaagaattaaaatcagcaagaagaattggtattggatggatggcaataggtcttttaggtgctgttgtaagtggtattataggtcttgtatattttactgaacataacactccattaagtgatcctgaaacagtttttcttagacttggtgatatattatttcatccatttattacaggaattatattatctgcagtactagctgctattatgagtactatctcatctcagcttttagtttgttcaagttctattacaaaagatttttatctagctttctttaataaagaagcttccgaaaaacaacaaatggtaataggtaaattagctgtattagtcatagcagcatttgcgacagtacttgcataccttccaaataagactattttagatattgttggccaagcatgggctggttttggttcgtcttttggtccagttcttttattaagtctgtactggaaaagaatgactaaatggggtgccttatctggaatgattgttggtggtataacagttcttttatggattgttttaggtttatctagttttctatatgagatgattccaggattttcattatcacttctatctgtaattatcgttagtcttttaactaaaaagccagatagtgatgtcagtaaccagtttaataaaatggaaaatatattaacagatatgaaataatatatttgttttctaaaggtatagtattcaattaatcttgtacctttaacttataaaaaataacagtaagactaataattctatggtcttactgttattttttatccttatttgcttattttaaattttgatactaactcatttaatctatgagccaatttagctaattgattagctgaatctcctatttcgtccatagtaacagcctgttcttcagctgatgctgatacctcttctgttgctgatgccgtgtgttctgatataattgatgtttcttgcatttctactactgtatcttttgctgttttaatcatagattctgtagaattatatacatctcgaactacatcaaaaatgtttcttatagctttttctatattatcaaaatgagtttcagcctttaacgctgtttccataccaacagtaatttccttagaaccttcatccatactactactaatggtctcaatttgattttgtattccacttattaaagccgaaatctgactggcagcagtagcagattgttccgcaagggttcttacttcatctgcaactacggcaaatccctttccttgctctccagctctagcagcttctattgctgcatttaaagcaagtaaattggtctgacttgcaatgttagttataacttcaacaatcttaccaatttcatttgatctctcgagtaacattttactttcttctaaattggttttattgttttcaacaattaatttcatactttcaacagctttatccaccgcttcaaaagcaaccgcacttatgttatgtgattcttcagctgtttcaagcatatcattacatttattaacaacaactctacttacttcttccatttcaattgttttctcgctggctaaagtcacttgtcttgactgctcagttgtattttctgctatcacttgtattgctttagcaacttctccagtaaccttaatgctatcatcacatgaatttgcaagattagttgaaacttcatttacctttgatgattcattatttatatctgtaattatgcctcttaatgcttctatcgtatgattaaacgctgtagcaagatttccaaattcatctttggattttacttctattgaaccacttaagtctccagtagatataacttccgcgaactcattaaggcgtactaaaggtttgatcaacttagttgctgctgtaaatatagctgctgataaaattacaataatagctataactatcccaatcataatcagtatcaaatgattagatgaagcaaaaagttcatcctcataaacaacatttataactgtccaaccagaaatcggtgcctttgcatagaatgcaatttttttctcagatccacttccaaatttaaaaactcctggtttatcaccttgaatggcttcattaagtttagtaagatctgaatcattaactgtatttattttctctttcatggcccaatctttatttgggtgaactataaaagttccatcacttcctaataatactccgtaacctttttgaccatattttagatttttaacttgattttctactgcttcaatagccaaacttgaggcagctcctgctgtaacttttccttgtgcatctttattccacgcaaccatcattacaacattcttatcataagcttcagaatatgtaggcttaaatattgcatcataaggaacgccatttgtctttgaatatctttctgaagcttctgttgcagcacctttagcccaattagcagttgcaaattttccattgcttacattataaaatctcgcttgtagcttattcaaactatcagcgttactccattcactaggctctaggctatttagtatatggactgctgcatattcgtctggatatgtatttttaataaaattaaatcttgataaatttaaatcatctattatgtttaatgatccatctgtgctatttaaatttaaaccaggatttttttccaaaacttgtttaagcactgggctttgagctgtttcttgaacttctgccattctactcgtcagccatgtattaatatgaccagttgcttctgttgttcttaatgacatggaattcactaattcgctttctataatgctcctaaaattaatatatgcaaatcctgtcagcgatatcaatccaactattactagcggcaatattattaccattaactttgatttaaatgatattctcatgattaatcatttcctccttaaggtgtacaaattttttaatcttgaaattcaccgttatgcaaccatatatgctttaattcttcctgatttctatctaatgtttttctctctctcatagcctttgctggtatacccgctaccaactcatttttttcaacatttttaccgactaaagaagaagctgctactattccttgtttttcaattgttactccaggcaatatagttgaattagaatatattttagcgtaatctttaattactacttttgcatatgtccttaattcatgttcatgctcctcatgagaatgagtaaaaattgtaacgccttcgccaattcctactgagttacctattgttattccaccttttgaatctaggaaagcacctttgttcataaatacgttatctcctatttctatattgtcaggaacattgaaacgtacattttcttcagctataaaattctttccgcatgacttaaataatttttttgctaatatctgtctataaggaatagcaaaattggcaattaagcacataggtgatttatctagtacatcccataaaaaatgaagatatcttttttcttctgaaaattctaattcattatttttaggtaaatagtccccatataatttcatttcatctaatatttcgtatggaaaataacattttagagaatttaaaatttctattacgccctctttatttatcccttgttttactatgacttctacttcatttaataattcgtctattttactcatatcatttcagattattaaaatcgcaaaaaataatcttttcgcctccttcatagtcaaactttcaacgcgattttataagcaacattaagtcaaactgtttgtccaacttattttagttttgctactaattactatgattatattttattagccttctccactcccttctgatcttttaatattatttataattcaaacttcgaatctctagcagcaaatactttgcacttgaaaaaataataaaaatagctttcttattgtaagttttaagagcgcaaaaatggtgtctacataattgtggacaccaaaattaaaatataaaatttattattcatagatacattttggcaacctgacaatcatagaaaattaaatttttccttagactcatagctttgcgaccctatttttcaataagtgtgcctattgatattatatttttttcatttttattctattattacatcttttacaacatttttcaacttatatacactaaatttaagttacaatattgtaaaaatggatattatttaatcgtttaattcaatataataccatttattcaatataatatatttataaatttaaatatattatatatatttttcttatcgccatgctaataaattcatttaaaaatcaataattttcttcaatttcatatataccaattcatgaaaatatatctcctaaaattattcttttatagaatttactttttaagttctgtatcaaactctcttcttgtccaagttttaaaatcagctggattttcttcattaattaaaaatactcttgcaccacgaggaattttgtcatctccatatcctccgtatccagtatatccagcatatccaagcctaacaccatctaaagcagcacagtaattattaaaatgatcatgccctacaaatatacctttcacatcaccaattttaactattttgttaaataagcataaatttatcttggcacagctctcatcttcaagcctttcaccatttactaatccagtcttacatgcctttttaaacttctttaaaggtatatgaaagaacataagcgcaggtattaatcttttatattttttcttcaaatttatcgctgttcttttataccaccatatttgagtaagttttatccaatcatatcctccaataatggcaggagcgtattttcctgaatctatcatatatatattaaatttaggcgttttatcttttgaactttctacaagaagattataattacctatcctatcaaaagttttataccccacttgactcagattatgtttaaagctcatatataaattcatcatttcttctttcgtcatcatattatgttcatcatcatgattaccaaaaactatacaccaaggtacatttctattttccattggctccgctatatgatttatagctttttttacatcttctgctgtctgacatttgccatcaataatatctcctgataatataaccatattggggttttcgtaatctaatatcttatttataagctctatagatttgtctctgctcggtccttcatgtatatctgtaaattgaactattttaaacttgccattactatcaaacctaaggttatttttcatatatattcacctttcttaaaatataatattatatgaaaactaggttgtatctgacactaactatttgctaattagaccttattttaaattgtaaaaggatcattgcattttgcaacaatcctttatatcttataaaacattaaatatatattttttaattaaatttctacatttatcaattaatttatcacttggctcactagagtcttaaacgtaaatttattattacaacatatatatcataatgattttatatttttatagtttaaattcttcaattttttctttcaattcctcagccatatcttttaaattattaaaattatcaacaaagctttctgttgacgctgtcacttcttgcgctgtcgctgaaacttcctctgttcccgatgctgtttcttctaatatcgctgataagttttctactttttcaactacatcatccttcatattatttatgttactcacaccttcagctattttactcaccttttctgttaaactttctatagctgttactatttctgtaaatatcacttctgattctttaactgcatgctcttgatcatctactgttccacttgtttctaataccctgtcaactgctaattctgatttactttttatttcttttattatttcatctatttgtttggctgaaactgatgtctcttctgcaagctttcttatttcatcagcgactactgcaaatccctttcctgcttctcctgctctagctgcttctattgctgcatttaaggctaaaagatttgtttgctctgtaatcgcacttattgccttattcatggtgcctattttcattatactttccgaaacttcacttacaacatcttttactgattcagtactttttttagtttcatatgatttatttataacggtctttacaatctttattccatctttacctaaatcatttgcttttattgccataccatttacactttcagtcgcttcttctatcttattcatagattgagatagtaagtccatgctgtgtgatatcatttctaaattgttagaagactccatagttccacttgatatttgatttattgtctcacttacctgattcatcgatattgctacttctttgctcatactaactgaatttatagcatttttattaacatttattgccgaattatcaacactcttaattaattttgcaatatttttctgcattttattaaaactattttctagaattataaattcgcgaatatgattatttataataatttctttgttaaattctccattcgcagttctttccattccatcttttaaggaatttactcctttacttattcttctagcaatagccatagttataattaatgtaattaccgctattgcaaatataattataattgatgctatagttgaatcattttctgatttccttagctcactagatgggatttttagtattaacttccatccagtaagttccgaggtctcaaaatacccctcatatgtactattattataattgaatttgattttacctttatcaccaattgatatctgattccagcaattgtattcagttggctctgttccagcaattttagttttgtcattgtcagaaataactacaccatctttatcagtaataataaactctccggtttgtccgtattttatacttgataactgatctgctagttcacttagctctacatctatagccataacgcctaccggtacattatttttaatcacagccttatatattgttattgcgctttttccagttattttatcttgataaggactatgaataatatatttattcggattctctatagtctctttaaaccaggatttttctgtagcgttataatcatctggcaatttactatcaagtatttgaaatacttttccagtgttgtctgaataatatatatttaaaatactttcatcagtcttcttaattaatttcatatctccattcaatttattatatggtgattcttcaatattaaaattattattctcaattaatgttttcaatgtatcttcataatatgtaatcttattatttattatttcctgtcctatatttgagagtaaagttctattttcatcaaaactcttttcattactcctccttgatgtcgttgtagaaatgatacctaaaataactactggtattattgctaacatagcaattgtaatcagtaagtataaccttatacttactgatttaatttgactttgtgctttatgcatattttcccccacctcataattaacttcaattcatattatatcgcaaaatatgccaaaatatctcattttatattctttttatgaaactatgctcaaaaatgacatttttttgacattagtcatgtttattagcaatattttaataaatcttcttatttattatcacattctcatttaaattgacaaatttatatttatttttgatagaaaaaattaaaactcaacctttttaggttataccctcaattttactggaatataaattcctaaagaagaacaaaagtggctgcgccacgctctttctttataccattttttacaggtcaatatccttataccccattggtatcactggctttcaaaatcaaaaaattctatactttcctagacaataaaaaaacaaaatccaagttatattagtaacctggattttgctttcactaaattcttatacattatttattattatgtttctacatatttaatcctgaataagcttcttctccatgtaaggaaatatctaatccctctgcttcctgttctgaagtagctcttaagcccattactaaactcattactttaagtattacaaatgtcgcaactgctgcatacaaggcagttgcacaagtagaaattaaatgagcttttaaaagtgcaaagttaccatatattaatccatcactccctgctggattaattgcctttgatgcaaagatagctgtcgctatagatccccaaattcctgctactccatgacagccaaaagcatctaaggcatcatcgtatcctaatttcctcttcaatatagctattgcgaaaaagcttaatgctccgccaactgctccaataagcacagctgatatagggctcacgaatcctgccccctgagttattgcaactaacccggctatagctccacttactgttcctaaggctgtaggttttttatagagcaaccattcacaaagtacccatgcaactgctcctgcagccgctgaagtattagttgtaaagaatgcatttacagctacataattcattgcaagagcacttcctgcattgaatccaaaccatccaaaccataaaagccctccacctaatattgccataggtatatggtgtggttcagggatcgctctctttcttttaccaacaacaattgccgcaactagtccagaaactcctgagtttatctctactggatttcctccagcaaaatcaaggactcctaaattccttaaccatccattagctccccatacccaatgagaaataggatcataaacaaatgtactccacaaaataatcaatattataaacgccgggaaattcatacgttcagcaacagaacctgaaattacagctgcagtaatcgcagaaaacattaactgaaatactacaaattctaaatgtggtattgtgcctgcataatccgcattaggcgccattcctataccttttaggaaactccaatctaaaccacctattactccttttacatctggaccgaaggctaaagtataacctataaaaatccattgtaaagatataataacaagagctgcataactatgtactgtaatacttaatacatttttgcttttaaccatacctccataaaataaagctaatcctggcaccattagcattactaacgctgcactaataattacaaatcccatatctgcgccgtttaataattccattttctattcccccttgaataaatttaattaaattttgagtacaattgcttattctaagttgttaaaaaataaaaaagacgcttcactccaaagaaggtatacccatactagatatatcttttttgaaatgaaaacgccattgttttctacatatttctttaaatttttaaattacttttataagtttactatcccatgttttatatgtcaatataaaatgataatttattattagttatttttaaatatgaattatttttttcattatacatacgggccaggtaaaataacaaaatctcagacgactttggctaagttcaatattgtgcttcacactcttttcatatatgtagatttttttacgcatttgcctttttaaacacatgtgagagaaatttggcaggcgaatatgatttattttttattctctttgcaaaccataactttctgagttagtcttttccataacttatccacagatttaacttgaatatgaattcctagagaataaaaaactctcttgtttttacattaaatcaagagagttctaattaaaaattaaattcttatatacatattattgattaatttctatatccacatgaaaaatcttctccaggatttatatctaatacaacacgttcgggttcaacaagcgcaacttcatgtcgacatttccacttgctattttccgtaattccttctatggtgtctatttcttcaagaacatcgctattttcaaaaatgtaatatccataagaatataaaatattcgatatttcgtctggatctaaatttttaaaatggcattgtaaatcacataaacctactgatgataatcctaatgtatccattacatactcattctcattgttttcaatattaaataatcttacatttaatataccaagtaaaacatcataatcatcatttagaggattattttttaaatactcttccctacttattacttgttcagtaatattaaaatgaatgccttcacatggaattaattcaactatagaataaagcgttttttgaaaaagttttattctttcagcataatttaatcctatagccattatatctgtaaccaaaactctaaccttacatttttcaaattcttctttattaacatagtcaaatgattgtcctaatgattttctcaatttattaatttcaggtttttcttcaataacgctaataacaattccaacaggcgcatttacatttttatattctaatatatgatccataaatgcaaatgaaatattgttatctctattagatgtaactttaacatttttaaaatacttttgtatatttcttagtaattcattttccagaataacaggcttttctttcatcaaaagttcaacactatatatttctgaaaaagcatcagctacattttctacctttccatttttacttacttcatatcttttcattctatacaaaccctctttcttatttttaattttaattgaaataaattctttattctttgctccaaataaaaaagctgtctcaaaacataattaattttgagacagctttgtctatgtaaatatttattaattataacacactatatataaatttaatatacattcacttaaaatgtatgtattattataattatttttacattttcatttaatttgaaaattaattcattcacaaatggtttggtaaatccataatattattaatagtatagatatatttaaggagaaagctatgcccttaaaatacaagaaccacatagactttgataaattacccaaaaattttcctccacaacatcaggattgtcaaccaggaattgaagcacgtatggatccaccgcctatatttgataatcctgattataaaggaagtgataaattaaaaggtaaagtagcactaatcacaggcggtgatagtggaatcggaagagccgtagctattgcttttgctaaagagggagctgatatagtaatttcatatttatatgaacatcaagatgcaataaaaaccaagcaatatgttgaaaaatatggcagacactgtcttctcatgcctggtgatatttcctacaaagatttctgcaaaaaactagtcgaatgtacaattgaaaaactagggaaaattgatattttaataaacaatgctggtgttcaatttcctcaagatagtatagaagaactatcatcttcccaattaaaaacaacatattcaatcaatatatttccaatgttttatctaacccaagctgcattgccacacatgaaaagaggaagtacaattgtaaacacggcttctgtcacagcttaccaaggtaataaaactttaattgactattcttcaaccaaaggctcaattgtaaccttcactcgttctctttcccaatccatagtaaccaaaggaattagagttaatgctgtagctccaggccctatttggacgccacttatagtatcaagcttttctgctgaagaagttgctaaatttggatctgacgttcctatgaaaagagctggccaacctttcgaattggctccagcatatgtatatcttgcatctaatgactcctcctatgttactgggcaagtacttcatgtaaatggtggaactatggttgatagttagaataaatttaacaaccgaatatattctttagggcacaataaattagggcttgttaacaagcccttacttattgtctataaattcaatcttccaattaaagtatccactctcctcatttttctcatatttgaaatatgccgaaaatgtattaccttttttactcttaagatttctaaatcctacttttccattcttaagcagaagttcaaccatttctttagatattttcttaccgaaagatgctatatatctatcatctttccaaatcgtatatttgcatccatttttccagttactgcatccaaaactcttttcaccttcaattactggatttccacagactggacatggtcctatattctcactatctttaggtatttctactttaaatcttgataatgcagcatcatctttttttatcaattctacggattggattgtgaaatctgttataagtttaataaattcacttttagcaaattttcctttctctatatctgaaagagttttctctaatctacctgtatactccaagtcaaataattcttttactggaaaagtctcaaccaaatttctcccaagctctgtacacataagatttttaccttttgtctttaggtatcctatatcctttaatttctttattgtttctgctctagtcgctggagttcctatgctaaacccacttaaaattgcctgcatcatttcttctgagtcttcatcttttccttcaataccttttccgcaagtctccattactctaagtaatgttttttcagtgtgatacttaggtggcttcttagtaacagaattcactttagaatctacaatatctacagtttcatctatttcaattttgggtagaattacatctttactttctattttctctactactttccatccctctacaagctttactttccctttcgaaacaaaaattccattcatttctgaaacattagcttttaatgtaacttttgtttcttcaaattcagctataggcataaactgcattataaatctatttttaatagcatcatatactattttttcatcagacgataagcccgatggctttatatatgttggtgttatagcactgtgactctcaaccttcgagctatcaaaaattctttttgatgtactaaatttaatatctttttcatatggcaatccagcttttaatgtatctaaaacttttttcgctctatcctttaaactttcttctaaaaccacacttgccgttcttggataggtagtaagcttcttttcataaagagactgtgcaactttaagaactttatctgatgtccatcccttatatttactagttatatgtccctgcagattagataaattaaataagtatggtggatattctttttttaattctgtctgcttatcaataatcttagcagttgctccttcaagccttgaaataaatttatccaaatcttcctttttctcaaacttttcagaatcattctcataataaagtccctcaaattcttcattggctgaagttttgaagtttgacactagcttataataagttgttgctgtaaaattctctatttctttatctctatcataaataatctttaaagttggaagaagcactcttcctatattaatagtcttgttttcttcaaatttatatttcagtgtacttacagatgttaaattaattccaattatccagtcactccactgtcttcctattccagcatcttgcagtggctgcatttccttattatcttttagtgattccattccgcttttaacttcatcaggtgtccactcgtttaaaagtaatctatatataggctttttcaccttaaaatagccaaacaattcatcagctataacctgcccttcccgatcgaagtcagtagctgatacaatgccatcaacatcttctttatcaattaaggattttattattccaagctgtttctttgcacccttatcttcaacagttctgtctacactatcacatttaaccttatataaaaaatgctctggaatgaaaggaaatttctcaaacctccaccccttcatattttcatcatagtcttttgcatcatataattgtaaaagatgcccaaacgcccacgttatgtaatagccatttccttcaaaataaccatctcttctagtttttacattaaatgcatctgcaatatttttagcaacagatggtttttccgcaataataacttttgccatgatatattttattatcctcctttaagcacaattaaaaaaataatggaccatcatatctgcatgttctgcactttaggtctattatttcctttcaggtgccttagttattacttgtagcacttatatatattaacactaatcaaaaaataaaaccagctgaagttctttatgtaaatatcaggtatcaaaaatagacaaatactctcatattaattatttcctttacatattaaaagaaggtataaatgaacaaatcatttataccttgcatctaaattattcaagcttttctcactaataatattttaacttattcttttctttcaatacacaatgctttatctgcttctttaagcatgttttctataacttccattgaagaatatcctaatttattattaaatatttctgtaccgcatactaaaaactcgcttcccaatttaatggctgactttatagtttcagtagtaattccgccttgcatctgcactgttccatcaaagtttctagtaaaataattaatgtaatctgctatttctttcgaattcaacatcccaaatgaattacttgaacgtgcacctgtagcctccacttgaaatgttaacattccaatcttatcttgaaatggcgatataaattccagtatttctttcttagttttcggaataaatctatccgttccgacaacctcaatcacagggcttacgcaagctcccatttcaattatctcatctataatttcctttaattcctggcgatctttcactacttctagctgaaaacatacagccccaacatttatgtgcttaatatcttttatatgaatcttaggataatccgtaagtaaatgcacattcaaaaatacctcatataatccggctatcgtatttaatctttcaataaagcttatgttaaaaatatgagaattaacgcttggactatcacttccaaaattgctataatcatcgaagtttatatccacatgtaatgtttttatattaccttgttttagcaaaatttctacttcttcaatcaccttaccttgaattgtatcaatatcaagtgattcatctaatttatccagtatagtaattaatgcagggtttatttttataacttttccatttataacatcttttttgttataaaatcttaatgccgatgtcccataaaaaatttccctattattcttcattaaagcctcccgctaatttaagcttttattagtttattcttataatttatcccaaattggtaatctttaaatatctactctatttcttttttctcctctattatacgcacttatattttctaataaatctgaaaacaacctacttctagcttcttcacttgcccacgctacatgaggtgtcaaaatcagcctatctttattttttacttttaatagtgagttttctactggaataggttcctctttaaatacatccagagctgcacctcctattatctcctcatctaaagctctagctaaatcttcatccacaattataggacctcttccaacattaattaaaacagcatcttttttcatttttgtaaatgcatcatagtttaataatccttcagttttttcatttaaaggagcatgtattgaaataatatcacattgctttaacaaagactcaaactccactcttgcaaaatctgaatccgaattttttcctgaagttgaatagtatactactcttgcaccaaaagcttgagctattctagccactctttttccaatggctccaagtccaattattccccatatcttaccacataaatctttatatggtaattctaaatttgtgaacatatcatatcttgaatactctccagatttaacaaagttatcaaaatagcttatattatcgtataaatgaagtaacatagcaaaagtatgttgagctacagtcgtagtcgaatatcctcttacattagttaccgcaatatttctttctttagcatattctatatctatattgttatatcctgtagccatttcgcatattaattccaattcgctcgcatcttttaaattttccctgtttaacttaactttattagttaaaacaatattagcatttctaattcttcctgcaacttcttcttcagatgtcaaatcataataaatcacctgtccaaactcatttaatttaatatagtctacatttcctaaagttcttccatccaatactactattttcttcatactcaatctccttttccaactttaaaataatcctatttactctataatgataaaaaaagaagttctcaaaaattatgattttacttgctaactttatgaatacataccttatttttctatattaataataccgtaaacaaatttaaatgtaaacttatacgtaattattttacaactcaaccaataccgtattcatgtgttaaaaatttattttaagtaattaaaaatgactataatacgtaaaaaaaataaagagttatggatataaaatttttcgctctccataactcttaattattttattcttaaatcaataatcatttaataggggctggttttatataccaaatttcatctgcatattgctttatagttctatcacttgaaaatattcctgaactatatagattagcaaaacatttttgagcccatttctttttgtccttataatcttcaaacactctttcttgagtctgcttaaacgagtcaaaatctgcaagtacataatactgatctctttcctctaacaaagcattatataagtcttcaaagtatcccgttcttccatcgtctagtgtaccatcgattaaagtatcaactactctcttaatacttggattttctctataataccattttggatcatagtcatgcttaattctttcaatatcatctactctaagtccaaatatatagttattttcctctccgctttcttgaacaatttctatattagcaccatcataagttccaaatgttggagtagcattcaacataaatttcatatttcctgtccccgaagcttctttcccagccgttgaaatttgtttagataagtctgaacctggaaatagtttttgagcataagacaccctataattatgaacaaaaacaacttttattttcttagaaacttctgagtcattatctacaagtctagctatttcatttataaattttacaatccccttggctcttctatatcctgggaatgctttagctccaaatataaatgttgtttttggtatatctaaatttggattctcttttattctgtaatataaatctaaaatgtataaggcgtttaataactgcctcttatattcatgtaatctcttaatctgaatatcaaagaatgaatctggatctatattaattccctcttcttgtttaatataatctgctagttgaactttcttctcatgcttaatttccataagtctctcaagtactgcatcatcatctttaaatttctctagacccttaagaagctctaaatttttaatccaatcttcactttctaacaaatctgtaataagctcggataattctgcattgcagagcctaagccatcttcttggtgtaattccattagttttgttttgaaatttatttggatataaatgataccagtgatttaattcatttttctttaaaatttctgtatgaagtgctgcaacaccatttacagctctcccaacaaatatagctaaattggccattctcatctgattatttgcaataattctaaaattccatattgcaccttcgtcatatcctttttgtcttagctcattcattaatgcttcatcaacttgatatgcaatttgaagtattcttgggaataatctttctattaatcttatatcccacttttctagtgcctcagcaagtattgtatggtttgtatatccaaaaaactctttagctattgataatgcttccgaaaattctacatactcttcatcaactaatattcttataaattcaaggattgatattgttggatgagtatcatttaattgtgctacattgtattttacaaattcagaaaaatccgccccaaatttagccttatgtttttttagtatatctttcatagacgcacttgagaagaaatattgttgcctaagccttaatatctttcctgcctctgctgtatcattgggatataatactcttgatatatcctctgctttatttcttgctgatacggcttcaatatattgttggttattgaacagattgaagtcaaattctcttaaagcctcacattgccataatcttaaagtatttatatttttagttccgtaaccaattataggtacatcgtaaggaactgcttttactgtcatatctgaatatctaattatttgaatttcatcatctttcctaacactccatgaatccccatattttaaccatgtatcttcacattcagtttgaaacccattttcaatattttgtttaaataacccgttgctatacctaattccgtatccaactaaaggcatgtttaatgtcgctccagattccacaaaacatgctgcaagtcttccaagcccaccattaccaagtcctgcatcttcttctatttcttcgattctatttaagtctatatttaactcttttaaaacatccttaacttcatcgtataaacctaaattcattaaattattacctagagctcttcccattaaatattctgctgataaataatatgccattcttcctttgttataagtttcacttgtttcattccaattatcaattatctcctccaaaatagttaatgaaagcgcattaaaaatttcataatcctgagcatccttcaactttactgcatgttttacttttaaatatctttctataccatttcttattctttgtttatccacacttactcacaccttccataaattctagttaatctatatattttatttgctaactcattagtaaaaacaccgtcttttgctctccatgtccaattttctccaatagtagacggtaaatttattctagtttcatttccaagatttaagaagtcttgcataagtgcaatagatgtatctgcaacactgctccatattcctcttataaatccccaattatacccttctttttctgtaagatttaaatattcaactgcattctcaacttcattcttacttcctgtcgtttgaatccagccttttatagtatcattatcatgagtccctgtatatgccacgcaatttctttcataattatgcggtagatatggattttcacaatcacctgaaaaggcaaatgctaataccttcatacctggaaaaccagtctctattctaaattttatagtatcttcagttaatagacctagatcctcagctataatctctatatctccaagttcttttcttattgcattaaataatttcatttctggtccttttacccattctccatttacagctgttctctctccataaggtatggaccaatatgcctcaaatcctctgaaatgatctattcttattacatcataaagctttaagctctgcctgattctatttatccaccatttatagttttctctttctaaatactcccaattataaataggatttccccaaagctgcccagttgaagaaaatgcgtcaggtgggcagcctgaaatttttattggagttaatgtttcttcatctactaaaaatacttttggattactccacaaatctgcgctatcctctgcaacatatatgggtatatcacctataattttaattcctaattcattaacataatttttcaagtttgtccattgtttaaaaaattcgtattgaacaaatttccagtattgaatttcatctttaagttcttctttatagttctttaaaacatcatttttccttaatttaatatcagcatcccatgtttgaaaactttttaggtcaaacttattctttaaggccataaatgtagcatagtcatcaagccacatatcttcttctttttcaaaattcttaaaatcctcagattgcttctgcttaaaattttcatatgccaattttaatactttcaatttttctttaaataacaattcataatttatacgctctggattatcaccaaaatttatttcatcataatcggactttcttatcaaattttcagactctaaaatatcaaaatcaataaaataaggatttccagcaaatgccgaaaatgactggtatggtgaatccccataactagtctgtcctaaaggaagtatctgccaaaaactttgacccgctttcttcaaaaaatccgcaaattcatatgcctcttttccaaatgttccaattccatatctacctggcaaagatgcaatatgcataatgattccactacctcttttcattctcattcctccaccctctaggaatataataataacttaaattattatatatattatttccctttttaatattctttagatatcaataaccattactttaacaaattgaagcatgaatccctctcaattaaattagtttctaataatatgtgttggttttcttttctttcattaatctgagatattaataaatttatactcatagttgccattagcttgtccggctgttttactgttgttatactaggattataatattcactttcatccatgccatcaaatccgattattgatatatcctcaggaacttttaacccactatcaagaattgctttagcagcacctatagccataatatctgaaagagcaaaaaatgcagtaatatcctttcttattttcaataattccagtgtttcattatatgcgcctctgcttgaatatccaccaacaataattaactcatcatcaatttttattttacttttttctaatgcttccctatatccttgcattcttaatatgcttacgcctatatcatcagcttctcctaaaattaatgctatttttttatgacctttttctatcagatatgaggttgcatcatatgaacttttaacattatctataccgacagatgaataatattccttgccttgttttgaaacagtattgacagaagttagtactatagggacatttatttctttaaaacagtcatctgtaatatcagcaaaattaccgcctaagcagataattccttgtaatttcttctcttttataaaagctattaaagtttcaacctcttggtcattcttataatcattttgatgcaatatcattgtatatccattttcatttattatatttcctatgacattaatcatttgagaaaaaaatggattgaatacgccttttactaaaactcctatattttttgtgttttgttgttttagtattctagcactattattaggtatataattactttcttttattaattccaaaatcttttgtcttgtactttctttaacatcaggatgattatttaatactcttgaaacagtgctgactccaacctgtgctaattttgctatatcctttatattcatatttatctcctgcatcactattaaattataatagctcggtatcgttaccttaatttcctgttaatttaaaaatcttgattaaatagatatttaagcatacaatattatattcgttttattcgtaatcatgtttatataacaattcagttatttaattaactttaataacattttaacaaacgcggaatatttatacaataaattcctgaaattatattatattttcttaattttctatttatgattacataatggctgtcttattaagtatttttttgtaattacgatacttataaaccaacaatttttttatttattcttacttgtttatatttatatgactaaaaataaaaaatcttatctgaagattacttttaacgatcttcagataagatttctagctatatctattaaattttattcttttgaatccaaataaagaaggctatcttgaataatgcagcatcattaaatttccttatatcgtaacctgtgtatttttgtatcttatctaatctataaattagagtgtttcggtgaacatacaatccttttgaagcttcacttaaatttaagtccgatttaaagaaaacctctatagtttttaacatatcttcatctaacttcgaaaaactttcattaaagttatttagtattttttccttaatatcctgatttaaattatccataacttcttcaaataaaaggctgttacatccaaataccatttgagatacattatactttttagctaaattaattttatacatattttcattatataacttgttcaataattcataatccccaatatgacaataacttatataacacttttcgtaaagtgagaagtatattgtttcacttatactagatacatgctcctttatatcttcaaaaattccaattaaaatgattgtatcttcaaatataagaatggttacatcattattattataaacattttttaacgcctctaatgcctctgttactttttcttttaaatttaaagtaactaaaaatgtttcttcttttattggcggcataatttccttaatcttttccttagatatacttaagccttgtaataactcagaaactattttttcttttttgttataactatctttatacctatctttgatacaaaatactaatattcttatgaaatccttgcggtccccttctgtttttattttgaaacttttgggtccaataaaaaatgtatcttcaagtatattttcgctaaaagaattaggattagccttaaatataatttcatcgtccacataaacttcaaatggtatttcacaatcttcatatatttcttgtaaatatttcactaatcccttcattccctcacctcaattgtcactaatttaatactagcaaattctcaactctgtttctttgtcaaaaacatgaatattttcatgttctacatataatttaatcttgtctttaggttctgctttagtacttccatcaactcttgcagtcatattattatttcctgacttaaagtaaatgtaactttcagcacccatacgttcaacaacttctacatctccagttaaagttgctgcagggttattttcaattatttgagcattatcatctaaatgctcaggtcttataccaaatactacttccttattaacatatcctttttcttttaatactttagctttttcttctggcaataatatattattttcatcaaatttacaatataactttccttccttttcacttacaataccatttattaaattcatttgaggacttcctataaagcttgcaacaaataaattatttggcgtattgtatatgttaagaggagtatcaacttgttgtattacaccgtccttcattacaacaattctagttcccattgtcaaagcttcaacctgatcatgagtaacgtatataaatgttgttcctaaactttgataaagctttgatatttctgttctcatttgaactcttagtttggcatcaagatttgataaaggctcatccattaagaatacctttggttctctaacaatagcacgtcctaatgcaactctttgtctttgacctcctgataaagcctttggctttctgtctagcaaatgttcaatatctaatctctttgctgcttctctaactttcttatctatttcatctttaggtgcttttctcaatttcaaagcaaatgccatgttatcatacactgtcatatgtggatataatgcatagttttggaaaaccattgctatatctctttcttttggttctacatcattaactaattttccacctatatataattcacctttagatatttcttcaagtcctgcaatcattcttaaagttgtagatttaccacaacctgatggccctacaaaaactataaattctttatcttcaatttctagattgaaatcttttactgcagttacatccccttcataaattttataaatatgtcttagtgacaaatctgccatatttatttcctcccttttctgctttaattatctcaatttatattttatttaatgttttctgtatattcattttactatatgtaatcctttatattctatattgagaatttacaaaactctcttgtcttttttgtgaaataatataaaaggataataaaaaaagcatatactaatcaaaactagatatatgctttgcttataatattttaatgtttatatacaacacttcgattaagcagtaagattatgttacaatcccttaaataaaagcttatttataatatccattaaatgatttaggatatttttctctatcccaagtataattattttcaattaaagtactatctccaactaaaaagtacttattcttatcacttgaatcattgttagtaacatctatatgataccaattaccttgaatttttacagcattccatgaatgagaaacatccttaattttcccgactacaattctattttctattcctgcatagttaaacattctataagcagtcattgcatacccctggcatacagctaatgaggtggtcaatgcagaataaacacttgtagattttagagtataatcatattcgtatctatttataatatactcatttatagcctgtactttttctaactctgacatatccttattaattaaagaattagtaattctctttaattcattatctacataattttcctgttccttagttgtcagatattttacatctaaagttgtctcgataccattttcagtcacctttgctttaggctttatctctagccaagatctctctaagtaatcatcttttgaatatgcatccttaatacaattacttatattctcttcaaattccgaccttgcccctgtatataaaatagtaaaatcagtatctctattttcgagatgattataaatatgattttccatactcttcatattattaactttatcatacgcaaatgcagttacagttatagcttgtataataacaactgctatcattattgttttgaaaaactttttcataattaatatgttcccccatgtcatttcaacactttcaatttcatcatatgtagaccaaactcgcttgcgactctgactcttgagattttttactcagctgccttttttaagcatatgtgagagaaatctgccaagcgaatatattttccttttgaacgtaaattttaaatcaatctttttcataatttatactcacaaaaggcacaatattagcagattatctaataccatgactttctagagagtaacaaataagttatcattacttctattgtacttactttattcattttgtaaatataaattaatactttatttatattttgtttataaattgttgacttttccctattttcctttcatttatgcacaattgacaatctttatttatacatatatattataagttatatatatgctaagggaggtatacaaatcatgaacaaaccaattataggcataaattcaaacagagttattaaacatgaaactcaatattcgcactcagttgtagaatcacttggcaatgattatgttgaatccgtaattaaagcaggcggtgttccaattatacttcctattctttctgatgaagaatccattagaagacaagtcgaactacttgacggcatcgttctttctggtggaatagatataaatcctttattatataatgaagaaccatcgcctaaattaggttatatttaccctgataaagatgagtttgatctggcacttgtaaaaatagcttatgaacttaataaacctattttagcaatttgtagaggtcatcaaattctaaatgtagcttttggcggcacattatatcaagatttatctgatatgagtggttgttatataaaacatcatcaacaaacaaaagatggagcggctagccatactttagaaattattgagggctcaattttatatgagatcttgggaaatactgcgctaattaattcctttcatcatcaagcaattaaagatttagctcccggttttaaagttacggcttactctaaggataaagtgattgaggctattgagagttgtgagaaaaattttgttgtcggtgtgcaatttcatcctgaaattatgactgcttataacgataaaaatatgcttaaactttttgaagcttttataaatgcttcatataaaaataattcattagatcataaaaaataatttaaaatccctaaattcaagttgcgttatgcaattaaatctttgtatacttgcctttcataagatttactttagggattctaatttatctaaactataaaagaatgtacctatattatactataaatatggagttgcaatttatcgcatattttgaaacattttcagcacattaagtattccatacccccatactggatttgggtataaatctccacttctttgaactgcacctctttgaatatatgtttttattgtttgcgaatatatattagggtcatttccttctacaattccccattgaaataacatagcgcaagcccctgctaatatagccgctgatacacttgttccattaacgatagccgtttgattattaggtgctacagttaatgcatttatcccacctgcagccacatcaattctattaatatagtcttctaaaaatgctattccagaataatctaagacattattatttagctgattgtacgctgctgcagtaatcgtatattctgaacatgctgaattacttatagtcccataaggatccgaagcaataaacctagttcctccgatactaacaccttcttgtggtatccatgcattaaatctaccatttagaattgactgtcctgtcagggtaaaacgccaaattccttctgttatatttaataaccttactctcattaactgatcacctgtgtattcttctggaacataataatttactaccattgaagtggtttcaaatacaaatgaataagtttctatagccgttatttctgcatttatagttccagtactttctcctgatggtgatattatatttagtgtcattatattaggtgattcaacccaaatatcaactattatatttttttgctctggcgatatatatagctgtattgttctcgattcattaacttgagatattgtacctgatgtatgagttccacttgcgccttggtttcctgaaccatttactattgcaattccactactttgagatattaaatccatatattgctctaaaaaaccatttcctttatgacttcctagattactttctaatggcatatatataaccataggcttgttattttctagtgaatatctatttaaaaattctagtgctgaaaaaacggataacatgctgtatataggtatttgtatattataccgccctttataagcaatattttcaagaagctttaccacaacaaaatcgcaatctggaaccatccccttcaaattaggattttttccaaccgctccaattatccctgccatatttgttccatgacctatttcgtctttagttggaactatatcataaggagattgtcccgccttaaaagcatcaattgcttgttgtattgtacttctattgtagacacttccaaacggaactccattctctcctgtttgctgccctgaatttatagtttgatcccaaatatactctattctagtctgaccattttctcttataaattcatcatttaaataatcaataccagaatccataatcgctacatttactcctctccccgtaagtcttaatggcaattctagttgcaaaaaattagcttgagatgcttcaattggcgaaacttcttccagcgtaaatatatctggaaaagccctatatattacagtagaaaaaactggaaccgctgtacctgtatcaagctctacaggtgtagataatatggcatattgattatcaattatagttgcatagtaccctggctgttttgaaacttcctcctcaatgttaccttcgtattgaactatataatgataataatttacatcagaaaaaatatttattggagctctaaaaccttccttcatataaattttccatctcctgcctttggaattcttataaataatttatttatataatactcataaaactcataatcttcatttgtatattttttatcagtaatattcattctaaatctttggttactattcctatacaaaccactaattatattgaagacacctagtaaatcaaaatcaccatatcctgtttctctactgggatatctgttagctgaatttctgttagcaccatacattatgtatgttctaatttttttagtatacatagtcggatcattacgatctacaatcccccattgtaataaaagcgcacatgctccaaccactacagctgtagccgcagaactacctgaaaatgttgttactcctcctccaacttttgttgttaatatatttacccctatagttgaaatatctgggttaatcaaaccattagtattaaatcctttaccagaagctgcaattagtgcattattatttccataataagatactgtaataacattaacagctgttgccggtattgttagagtagtaaatggatccgattcaagaaatattgtattttctggtaaagtacttttgggaggcaaccatatgtcatacctaccatttgttatatattcgcctatcaaattgaaagtccatgttcctggttttatattactaaacgtaagacttattacttgatgtcctgtaaaatgttctggtgaatagaatcttactatcatatctgtatttaaaaaaacaaatctgactggttgaactttatttattttcgattgtataactgctgaagcttcccctgtaggagaaattacatttattgatgcaatattcggtcttcgtacccatatgtaaatcggaaggtattttatttctcttgggattcttagttctattacttttgtatctcctacattcctgatataccctgatacatgaccttgagaatccccctcatttcccactccattgactacgcacaatcctctactatttccaatagatgttatatatcttgaaattaagttgttaccatcatgactaccttctgtacttccaacacctaagtagataaccattggctgcttacgttctactgcgactcttctcaagtattctactcctgctacaatttcagatgcattatatactggagtatatggaattccatttccttgtaattgccttttgaaattagtggattcgaaaagcttaacaataacaaaatcacttgcatttgcaattccttgaaactcagtattatatcctcttgctcctataatcccagcaacttttgttccatgtccaacttcatctctggaaggaactatttgatatggatctccattacttcttttagctgcaatagcgctattaatttgatcatttgaataagtttgtcctatatatacagcgtcactagtattattttgaatggattgatcccatatacttattattcttgatgtatcatcttctcttatgaactcatcatttaaataatctattcctgtatcaactattcctattagcacgccccttccattcaaatctagaaatggatttatctttatattgtttatattatctacagatgatggtgagatatcttgtaatacataaattgtcctaaaatcataaaatacaattgctggaacatcatttaggagcctatcaagatcattatttcgtacagatactactccgatattgcctgtaattatatccccacaagcataagataacttatctatttgttctttaaaattccctctatactcaatcaaataatttgccgaatcgggatcataatataaattacagtcacgtaaatcagacatatctaactcctaatattacttgcattaatactatgtatatttttatattgtttatttgatgattgaaattatttgttcacctctaaattaataactgtaatattccttaatatttaaattaaatttttcatcattttataatttccaatgaaataatcacaaaaagcaataaacattttattccaatgcttattgctcaaaatacatctaatcatctattattttaaaagcttaatctaaacctttatattcaaaccaatcaacatcattaaatattttcatggaaattaatacaaaaaaatagccttcggaagaatattggaagaaatcatcattccataatgcagacaacatcaaatatctatgctcacgtgacaaaagaaatgaatgctgaagctacggatgttttatcaaatgttttgtacgcaaaaaaagcaagggaaagttaagggcaaataccaatccagtattcctcaaatccttgcaattacttgttgcgagataagccataagccgagttctgtattccaatttatgtatattttttcgtactttatcgtatcttattatactctctagctattgatataactagcttctatgtgtatagaataatttaccatatcaaattctattttattatattttactgatggtaggaagaatgtcggaagtttttattcttccgaccattctctcaaatatatatttagataagatattcacatttttgaactattctagtattaaaatatgttctccaattctttacttctaaacggtactttatattacactatcgtctataagtaaaatataccttaaattaaatagtagcttcaacgtgaggcgtgtgttgaatagctttaccaaatcataatttaaagtatttcattatatctatttatcattgaaaacaactcaaaccttagattaaaaatatcctatctttacatattgtattttaaaataatatagcatatcttgttgatggtcggaagaatggtggaagttttaattcttccgaccacttctttagttaagtcgtatcaatacttagcaaaagaattatattaagaaatacaactgttgctctatattttattcttatttatctttattttacctccaatactcccttttactaaatttaaatataaagctttatttttctttttggtacgtgtttatcctaattccaaatttctcttcactccaagaagaaatatagttcttattttttaaatttttagctaagactttattctcatgattattattaagtaatggttttgatgaatagttagttatatcagaatatttaccaccaattacatttaataatttaaacgtgatatttttatctaaactatctatattcttatttaagagcattacttttgttttcaagtgtatatcactttttataatattttctagtattacatccttcaattttattttatcaatttccattatacattccataatcatatcgactaaataattatcagatataatttccacatcttcaatatgctcgataataaaaactttataattcatataaatttctgattttagtagtttctttatatcttctgcatccaattcatacttttcatatttctcaacatattcattaatgttattaactaatagcttaatatgttcattcttaaagttattttttaacattatataattttctggagataatatgagtattccttgatttattagtatattaattttatcctctgatgaatcttttaattcttcaaattctgtgtacttttctttaatgcttttaattagctctttaaacgcatcaattgttatctctttacataaaataattttttgtgaaatagaatctactacactgttatcaaattcgctaatttcacttaatgattgttttgataaaatcaaataattattttcttcattaagaaaattaataactatttcatctatctgtttattgaaatgttcaaaatagctaattatattactccaactaatctttattttacaattttcaataagtctagcccacaataaatggatatttactttattaatattattaattataaattttgtttcacttataattttatttttgttttccacttcaatatcttcattattaagtaattctattattattttctctgcctcactatcattagcatttaattttaagaacactttttcaatatattcgttgatatttttatcaatatattttattagttcctcacatttactatttttaattgcagtataatttgctcttcgaacgttatatatactatcactagaataatggttcatgataacataaatcatatcttcattaatttcatacatatcatttatatatatatgatttaaaatttcattttcatgattcaccttatccatctcgataaagactacctttaacctatcaagaatcataattatcttttcattatattcttcatctgttactaaccttagaaaatatggtaaacttgagatatatcttgttaatatttgatttacgttcatatttactatgtcatctatatccgcatatttaattatatcccttaaaaacatgtccattttttctgtaactaaatttgattttagttgtatatatgtccacatatgttgccacttcttacataaagattttataaatatctcttttgtattatgatttatttcatgacaatatatatagccatctataaaagaaaaactactttcactttcgttagctaattgatctattaacaaaccataatagatttcatattcataattatcttctatattttctataagataatctaccaacttataatttaaaatatatttacgtgtaaattgaaaatcttctattttatctaacacaaattgaggcttttgtagtttatattcaaaactcatatctttttcatacattacgt

SEQ ID NO: 26 - DNA, 68624 bp, Clostridium beijerinckii
tatatatatgttgcaattcacaattcacaattacggctaaaattcttgcaatatttttagaattataatgaagaattatttttgcaatatatatattttgaataacaaatttacatttgaaattttcttaagttaaatgtttcacttaagaacaatatataagagctaattaaaaatatgtatattataaaaatataaaacaagcatagctaaataaatttaattaaatttattgtttagctatgcttgaattatttcttatttatagttttacaagaaaaatataaaattcataatgttttttatcgggctatacacctttttcgaataagtttttaatattatattttatattgtcaattatattgcctttcttcacatctctatcgcaatatatatctacttctcccactttttcgctacccaaataaacttcacattttccaactatatctcctgctttgtattctttttgtagttcatctataacaattttcttatctaaatctttattaccacccttaggaattataacatttaaatcatcttttgccattgccataaagaacttatctgtttgttcatccatatatactttatctatttcttcatctttagatacaagttttttaccttcatactttgagaatccataattaagtaaaacacccgcatcacgatttcttattttgtaagttggtgctcccattattacagatagcattcttactccatttcttgttgctgtagcgctaatacagtatttagcttcatctgtaaatccagtttttagcccgtcacatccttcaaaaaacctaactaatttattgtggtttactagttctattggagattttcttccttctgatatattatccatataagttcctgtgtatttcaatacctttggatgtttcaacaactcttttgacattattgctatatcttttgccgtagacatatgtccatcagctggtaatccattgcaatttttaaatgttgtattaaccattccaagctcttgagcccttttgttcatcatattaacgaagtcttgttctgtccctccaagatattctgcaagtgcaactgcagcatcatttccagacgctatagctacacctttcaaaagttcttcaacagttcttatttctccagtgtctaaaagcattgtacttccgcccattttcttagcattttcactacaagttactttatcatctaatttaatttttccactatctacagcctccattgtgagcaacatagtcataatttttgttacagatgctggtgcaaatttttcatctgcattcttttcataaagtactttaccgctcattggttccattaataaagctgatcttgcttcaatattagttccatctgattttactttttcatctgtatctacagctttggctaagttaattggtaaaagtaataaagtaaaaataaatatcaaagtaaaagatataattctttttgcattatttttcatagttactgcctcctttcaaaattagtgttaccataagaagaaataatataacaagtaattctaattttcttaacaatatgacaatatttttaacttatgcataactaccgaaataaagggtataaatatatttaataaaaaacttctagtaactttaaattactagaagcttttttactatttatcaaattttatatcgcctaataatgcggcaaaaggattatcattaaattcctctgcttctttcttcattttcttcatataattattcacttctcttttatcaatctttccatttttctcaaatctcttcttaaattgagaagctttttctctaaaattgcagttactgccagggcatacgtatattgctccctcaccatttcctcttagttccaatttcttcttgcactctggacatctagcatttgtcactctagctacactttctctatatccacattctctatcttggcagacattcattactccatttttacctttaacctctaatagatacttgccacaattaggacacttctttccagttttattatcatgaacaaacttattatttgtacctttaacatcttccactaaagcaactgaatagtttttcatttcttttataaatgaatgatcatctctttttccttttgatatttcatctaattggctttcccatttagccgttaaaagtggtgattttaaatcctttggcacaagttccattaattgttttccttttgacgtaggaattatttccttgccctttttttctataacaaatgaattaaataatttttcaataatatctgctcttgtagcaactgttccaaggccacctgtttcacctaaagttttagcagcttccttggaaacattaatatatttatgaggactttccatcgctgataaaagagtagcttctgtaaacctagctggtggttttgtttcacctttctttatattaacactctctactctaatattgtccccaatagacactgtaggaagaacttgctcttttatttcttcttcatcactatcttcttctaatctatcataaagctttttccatcctttagctttaataacttttcctttagctacaagcttttccccctgaacctctacctctattgtggtttgaatatattcaaagggtggaagcataacgcttaaaaatcttttaaccactaaatcataaatttttctttcttcagatgataaaagtgctaaattaggcttttgttctgttggaataatagcatggtgatcacttacctttgaattatctacaaaactcttattgccaattatttttcctttaagtagttcttctgctacaattctatattctccaatagaaattgcttttaatctatcaggaatagtagccacaatatcagtagtaatatatcttgaatctgttcttggataagttaatattttataattttcataaagcctttgcattatgtttaatgtctgttttgcagaatatccccatattttatttgcatctctttgaagttctgttaaatcataaagagctggagaaaactttttcttattggcttcatttatatttactattttcccctctgaattttttagttttgaagctaccttattagcaaattcttcatcaaatattctcgaattattgtctttatttacccatgctaagttaaatcccctagtttttccttccaaagtataataagtttttggtttaaaatttcttatttcatcttctcttaacacaatcatagataatgttggagattgaactcttcctgctgataattgtgcattatatttacatgtcaaagctcttgtcacattaagtcctacaagccaatcagcttctgctctacatactgctgctttataaagatttttataagctgcacctggttttaaatttctaaatccatctaagattgctttttctgtttgagatgagatccataatcttttaagcggctttttcacccctgatttctccaaaatccacctagcaactaattccccttctcttccagcatctgtagcaattacaatatcgctaacatcatttctcaataattgtttttttacttcattatattgtctccctgttttttttaacaccgtaagtttcatatgtttaggaagcattgggagtgtttccattttccactctttatatttattatcatatccttcaggatccataagcccaactaaatgccccattgcccaagtcactatatatttactaccttctatatatgaacctttattttggttacacttaagaacttttgccaaatctctccccactgatggtttttctgctaatactaatgttttactcattttttctccttgtcgataaaaaattcaataataaaaatttatttcttatcattgtttattttctatacttaattttattttagtaaaatatatatttctcaaattaatcatatttattttacaaattttaagacgtcttatcgtttatttaattattctagtatatgattatcagtatgatttttaattactttatcattatacaacgtttttcttgataatcctattattttgaatcaactattctcagcttagtcattttaaaatcactaattctttacacccaccattatttttcaataattaacttgaatttatgattaaccctactatcatagatgcttaatgaccattttcactgtactgctatcatataaatataactcatatctacatagtctttgtcaaataattagttaattatttagcttataatttgttttaaagtaaaaactcaattctattcaaacatatttatgtatatatttaaatatactaacttaattttattataaatttatataataataactttaatgttcattaataaaggaggtttttatgggaactaaaagatggattgccaatgtagataatataaattacactatagaatattctaaaaattttttaagaaagaccctactagtaaataacattcctgtaaaacttcaaagctctaaaacttttggagttacacgcgagactacatttaaactaggaagtaaaaccgctattctggtaagtatagataataactgtgatattgctattaatggtacatacttagattcaggaaaaaactatgtccaagtaaaatacatgcctggctggaattttatatttttaggcttaattttacttatctttatactctcttacgatagtctatgttctgcactttttactttaacaggtttttattttcttataagagtaagtatagagccatctttaaatacaaggcagagacttctaatttgctcatttataacattctccatgcatttgtttttttggggtgttttatttgtattaatttctattttgtaatattttcttgcaaaaggattataaaatagaatattattttttataatatctatactaaatttaccacaattaatttttcttaatgtagacatactatatatataataaattaaaggagatgattttgtggacaataataataataaagattattcagaaagtaattttttaagaaatggtaacaaaactcaaaatcaatatgcgaaaagtagttacaatacaacaataaaaaagcctggaagaaatgaaagtggtattgaagctgaaaaaagaggattttaatttccgagccaaattaacatattaataataaatttcccctaaaaatctattatgctttttaatctaaaatagaagaagtttcatatagttaaatccttacaactatatgaaacttcttttattcaataagtacttgaaaatatataattctaatttaaatcatttataaatattatactcatctaataatcctaagattctttttaccgcatgctttgcatctttaggtaatctttccatagcttgttccctttgactttcatcactaatttgagctatttgaataactctttgctgaagtcctggcaccttgtttaattcagatacagctttattaaatttattagcaaagtcaggatcttgttgcattctttgttgaacattcatgattaattgataaggattcattaatttttcctcccataaaaccttctttcttcataatatatattattctgaaatactttaaatgttcatgagaaatttttaaataaaatatttataaaaacttaatcttaattttattagtttttttcatatataagctactccgattgactttaatttgttcgttattctacgatatttttcattattaataattcctatgctattgctgggtatgataacattaagtccaatcttaacagcacttcttgcagtcttaaaaatacattcattattatcaactccaaccaactctattttactcacttcattctttttcatgaatttcactaaattactatttctaaaagcacttgcaaattgtttttcaaaataattttgcgatactatcttaatcctcttatccaatttggcccctttagttcctacaagaccgtatccaaaaaacttcttataaaaaaaattattaggaagtacactagcaatataaattactatatctttatttctctgataaaatataattttcttatttatattattaataagattatctacatcttcaaaattaaatctctctttattacgctgttcaccaataaaatcttcttgagcatcaataattaaaagtgcttttttcatctatctcctcatcttccacataaatcatattatattttcaaaatctcttatgtaaattctaaacctcactttattttattattatcttaagtatttaattacttatttaagtataaataatagagacaataaaaataataatttctatttactctttagaattctagataaatataacaagaggcttcatataaatgaagcctcactatatccttattacttaattgtatagtggatgtttatcgcataaagtttctattctagttttaagagctgataaatctccatctctattctctattgcctctgatataaccgctgcaatttcagccatatcatcctttacaaaacctctagttgttatcgctgctgtaccaattctgattcctgaagttacaaatggacttcttgtttcattaggtactgtgtttttattaacagttattccaacggaatctaataaagcctccgcttcttttcctgttatgtctttgttatttaaatcaactaagaatacatggttatctgttccacctgatacaattttaaaacctctagctattaattgtgctgcaagttctttgcagttttcaactacattttctccatatgttttaaaacttggatctaatgcttctttaaaacacacagccttagcagctataatatgctctagaggacctccttgtattccaggaaatatgtttttatttaatacttgagcatatttctctttacaaagtattaacccacctcttggacctcttaaagtcttatgagttgttgttgttacaaaatcagaatatggcactggtgatggatgaacacctgcagcaacaagtcctgcaatatgagccatatctaccattagtaatgcaccaacttcatcagctatttctctaaactttggaaaatctaaaattcttgcatatgcgcttgcaccagcaactataagctttggcttattttcaatagctagctttcttacattttcatagtcaatcatctcagtttctttatcaactccataagatacaaagttaaacaattttcctgaaaagttaactggagaaccatgagttaaatgtccaccatggctcaaatccatacccaatacagtatctcctggttctaatactgcaaaatatacagccatattagcttgtgaacctgaatgaggttgaacattagcatgctctgccccaaataattccttagctctatcaattgcaatttgttctatttcatctacaacgtgacatcctccataatatcttttatttggatatccctcagcatatttattagttaaataagagcccatagcttccataacagccggacttacaatattttctgaagctattaattctattcctttttgttgtctaactagctctttctcaattaaatcataaatttctttatcttctctttgtatattttcaaaattcatcttaataaatcaccccaatatatttttgttccctaacgggcacgagaaaccactttaacatagtataaaatatgtacaagagtttcacttatattcaaattatatgttttcttactaaatttatcaactattttttatatttttatatttcctttagtagaatttgttatattttatattatcttatagattcagtctactatattaatatgcttaacttccaatgattttatccgctgataacatataatctttcattattaaatattatataacttactcctataagaattatttattatgtgctataattcatttgttataaaaaatatattggagaaaaaattatggacttaaataaattactcaaagtatctacattggctggaaaaataatgctagaaagtggtgctgaaacttatagagtcgaagaaaccattagtagaatatgtactgcctttggtgctcatacagttgatagttttgtaataccgacagggataattgtaacagtcacttattacgatgaggttgctacccttgttcaaagaattatttctaggggtgttgatttacataaagtagatttagtcaatgatctttctagaaaaatacaaacagaaactattgatataaatgaatttaataaagaacttacaaacatatcgaatagccataggtactctaacttaaccactttattgtggtctgctcttagcgcaggatgctttagtattatgtttggtggaaatcttaaagactttatttctgcaagcataattggtgcagtaataaaaatcattgttgttatatgccaaaaattaaatataaacgaatttttcactaattccttaagtggaggattgtgtgcatttttagctatagcattcataaaattaaatttatctaataatttagataaaactattataggttctattatgcttcttgttcctgggctcacaattactaatgcaattagagatactatagctggtgactttttatctggtataacaaaagcctccgaagcatttttagttgcggtttctatagctgttggcactggtgcagttttaagcctatttataaataacttaggttaattctaatccaaataataagctaatagaatatatttcatttttattataatatttaggaggttttatgctaacacaaattgcagtctcatttttagcatccttaggctttggaataatttttaatataaaaggaaagaatttaatatttgcatctataggtggtgctataagttggttttcttatctttatttaaaagaaaattatataggtgatatcttatcattgtttatatcctcaatactatttagcatatattcagaaatttgtgcaaggcttttaaaaacacctgtaacaactttggtaatttgtgcacttattccactagttcctggttctggaatgtactatacaatgtacgaaacaataagtggcaatataaaccgtgcagtagaattagggttaaatacattagctagtgctggaacattagcattaggggtaatatttgtatctactataacaaaacaggtaacaaatttaaaaaaagttaaagaaaaattactagaaaaataaattaactggattatttttctagtaattttttaatctcttttatttcttctcttaaatcatttaatgataattccaaatggtttatcttactatccatgtcctcttctgaatttttcttcttaatatcatttgttgatttattaggtttatttttgcttgagttagtattttgcgaactactacaaaacggattacttacattataacttttaggattaaagtatattcctggtcctccttggaaatattgctgctgggcattatatgtctctattacttggccaactaattgcagccaatttcctaatgcattttgaacattgaacggaagccttcctgataatatatttcccaatatctctcctataagaataaatagctgtggatctacatcttgaaatccgtttggaatatctctacattctgaattttcaaactcatcctctgttttatctccattgtcatttttaccacaactactatatccacaagctctcgctagattctcaaaatcattccatcccttaaactccatagtttcctctaaattgtaattactttttatcattatattatttatttttagcaatgttcctataataccaacagcaagtcatttctacttacttcatttaagtaaagatttataaaccaagtcttctttcaagctccaaaattccatctttaacttcctctataggaagattaccttccgctaattcatcgtaatctttttctttaagtctgttgtaaaatttaattccttctaaaataatgctaccatcattatcagtctttctaagaatataaaataaggtatcctctgctctatcaaacttattagtcagttcatatattctaaatattttcttgtctaaatctaaggaaagttcataattaattaattcatctgctacttctgttgcttcataaagatatttctcatttatctcatcatcttcaatataagccttataaaaaccttctagtgacttttcataatattgaattttagcgctttcattattttccttatcgctaataagtccttgaagtttcataagacttccaaatgctataaatttttctgcattataatgcgtttctttacctataaaactttctatgctgctgaaagaaaatatgtctatagttcctatatcgattcctacgagagccttaagttttttgtttattttttctttagcttctcctatatcaccctttactatatcctttcttacttcttcatttgttaatgttaaagtattctctatctctttcatataatcattctttatcattgagtcgcacctcatcttttaaattattagttaaatttgtatattcctaaaatataaatacctttgcatttaattattatactcataaaaatttataaaatattagattttctaatacatcacatttttatacatttctcatacaatataatataaaaagaatctcttacaactaaattatacggagaaaaacttgataaacttatgatagtatggaggtaatttatgaatattatttgtgaaaatgaacatgattatgattgctacgatactcgtcctagctgcacttattctgacaatcgtcctagttgcagatgttacaatcgtgccccagagcctggtagagctttactaaatgttggttctggtggagttggaccattgcctataatttcaacaccattatctagacctatacctgtagctagtgtttctctagatactactaacatgtgtaatcctaaagtgcttttaacatttactagcataatttctttacctgtagatattttagtaaatttaaatttcacattaataaaaacagttggtgatggagctcctcaaccaataggtggaacatttactttcgccgaaacagttagtgtcttagaatctgaatcatttagttttcaattttgtgattgcaatccagcttatgctaatacgacttatacagttcaacttgagccaactagcttaatttctgtaacagctggattaactataactaatgcagtattatcagctttagctgttgaatctctataattatagctaattatattaaagggagctcttttgagagcttcctttatttttatattttaaacgaaatttaatacccttaatatttctacaccaatttctctttccgtacctttataaggatagcaatgaatatgaattgcaggattaaaatttagttcgattattgagtaattagaattttcgtcgttaaaattttcaagcatcatgtcaactccacaaattcttgcgtttacagcatccgctgcatttacagctattattttaaacttttcaggaatactatcagtataatctatactatctcctccagtgcttatgtttgaattctctcttagataaacaatttcgtcttcctcagggatataattaaaatctttattttgttgctttaaaaataattctgcactttcatctaaaattatcttttcaagtggtgttacatagtgatgacctcttaacggatcctgattctttatttccactagttccttaatagaactgactccatcccctttaacattagctggaactctatgaagtattcctgcaactttaccgtctataactaaaaaacgatattcttttcccttaacaaattcttctatgagaactgtattatcatatttaaatgcgagttcaaaagcctttttaatactctcttcatcagcgccttctttaaatatacttatacctatcccaaaatttgttgattttggtttaataacaactggctttttagtaaattcttttattatattaaaagactcatttattgaatttacctcaattccttttggaaccttaataccactatcagaaagaactcttttagtcacgctcttattttccataattaaagcagttatatagctatcttttgatgttttagttgcctgcttaatatattctactttattattctttctaagtgatatgaaattttcgaatttatccaaaacttcaacttctactcctcttttaatggcttctttcattaatatttgagtagatagctctaattcttcatatccttccaatttaaatctgtttttataagaattttctttatatttttgtgctatatctaaatgggcattgatatatccttcttcttttacttttttttcaattttataagcatatgttagttgattattcttaattttttcgatcatcaagtcaataattctttcttttccaagattcaatttatcattaatatctcttatattatttaatatttctactccccaatgctctttggaaataagctctccatctttctttaataaaacatctttttgtcctagttttgaaattatattttggttttctgttccctcttcctgccatctatcatagtcagtttcttcattaattagcaaaaacaaattaaatacttgaagaaaatacagatcatctaagcttattcctcctttttcaaaaggattaatatcaatacttctatattctagatattggattccatctttactaagtgaattaaagaaatcacttggatcttttggtttaagccttacacagctatataattctttatggcttcctataagcttatcgcttacaaatctccttaaactttcaatatgctcatcaacagaattataattaggatatagatctattttattcttatacccacattcactatttctataagacaaagccccttcatttgaaaaactatcatgtgcaatttccttagatgaattcatacaaggtcccatatagcttttgtcaacaactccacttgctcctaaaagatagataataatccacctatacctcaagtaatttcttgtaacctttaagtataagttatttttaaactccttgtatctcaatttctgattttcattaaatattccactaaaaatcttatgagtgttctgtctttcatataaacagtataactttctcaagaaatcatcatcaaaggaaaaattataatggataccgcatataagctgttttttacctccatatttttttattaaattttctctgtaacgtctagcttctctacctttttcattgtcaccatattctgcaattctaattttatcatcggtaggtactattcccggcatagactgtggccataaatattcatcctcaatttccattgcagcaatatcatatagcactctagaaaaattatatgtttcttctatatttttaaatggtggtgttataacttctatttgactttcagcaaaatccgtagttatatatttgttttccactttctcaccaaacactgctggatgccttttaactgataactcccctttattatttactcttaaactttctctttctataccataattaccttttaataattcaaaaggtgtaaataattctttaagttcatttaacattgactgcctccccatataaattttatctatatattttattaattcctatttatattttcttttcacctcaattatatataatatataagctacacttccttttagaatactcgatatagaaatacttatccaaatgccatttaaaccaaatggttttattaaagctaaggccattggtattcgtagtgctgtaaatacaacgcttataattgaagatattttaggttttcctatacctgtaaataatccattagatacagtttctgtagtactaaataattgagaaaatgctactacttgtaagtacatattagctattgcaattgtttgctgatctttaacaaataatttaacaaatggtgtactaaaaaacatgaatataaatgccataagaagagaatatacaattcctatcttaagtgcagtgttatacccttctttgattcttctatattttttagccccaaaattttgacctgtaaatgcagctatcgcaccatgaagaccaccaataaccatatatgtaatagattcaatttgaagtcctattttttgagcagctattgcatctgatccaaatatggctattatttttgcaaggaatatgtttattacagtaaatagaattctttgtatagccataggaaatcctaaaattattatttcctttatcttattataatcaatttttacactaaaattatacctaagtgttcccgatgatctaaataaatataacaaaaacattataatattagcaatcattgttgcaattgctgctccttcaacgcctagttttacagcataaataaaaatcgggtctaatattatatttgcaactactcctacaacatttatattaaatgctaatttattatttccaaagctccccagtatccttgcatataaaagattaaaaaatgcaaaaattattgtaggtccactgaaaattaaaaattcatatgcatctttttcaactgcaatattatttatatttaaaaaattcacaagtgctcttcctaatataataagtatagacccaaaaataaacgacattactgcattaattaaaaggcccgcattaatatactcttttacctcattctcttcttttttacctatagaatgtgcgacttttattcctgttcctataactactaatgagtttatagaatatccaaggcctacgaaaaaactcgctgatccaacactcgctacagcattacttccaagtccgccaacccacagcatatcaaccagattatatgtaaattgtagcaatgaacttcccattattggtactgataatgttgttagaacattcaatgtttttcctttagttaaatcaatctgtctcatttcatctccgtttttataaatttttattatttttaataagtacattatatttagtatattataaagattaacaaaatcgtactttcatattaacttttaattagaatcttcatttttcttatcaatttgtacgcaatcctcattttctgtaattagattaagtaaaaacagcactaatctgttacaattacttgtgtttaacttgtacaagttccaaattccatcttttcttgctttaaccaacccacaatctattaataccttcatatgatgcgataaagtaggttgtgtaaattcaaagctctctaatatctcacacgcacatttttctccacaagataataagtctattatttttagcctattaggatctgaaagtgcctttaaaattcttccattcttatcatatttcttacacacatttaactcctttttcaatattagccattttactaatctatgtatatagtatagatattcatctatgtgtagtcaagattttttattttaatttgccttttaaaccgccatcacatatatacctatctatttgatgccataactctagctactgtcttatgttgataaatagtatattttaatctaaggtttccgcaaacataaatgctagtattattcttttagcatttctcattaatatattttactttctatagaaatatcgcttaaatcaaaagagccaagattttattcctgactctagattttctaatcaacattttatgatgttacaaagtataattttaatctatgtaaatcatataataaattttactactagtttcgcagctttaaaagtaagcttcccatataaatttcttaatataatttatgtaaaattgttcttcaaaaacattatacaaatatttgtttatctacgcatttactatttctccaccattaacatggattacttgccctgtgatatatgaagcacattgtgaagctagaaatacgtatgctccagcacactctactggctgtcctgctcttcccaatggtgtatccgatccaaatttctcaacctttttttcatcaaagcttgctggaattaatggtgtccagattggcccaggtgcaacagcatttactcttatattagtttttccttttgctaatgcagtagataaagatcttgttaatgtaactatagcacctttagtcattgaataatcaattaatgtttcatttcccttatatgcagttattgaagcagtatttattatgcatccacctgcttttaaatgatttaatgctgcccttgtcatataaaatgttccatatacgtttgtcttaaatgtcttatcaaattgctcgtcacttatttgcttgaaatctgcactttcatattgaactgctgcattattaactaatatatctatttttccatattctttaatagttttttctaaaacattattacaaaaattaggatcacttatatcacctttaattaaggtacatcttctccctatattatccattattttttttgtttcttctgcatctttattttcattataataagcaatcactatgtcagcaccttgatttgcatatgctatagcaacagcctttccgattccactatcgcctccagtaattactgcaatcttgtcctttaatatatctccttttttattataacttggatcatcatatattggagctggattcatttcatactccagtcctggttgttctttttgttcttgttttggaaaagatgttggaaaattcattttaattcctcctgtttttctttatttttataaaaattagtttttcctatatactaaaaaatatttatgtacaaaaaattaaacttctagtaagttagaaatttaatttcacttaacttactagaagtttatttataatacctcttattcatctattctctcaattgcgagtcctacaagtcctggtcctgtatttaccccaagcgctggaccaattgttccagctattgtacactcaactacattgggtaaatcttttatcaaacagtataggttttgtaccttatcaaaaccatttccatctaaaatccaggctttatatttacctttttctaaatacattttaaatatactggttaatttagatacagcttgctttgaacctctaactttagctgcagttctatatgttccatcttctgctacagttattattggcttaagattcaaaaactctcctattgttcctgccactttgccaatccttcctcctttttgaagatattctaaagtatctattgtaaaaaataaatctatcttctctctgtatgtaggtagaatttcaattatttcattaaatgttttaccttctctaattaaccttgaagtttccaaaaccattgcgccttctgccattgttaatgttctagaatcaaaaacaaaagttttcagctccttgaactcctcacaaattagtcttactgcattatatgttcctgaaaatgcagatgaaatagttattattattgcatgcgtaaatccctcactaacaacatctttcagaacgcttgttattttttcaatactcggtaacgatgttttaggaatttctgtttttaatctttcatacataaattggggagttatatcaattctatcctcgtattccttatccgaatatataattttaaatggcaaaagccttatttggtttgcttctaataactctatgcttatatccgatgcactatcagtaattaatgctattttttccacttattgttcctcctaaattaattttacattaaaatcattatatcactctctatacgtttatcaatatttccaaaacatttcgaaactaataccctaacttttaaaaaatctaatctttaaaatcgaaaaataaatcacctatagacaattttactttaacgggaataatgcttatttaactattacaccaagaaatcttgctagctcaactgcctgcataggagatacaatagcatcttttagctcttttccagttaacgatatgtccgaaatgttattttctctaaaatctacttttttaagaggagtattagtaaactcagagttagctaaatcacatccattaaatgcaacatacgtaaagctacattccaaaaacatactactttgcatatcacattcctgaaattttacattcttgacctttgaatatccaaagtttgagtatctgctaactgtatctttaaaaagaacctcttgtatactactatcactaaaatcagatcctaaaagcttgcaattattaaattctactctatgtatacttccatttgaaaaatcaatatttgataaatcacaattttcaaatattatatctactaagtctacatttcttaaacaacactccctaaacacaacattttcaaacttgcatgcactaatctctaccctttcttcattcatatattctagacaactattcctaactaaagtatttgttaaatatttttcatttatgagtttctctttaatgtttatattttcttctaatatactctttaatcttggtcctgatattttttttaattccgccatatgcattctccttaccccaaaattaattttaaattttcctttattataattcttattttatgaattgtgtataataatttactatacacaatcttgattttattttagtacatatataaaagagaactttaactaaagtaaagctctctttattgacggaaattaaaatcaaaccaaattgtcattcttatacaattcctcaactcgcgcccagtcaattaaattccatatgtttttaacgtaatctccacgtaaatttttatatttcagataatacgagtgctcccaaacatctattgttagtattggagtaaatccaaaacttagaggtgtatcctgatttgaactatttgcaactttcagcttaccacgtttatctttaactagccagccatagcctgatccaaatttatttattgcagtttcgctaacaagcttctttaacatttctagtgaaccaaaagtactaactatttcgttaagtagtttcccttcaggttcctttttaggataagggaaaagaattgaaaaatataaattgtgatttaatacacctccaccttgatttataacatcgcgataaatttttttaggtattttatttggatttgaaagtatttgctctaaggtttttccatctgtaaatttctcatatcccttaagcacattatttagtttatcaacatatccttgaagatgtttagtatagtgtatttttacagtttcttcatcaatgtatggttctagtgaattatacgaatacgttaattcaattttttcatatctcatatttttcctccaaactttagagaacaaaattcattttatattatagtatgttttaattgaataaatgttcacctaaataatcaaagtaaaaatttgaaatcctatcaacacacatgagaaaatctataattctttacagtacaaacttctcaattattatttctccttctttattgacatatgccttaatatctttacttgagacatctaatgtttttaatctttctccaaagcaaaaaactgtattgctatatgcaatttttgcagttataattcctccttgcaacacttccaatttggttgttacccccgaaggactcccaactattccaagtttaatatttcctcttgctgatataacgccccctctggctactgaatcatcacgtaaaaaaataatatcatttagtgctgttaaattagaaacatattgtcctttatcttttataataatatttcctgtagattttattaaagaatcctgacaatagcctatatatatgtctgctggaattatcatattatcttctaacagttctatttcattggttattaactcttcaagatttcttaaatcctctattgattctatttttgataagtttaatcccatcattttacttcttataaaacttactaaatcattattatcactatcttcacaaatactatgagttattatatttaaagacaatttaggtatagatttatacctgttttctataagaattttaaccaattcagaaatttttttagagttattgctagactcatttaacttttcaaccgcacttataagttttgatatgatatctttatattcatttaacttttccaaatacattttcttttccatatctacttgtccagtaagaacagttgatttaatcacgcttcctttaatattaatttctcctcctgccactatggtagatatgtcaacatttttttcgatagttaaagaatttcccgatttaactttcattccctctttaacattacctttaatataaacgtctccaacaaaaaatatattcccggattttatatctacatcttgaatattatataaactatttacactcaaaattccatttttagatgatggcctgccagttttagtggcaattatactatttccttcaactttacatccatcgcctatttttataggtctacttttcacagtctttttctttaatacttcaccacatatatttttaccatcttgcccatttttacctggaattatttctgccagaacttgtccttcagttatactagatatagaatatacattcctataatctatcttttcatttgagttttcattcactatcctcttttctccaatatcaaataacactttaatttcatttggcgtgtcatcaatagcactaataccttcagctattaacttctcttctccatttcctaatgcgcatgcttctataagatttttatatattattccatcagttatcttgttttgccttaatatttcctttatttctgttaatgtatattttttaggataatcttcctctaccttcatcgccttaagaatcaaatctttagccattggcttatccctaagtttatatacgtatgctggtttatattctacctttatatatccttccattttatccactgaaatattcactgatattttctttacttgttctattttctcccctatataatctatcttatcagattgatttatttcatatggtcctttttcactacatagttctccattaataaaaagtttgattttctcacaaggcctaattgttatctgttctttatatactttgcttaaaccttctattactactacatcaccattttctactttaactccattttcatcattattaattacattatcctcattaattacaactcttttcttagcaacatctttcgtgaaatcttccgtataatttagatgattattagaacttgaggaatataaatcaacatccataacttctatttcaacttttttattgataaatgaatgattgtccttaattattttatagtttaggtcttcctctgcaacatttaattcttttgaagcattatttaaacattcatctaaatattttccaacataagtcctattcatattcctcatctccttaacttgacattattccttaactaattataacattaatcgattacatttaatacttatttatacatattgttagcttttcttatataaattgccactaatctactaaagaataacaatatttttctttaataaaataaaagacttactcaattaagaataagtctataaaaagataattaaaatattgctttaattactctttctctatgtcatattttcaaaaatccttggtacattcaatatgccataaccccaatatggatttggagtaacatctccacttctcgccattgctccttttgcaagatatgctttaatagtttgtgcatacatattaggttcatttccatttacaatcccccattgaaatagcatagcacaaactccagatacgacagccgctgatacactagttccgcttactactgccgttgtgttattcggggcaaccgttagtgcatttattccacctgctgcaacatctattctatcagtgtaggattccaaaaaggccataccagaaaaatcaacaatattgttattattttgattatatgccgctacagttatagcgtatattgagtttcctggatttgttatagttccaaatggatctgaaaaactaaatcttgtatctccaactgttagccccttttgtggtatccaagcattaaatcttccattagaaatataattcgccagtattctgattctccatataccaggctgcaaattataaaatcttatccttatcaactcatctccagttacttcttctggaaaataaaaattaactctaattgaggtcttctcaaaaataaaagtatgatttatggtgtaattaattattaaactcaatatcccagaactttcccctgatggtgaaactatttcaaccgtcattatgttaggcaaatcagcccatatttgcacccatatatttttttgttcaggtgacgcttctaactccgcaaccccagcaccaggtgattgcgctccaacaatctgagttactgaaccagatgtgtggccgccagcattcctctgatttccagtaccagtaactaccgctattcctccattgcttgatattgcatctataaagtcttccagtataccttctcccttatgatttcccaaactacttccaagaggaaaatatataaccattggtttgttggtcgttaaagcatattcatacacatattgcaatgctgcaaaaatagcagttatattaaacacaggaactattacgtctggaaactggacctcatatgaaaaatctcttataagttttactactacaaaattacagtctggtgcaacaccccttaaattcggattctttccactagctccaattattccagccatattcgtcccatgtccaatttcatctctgcttggaactatatcatctggagatcctccctccctacttgctcttatagcatcatttattttatttctatcaaataataccccaaacggtacagattccgaaccgttttcggcattacttatcaatgtttgatcccaaatattttcaattcttgtttccccattagcatccataaactcttcgctaagataatcaatacccgaatcgataattgctacatttacaccttttcctgttaagttcaattgagatccggtttgtaaaaagctagcttgagacgcatctactggtgaaatatcttgtaaagtataaaattctgcaggaataacatatacaattgatgaaatatatggttcatttcccatattgatttcaacatcttttttaacagatacaacggcatatctatcattgattactgtaacatagtaatctggtattttagaaatctcagcttcaatatctccttgatactgtacaacataattatcataattaatatcatgaaaaattctttccatcaatatattttttttcatttaaactcctccatgtatctcttcggaatccttatgaacgacttctatatataatattttaatgtgtacaatattcagttcttttaatttatacacacttaactcctttatactatttatatttaataatatttatatatataataaattattcgtaaagaatatttataaaaaaaataacatatcaacttctgattaagaagttagtatgttattttctatttaatttaaattacaaccttttgtatttattactttttataaaattattgttgatttgctaatgttttataaatttctaacctttccttcgcttcagattctgttttctcgaataatttctctgactcctctggaaatgctttagcaagggatgcatatcttacttcacccattaagaagtctttaaaatcttcttttggatctttagaatctaatataaatggattcttttctccctttaatgctggattatatctataaagatgccaatatccacaatcaactgctttcttttcttcctcttgagtatttgacattcctacttttattccatgattaatgcatgtagaatatgctattatcaatgatggaccatcatatgcttctgcttctgctatagctttaatagtttgattcttatctgctcccatacaaacttgagctacataaacatatccatatgtcattgccattcttcctaaatctttcttcttcgtcctcttcccagatgcagcaaattttgcaattgctgctgttggagttgattttgatgactgaccaccagtatttgagtaaatttctgtatcgaatactaatatatttacattttcattcattgctatcacttgatctagacctccatagcctatatcataagcccaaccatctcctccaaatatccactgtgacctttttacgaaatattctttatcctttaatatctctttagcaatttcactattttctttttcaagaacttcaactaacctttctgccctttctcttgttccatccccaatatccttattatctaaccattctttaagaacagtttcagtttcctctgacatattactttcaagggcgatagcaacattattcgctattctttctcttattgttttaacacctaaatacattccatatccgaactcagcattatcttcaaacaatgaatttgcccatgctggcccatgaccatgttcattaattgtatatgccatttcatatgaccctgctgcccaaattgatgagcaccctgtggcatttgcaatcatcattctatcaccaaataattgtgtcacaagccttgcatatggagtttcaccgcaacctgcacatgctccattaaactcaagtaatggtctttcaaattggcttcctttaagagtgtatttatttagcggatttttaggtttaactctttccatatagtaattccaagcttcaatttgctcatgttgactatcttgtgatttcattactaatgctttacctggtgctggacatacttgtgcacaattaccacatccagtacaatcaagcggagtaataccaattgagaaatataacttttcatcaccttttattcctttagcatctaatacttttagactttcaggagccttttctttttcatcttcatttagtaagaatgctctaattgtagcgtgtggacatatatatgaacattgtgcacattgaatgcagttttctggtatccactcaggcacatttacagctattcctctcttttcataagacgttgttccagacataaaggtaccatcttgtattcccgctttcacgaaatgggacactggcattgaatcgccctctaacctattcattggcctagtgatttctttaataaattccggaaaattctcatcaagctcaattttatcgtctaaatcagtattccaactataaggaaccttaattttagttattccctctaaccctgcatctattgctgcgtgattcatattaacaattttttcgcctttattaccatatgatttaacaactgcttcttttagaaattttatagcatcctcaactggaattatatttgctattttaaagaatgcagcttgcattatcatatttattcttcctccaaggccaacaccttgagcaattctaactgcattaattatatagaattctatatgattttgagcaatatacctttttatagatgctggtaatctctcatccaattcttcaggcgtccaaattgtatttaatataaatttaccattcttttttagacctctaatcacatgatatttatacacataggattgattatgacacgcaacaaaatccggtctatcaattggatatctagatttaattggcttatcaccaaatcttaaatgcgaaactgtaagtcctcctgattttctagaatcgtaatcaaagtatccttgagcatacatatctgtattatctccgataatcttaattgcacttttattcgcaccaactgtaccatctgatcctaagccccagaatttgcacgatgtaattccatcaggagtagcatctatatgttcgaatgttcttaaagatgtatttgtaacatcatcaattattccaattgtaaagttattttttggtacatctaaaaataagttatcatagacagcagcaatatgagctggtgttggatcttttgatccaagtccaaatcttccaccaacaacaatcggagcattatccattccaaaaaatgctcctgatacatctaggtaaagtggttctccaactgaccctggttctttcgttctatctaaaactgcaatttttcttacagtctttggaatagccttcaatagtttatccactgaaaatggcctatataaccttacttttacaagccctactctttgtttattattatttagaaaatctacagtttcctctataacatcatttactgcccccatagaaattataattctatcagcatcatgtgctccataataatcaaaacaatgatatgatctacctgtaagcctagtaacctcggtcatatattgttcaacaatttctggaacatcatcataatacttatttacagcctcgcgcatttgaaagtaaatatcttgattctgagcagttcctcttataacaggatgatttggatttaaagctctttttctaaattcatcaagtgccttataatctaataccttaacaagttcttctggttcaattacctctattttttgaatttcatgagatgtcctgaatccatcaaaaaaattcataaaaggtatccgtgattttatagttgctaaatgtgccactccacttaaatccattacttcttgaacagacccttctgcaagcattgcaaaaccggtttgccttgccgccataacatcttgatgatctccaaatatacttagtgctgatgttgcaattgctctagcagctacatgtatgacacatggcagcaattctcctgctattttgtacatattaggaatcattaatagtaatccttgggatgctgtatatgttgttgttaatgcacctgcttgaagcgaaccatgcagtgcaccagctgctcccgcttctgactgcatttcaacaacttttaacggttgcccaaaaatattttttttcccttgtgcaacccattcatccacatgttctgccattggtgatgatggagttatcggaaaaatcactgctgcttccgaaaatccatatgacatatatgcagcagctgtgttcccatccatagttttcatttttctcattgtatttacctcattttctctttgtttctatattgttaattattaattctatcttcatttatagtattactaaaaaattttgatagtatgtatttttcaatgaagtaattccatgttcttcaaatgatagtataattttagatcaaataaacaaaagttataatattctcacttattcgtatgtttccaacggaaatacatgagagtattataacttttaaaatgttcaaatttatatttttcacataccacagctttcatatttaaaaaaatgggtactagctttttctatatttatataagaatttaaagtttttacttgactaaaataacattttacatttcgtttgattttaaataaggtctaggttctatactatctaataataattatttttccaaagcttccttcaaagtatgccatgctaaaactgcacatttaactcttgctggcatattagagatatttttaaaagccatagcatcttctaatgcatataattcttcatcatctttaatttctcttttaatcattccaataaaagtttctgtaagctttaatgcttcttcgatatttttaccttttatcaaatctatcattattgatgtagatgcttgagatattgcacacccttgccctgtaaaggctaaatcttcaataacaccattgtttaatttaagttctaacgtaatttcatctccacagcttggattatgacctttttccttaatatctgggttatctaagtttctcttattatgctttgaagtgctgtgttccattataagttctgtataaatagcatttaaatccatctaaattacctccatttcaaaaacatttcatatgttttctttgttgcttcaattaatttatctacatcttcctttgtattataaaagtaaaaactagctctacatgttgcgtttatacccatatatctcattaaaggctgagcacaatgattgcccgatcttattgcaacactgtgagaatcaaaaactgaagcaacatcatgaggatgaactccctctatgtcaaatgaaattattccacctctatggcttaaatccttaggcccatatagctttacataaggcagttcttgaaatttttcaagtgcataacttgtaagttctctttctatttcatctattcttttcatgcctatattttctagataatcaatggctgctgcaagccctacagcaccttcaacattttgagtaccaccttcaaacttagatggcagctctgcaaaggttgcttcttgctcataaacatattcaatcatatctccaccaactatatatggaggcatgctttccaaaagctctttcttaccgtaaactataccaatacccattggtcctaaaagcttatgacctgaaaacactaggaaatctgcatctaagtctcttacacttactttcatatgtggtacgctttgtgatccgtctacaattactttagcaccctttgaatgagcatattctataatttctttaactggattaatagtaccaagtgcatttgaaacatgtgttacgctcactagtttagtcttttcggtaatcttattcttaatttcttcttctggaatctctccgttttcatttacgtacatatattttaaagttgcttttttagctctagctacaatctgccatggaataagattcgaatgatgttctgcaattgaaataacaatttcatcgccttcattaatgttattcattccataagaggatgctataagattaaaaccttctgtagcatttttagtaaaaatcacttcttttgaaaactctgcatcaatgaattttttaactttttctctagcgtcatcataggcctttgttgcatctatgcttaatttgtaagctcctctatgtgggtttgcattacttactttatagtagttttcaatagcctccaaaacttggataggcttttgagttgtggcaccgctatctaaataaactaacctttccccattttcgtcagcctttaaaacagggaaatcttttaaaaaatctaaattattcatttttcaatcccctgtctacttcttgtaatatttcttctataacatcattatcgccaattgcgtctattattggattaaatgcagctctaacaattacaattttagcttcatcgtaacttaatcctctagacatcaaatagaataatttattctcgtcaattctacctgaagaagcagcatgttctcctgaaacgtcatcttctgcacataataatactggcattgctttagctctagcttcttttgaaaggagcatacaatattcatcttccgctccaacacttttagctgcaccagttttaaaatctaaagttcctttaaaagcctttctagcttctccttgaagtgctcctttaacatttatattagaattacttcttttacctttatgagtaacaatataattaatatctataagtttatctttacttcctagatatattgaatttatatttgcagctgatttatcacctactaagtctccatgatagttataaatgctgtattttcctccaaggtctactgatataaaatcaacctttccatcttcttcaatatctgaaacattagaatcgaaatgaatagtactatcatttaagaaattcactttagttaatttaatttcactattcttctttgaatatattgtacaaattccattatgataaccatttgaatcgtctaaagatttatactttactataatagaagcttttgaattttcttctccaactattattaaattatctactaatgaactgttatctttatcaaagttgaattctataattactggttcgtcagtttttatatttctacctattgttattacataaccttggttgaaaccttctttaccttggtttattaaatcttcactgattccatattgaaactctctatataaaggtaatattttgtcattttctaacttttgaatatcaacgccttctaagcccttgatttctacgttatcaaactttttaatttctccaatatttaattctccaaggcttatatcattaatattaacccagcttttagttcttattggagttttatttaaattattaaattgtatagccttcatttctctcacctaccctatgcttccttctaattctatgttgattaaattgttcatttctactgcatattctaatggtaattcttttgatataggttccacaaaccctcttactatcatagatttagcttcatcttcacttattcctctagtcataaggtagaaaatagaagcatcacttatcttacctatttttgcttcatgaccaatttcaacatcatcatttaataaatcaattactggaatagtgtctgattttgatttattatctaacattagagattcacaggataccatagattttgaattataggcatttgaatttacctttaatactcctctataagtagcttttccaccgtttcttgaaattgattttgagtttatagtagaagaagtgtttggtgcggcatgtataacctttgctccagtatctaagttttgtcccttacctgcaaaagatacacctgtaaattctgctcttgctccttcgccctttaatatactcataggatatagcatcgatatttgtgaaccaaaagaacctgatacccattctattgttccattcttttcaacaattgctctcttagtgtttaagttaagcatgttctttgaccagttttctattgtactatatcttagtgttgcgccttcttttacatagagctcaacacagcctgcatgtaaatttgtaacgctatactttggagctgagcaaccttcaataaaatgaagctttgctccttcatctacaataattagtgtatgttcaaattgtcctgctccaggtgaatttaatctgaaataagattgtagcggtatgtctacattaacccctttaggaacatacacaaaagatcctcctgaccaaacagctccatgaagtgcaacaaatttatgatcattaggtgtaacacacttcataaaatattctttaactaaatcctcatgttctcttaatgctgtttccatatcagtataaattacgccttgttttactaaatcttcttttatactgtggtaaactacttctgagtcatactgtgctccaactccagctagtgatttcttttcagcttctggaattcctagtaaatcaaaagttttctttatatcctcaggcacttcatcccaagaaccaactaagctgctctttggccttacataggttacaatgttatccatatctaactcatccaaggatggtccccatgttggtaatttcaatttattatatatttctaaagatcttaatctaaaatctctcatccatttggcttcatttttttcttctgaaatagtttcaattatatcttttgttaagcctttttcagatttaaaactaaagctgtcttcatttttaacatcatagattcctctatccatttcatctatataagtcttctttttgttttccatcttatttcaccacctttatatagctacattttctttaaaagattcataacccttttcttcaatttcattagctaagcttccatctccggttttaactattcttccatctactaatacatgaacataatcaggttttaaattttctaatatttttgtattatgagtaataattaaaactccattgttttcatttgagaacattttaatacctttagaaacaattcttatagcgtcaacatcgagtccagaatctgattcatctaaaattgctaactttggatttaaagttaacatttgtagtatttcatttttcttcttttctccacctgaaaatcctacatttaaatatctgcttgcatagctttcatctatttttaattctttcatattgttctttaaatctaagtcaaacttaaaatgttttagcacatttccatctgtagttctcttagcatactttaagaaattctctacagtaattcctggaatttcttctgggtattgaaatgataaaaataaaccttttttagctctttcatcagtctttaattcatttatgttttcaccttcgaattctatatctccactcaatcttttatatttaggattatttaaaagagcattggctagagtagatttaccagctccatttggtcccattattacgtgaacttcacctttatttatttcaagatttaatccttttaaaatctctttatcatctgcttcaattcttaaatcacacacttttaacaaactcttatccataacaattctcctatctaactaatatttaattaactatgtttttcacaaaacacctgtctaaactccataaatgtaagtcttatatataatttctttatatgtataaattttaaagtgcattctaaatacaccttaatattagcacaggtttttttaatgtgcaatacaaatgcacattttatttttaaccaatttacttttttttattataaggtataatgaaactaaagaagggatgtgaaaatttgaacttatctaagttttcagattatgcttttagaattttaatatatttagctaagaatcaagataaaatatgcactgtggaagagttggcatctaaccttgaaatatctgaacatcatttaaagaaaatcgttcataggctaggtaaaactgaatatgtaatatcaactaaaggaagaaatggcggcttaaaacttgggatggagcctaaagacataaaccttgggaaaatattaataattacagaggaaagtataactgtatctgaatgtttttcaagtgcaaagcatacttgttccacttcaaaatgcaaattaaaagcaatattatcatcatctattaattcttttgttgatgaatttagcaaatataccttagaggatattttatagcaagataaagtttttatactttatcttgctataattttttattcaaattctatcattagaaaaatatttttttgtctaaagccttgtcacaaaaaccatatacttataaaaaatcaagaaagtaattaggctgtactgatttctaaattacataaatcagtattttttatgcccccattaaatgtatacttatatataaaaataaaggtgttacagtcgcttcccactataacaccatttacttacgaattgtattttttctccaattcttctaatattaaaatattatctttttttatgtgattatttatttcttcaaagtcaatacattccttatttatacctgttaatgtgcctgcgtttaattctcttttggcaaatgtatatacaactttatcttctttatcaatatgtctctctaataaatgcgtataggagatagcattagaaattacgtctaaaatagcttcttcatccccatcttttagatttttaagtgcagcttgaagttcacttatgtgtagtcttccaagatcatgctccacaagcataccatgcttaactattttttcagcagttgggcctatttcttcaaccattctattaaaaagcattacttcttctttcttatgatgatgagaatcagcaaaatttctaataaaacctatcatggaattaaaatcatcataacttattttttcacctttgtataatctaaaacatgcttttcttacaacaaccaacattctttttatatacttatgttcttccatcattaaatctatagcatccatatcttttcctcctattacatattttcattaaaaataatagtgataaatttaatcatcgtataaccaaaaatatagctgggtactctattattcttaaattattaacccataaaaatccttaattctaagaatcttattttcttcttatcaccattgtattgttgccttcttcaacatactcaaaatctgaattaactgcatttacaaattctttaacccataaacttcttagcttgtagaaataatcaacgtcaccttcttctttattccaaatatcactatgaacgcatactcttctcttccattcaacgatatcttcttctgctttaattacttcattgactctatcacatggcattccatctaaaatataatcattgatactgtcaaaaatttcacctgcatttgtaagttccattcccttttctttaacttcacttgcagctttaattccttggctagaataaatctcttctaattttgtagtaacacctttattattatttataagttttgttgtccacgcagccattcttccttctgctgaatgaatttttccttgtaaccatccatggatgttacttgtatctatcatctcttctagtggaagattcggagttggctcaccatacttttcattgatttctttacgcaactcatctacatttaagccttcctcttttgcaagatttattatctcaccttctaatttttcaaaccataaaatcttattaaataaccaatagtgtatctttcctaaaaataaactcatattttttctcctcctatagcaaaagtatttaactagaaaataaaacctttgttatttttaaacttaaaacaatttaaaaatccatatttatttacttcgaatacttatttatattatgttttatttgtaaatttataataccatattattttatatttttacgtaacatatgatacaaatccataaaaaagatatataagaaaatcttatattttatccttttttatagaaatatttttcctttcattttatttagcagtcaataaaagaagcagtggatgttcttaacttccactgcttcctatacccttatattaacttaccctcttattttcccataaatcttatttttgtactggtttctttattattcctaatattattgccccaactattgccccaatgactattgctcctaagtattgaagtgggttggttacgattgcaataacaaatattccaccgtgaggtgctcttaatgcacatccaaatgccattgaaagagctccagcaactgctgaaccgattatacaagatggtagtactcttattggatctgctgccgcaaaaggaatcgcaccttctgagataaatgataatcccattatatagtttacaagacctgcttgcctgtctttttcagtaaatttatttctaaatactgtagtacatattgcaattgcaagtggtggaaccataccaccagccataacagctgccattatatcaaagtttccactagcaagtgatgctgtaccaaaaagataagctgctttgttaactggaccacccatatcaactgacatcataccacctaaaacaatacctaaaagaatcttacttgtaccacccattgaattaagtgcaccagtgatacctgtatttatcgatcccataattgggtttatgaataacattataacaccgattaaaaatgttcctagtaacggatataaaaatactggctttataccttctaaactgtttggtaaacctgcaaataacttcttaagaccaacaactaaatatccagcaatgaaacctgcaagtaatgcacctaagaaaccaccagaaactgctggaacctttggatcaaatgcgcttgcaaaagtaacaccggcactagctaaagcaccaccaacaaaacctactgaaagagctggtctatctccaatactcattgcaataaatccagcaagaaccggtaacataaatccaaatgcagtaccaccaatattcttcaaaactgcagctaatggtgtacctgtaccaaaaccactcggattagcaggattaaatgtatcaaataagaatgctaaagctattaatataccaccacctattacaaacggtaacatatgtgatacaccattcataagatgcttataaatttgacgtccaactgattcgtttgaaacatcttcgctgctatcagcacctccagcatgatgatatattggagcatttcctcttatagcttcctcaattaattgagttgacttgtgtattccatctgcaactttggttttaattactctcttaccatcaaatctagccatttctacatttttatcagccgctataattatacattctgcatttgctatttcttcttttgttaaaacgtttttagcgccgccagaaccatttgtctcaacttttattgagactcccatatctttccccttactttcaagactttcagccgccatgtaagtatgcgcaatccctgttggacatgcagttactgctaatactctataaccacttttattcatctctatttccccctttacctcttcaggaaacttttccatttccttcttatctattaaccttaaaaactcttctttatcagaacagtttactaagcttgttctaaatgattcatccattaatatagtagataatcttgctaatacttctaagtgtaaattatcattattatctggtacagcaatcatgaagaaaagatgtgctggttgaccatctaacgaatcataatcaacaccctttttacaaattgcagctgcaagagatgctttctttactgcacttgtctttccatgtggaattgctattccgtcccctatcccggttgtacttaattcttccctggctaatattgcttttttatattcttctttattatttaaattcccagttttgtccattaaatcaactaattcatttatgcattgttcttttgtatttggattaaaatttaagtttatgccttgtttgtgtaataaatctacaatcctcattgttagcctcctaaaatttaaatatatttttatgcttttgtaaaaatcataatacttgttaaattacccttgttaaaactttaaaatataataagattcaactcacactatagtaaattcactattaaatttgctttaataattcatatacttgttcttttgttgccaattcttctgagaaagcacttgcacttcctgtagcaattcccatcttgaacgcttcatctatatttttatttttcaaatatccgcataagaaaccagccaccattgaatctccagccccaactgaatttttaagtattccttttggaacagctctttttataggttctccattttcaggtagtagaattgctccatcccctgccattgaaataagaacattttttgctcccatttcttgaagttttctaccatatttaattatgtcttcatcatcttttaactctacattaaacatttctgcaagttcatgatgatttggttttatcaaaaacggtttatattttaatacctttaacagcaaatcttttgttgcatcaactatgaactctacacccttatccaataagctgttcataatgctttcatatatattatctggcacactatttggtatacttcctgataatattaaataatcaccttttgttagatgcgaaagtttttcatgtaagagatttaactcttcatcagttattgcaggtccagatccattaatttctgtttctccatcacttttaagtttcacgtttattctagaaaatccactttttaattttataaaatcacagtttacgccatggctttgtatttgtcttagaatttcatctccagtaaatccagcaacatatccaagagctgtattcgctacccctagatttttaagaactatggatacgttaattcctttaccacccgcataaatattttcttcttcagttctatttaatgaatcaactttaaatgaatcaactttaacaatataatctaaagaaggattaagagttattgtattaatcattttttaccacctctattacattagtatcataactaatattattatcaatttttgttgttattaatgttgaatctgctattgctccgaaagttataaaactaactttttctaatttagattgatctgctaatacatatgattctctgcacattttcattgcttgagctttaaccattgcttcattcatatctggagttgtataaccgctctcgttgcttacgccatttactccaaagaagccttttgagaagttatatttttttaaatcttctacaacggtgcttcctactattgcttcagttatagctttaacttcgcccccaacaataaaagtcttaaaacctctttccaaaagcttttttgcatgaactattccattagttacaactattatttcgttggcttcaataaaatctattaagatctcagttgttgttccagcatccaagtagagtatatccccatcttcaattaatgcagcagcatgctttgctatttcagatttttcatctacattcaaagattgtctaacattaactttatagtcgtgcttggatgtactctcacctattgcaattgcacctccatgaattttctttaaaagtccctcactatcaagtgtatttagatctcttctaactgtagattccgaagcatccagtaattgtactaaatcagtaacagatactattccttttaccttcaactcctgaagaatgatattaaacctttcttctgtaaacattatcatcactcctctgatataatcataacttatatttcaataaaaatcaaccattttatttcaaaaaaatcatttattttcacttatattgatttttattgattgtttttattcgaatttaaatattttattcttctattgaccgtttcaaattatttaacttatacaatattggttctaaaagtaatccttctcttactggataatcataagaactactttccttaatgcaatcttcaacaaatttgcatgattcctcaacgctcttttctaatgagttaccatccataattaatccaatcaaaactgatgcaaaaacatctccagttcctggataagatctttctatcctatccctaattattaatttgaaagaatcgttttctccattatatacagctatcccaatcttctttttatttgcgacaggtgcacttgtgattattacattatcacatccaaaactatataattttctagaaagcgctaatagtttctcttcattcacttcctctacaatcttttcatcacataaaatacatgcttccgtaaagttaggtgtaatgatatgcgaatatcttattatcctttttaaactatctgaatattccttactaaaattactataataagaaccgttatcagcaaaaataggatcgagcactactaatgatttattcttgtttacagattctaataaaagtaaagtttcttcgatattattagtacttcctaaatatccaacaaatatgctttcaaaatttatgttcaattcaatatagtgttgaaccgccttacttatatatccatccaatctttctatgtttggactaaaccctccagtatgactggttaatatcatagtaggtatcggacaaacctctacccccaaagttgatagaataggaattacattggttaaagcagcttttcctattccgcataaatcatgtaaaacagctgctctttttataggctttatcatagatttctcctctctaaaacatttttacatttagttttttaattcttcatcatattcaatagaaatacaacttctttgtaaaaaattatagtattaatacctgaatcaggcaaattaattaccatatgattgtattacattagaacttttactgttgttttttatcatggttgtgtaataattttaacttttagcaaaaaaatgctatccacctatctataaaaggttatatagcacttcactgttattctctataagaatttcaattcttttaacctgtcaattaaattaatcttattatctttcgctacctgccttatctctaactcaattcctttctcgtaaagtttcttgaaacattctatatctttattatttacggatatagcaccagtaatttgtttttttccatccttatagcacattcctccaacatttacagatttaatatcaactccaccttcaatcattcgaagcacgtctgccggattagtaaataaaaataaagtcttaaaatttttatatttaggattcttataagctttgatagcggtttctattggtattacataagctttaattccttttaatgctacttgaagtaacaactgttttctcaaatcatctttagcaacttcatcactacacgccataattctgttacatccacttgcttttgaccatatggttgcaatctgtccatgtatcaatctgtcatcaattcttacaaagctaatttccatgatttcaaaaccccttcaaattttatattaattctatatttatcatgtacatttaaacgcagctatccccaacgctacatttcatttttaaaatttgtaattataatatcacaaaatgtattcattttcaatcacaacaattcactttccttcaaacaaaatcgtgataatcccacttaaagctcaaaataagattttctttatattattatttattaaaaaattaagctataatcatttactcttatttatgttatgttgaaatttaatttctgcctcctagccttaattaatcatttaacttgctagaattttaaataaagatttatttttgaagtatttatacttcaaatactcaattaaattcattatatctagtaaaatacaaattataatttttataacaaaaaatagcatattaaagtaattttaatatgctaaattgtttatattttttactcaagtatactttcttatgctgaattttataaagtaacaccttgttttaaaatagctaactctttaaatttattaatttcattatttacatattttccattagccacttcaaccacatattttataaattcttctgttacttcactcaaagtcttatcttcaactaaagttcctgcattaaagtccatccaatgtggctttaaattgtataatggagtatttgttgatatcttcattgttggaacaaatgtaccaaacggtgttcctctacctgttgtaaataaaaccatatgacaaccagctgccgctaaagctgaggctgcaaccaaatcatttcctggtccacttaaaagatttaatccattagtttttaaagtttcaccatattttaatacacctacaactgttgaatctcctgatttttgtgtacaccctaaagatttatcctctaatgttgtaattccaccagctttatttcctggagaaggattttcgtatataggctgattatacgccatgaaatattctttgaaatcatttattaaatgtacagttttatcaaaagtttcattatctttagctctattcataagaattgtttcagcaccaaacatctcaggaacttctgtaagtattgttgttccaccttgtgcaactaagaaatctgaaaaactacctacaagaggatttgcagttattcctgagaagccatctgaaccaccgcactttaatccaacttttaaatttgatagagatactgattctctcttatcatttttcatattttcataaagctcacgtaatattttggcaccctcttctatttcgttagaaacttcctgtgatactagaaatttaattctagttgtatcatattctcccaatgactcaataaattcagccattgtattattttcgcaaccaagtccaagtactaacacgcctccagcattaggatgctttactaaatttccaagcatagttcttgtatttgcatgatcatctcccaattgagaacatccataattatgtttgaaaatttcaactccatcgatcccaacaggttttacatcttctttgaatttttcgattattctttcaccaattccattaacgcacccaacggttggcactatccaaagttcatttcttataccaacattaccgtttgctcttctatatccatcaaaagtaagatttttgttttctatagaaacttgttttagctgctgattaaaattatattccataattccatctaaatttgttttaatattatgcgtgtgaatccattctcctattgatatatccttaacagcatgtcctattggatatccatactttattacattgtcgttaactttaaagtctgatatagctactttgtgtcctctttttatgtcttcttttatctctatttttttattttcaacttctataatttcacttttagacaaatctctaagtgctactacaacattgtctttttcatttatttttataatttctttcatcactctctacctacttccattaaattattgttcacaactttaaatttaacagctatatgaatattctataataataatttataatcttattcctaaataacttcttttatagcttccttcattcctactttttcaattatttctaaatatcttgaaacttcatcagctagattaggaatttcattcaaattgcttccccaattcttttcatatgcaagaacagaagttacaattttgtttaggccttcttttgttccatcatatttttcccataattccttgaataattctaatatatcctcatcatcagctagttcaatatcttcgtctcctctttttcctttgtagaattctattaaagatgcaagggagaatactaatttcttaggaagtgtaccctttctctttagatattcagtcaaacttggtaaatctcttgttttgtatttagataatgaatttaatgctatgctcattagatagtgctttacatatggattttggaatctttctataatcgcatctgcaaattccactaattcttcgtgaggcaaatctaaagtttctatgatttcatcatatattacatcatggacgtatcttcctataacctcatgatcaacagcttctcctacagtttctaaaccataaaggtatgctactggaaccattgccgtatgaggcccatttaaaattctaacttttcttgttctatatggtgtcatatcatctacaacttttacattaagtccagctttttctattggtaattcatcttttatagactgaggcccttcaattacccataggtggaatatttcccctacatctactaaattatcatcatatccaagttcttctctaacttcatcaattgtatctcttggatatcctggaactattctatcaactaaactacagcaaaaagtattagcatcatttatccaattcacaaaatcttgtcctaaattccacatttctgcatatcttaatactatttctttaagtttttcaccatttctatcaataagctcacatggaattataataaaacctttactattgtcaccattaaacaccataaatctacggaacaaaaatgcggttaacttacccggaaaacttttttgacatccttcatttaacttatcattctcatcaaaagcgattcctgcttctgttgtatttgacactatgaaccttaattctggattttctgcaactcttaaatattcattataatctgtatatggattaattcctctacttatactattgattattttatgtgtttttatagctctttttccttgaactccttgaagataaagtgtaaacaagccatcttgttcatttagcatattaactagtccaccttcttgaggctgaacgactacgacacttccattgaaacctgcttcttcattcattttgtcaatttgccaatcaacaaatgctcttaggaaatttccttccccaaattgtagcactttttcagggtaagtcttaaattctttatatattttcttatttaatttcattagttattcctcctaagttttttcattaaaaatatcttaaactaatttcaatggacaattaacaatgcaaatgctatcattttaatatttcatatctcttcaattaccaatatcaactttgatatatacattgttaaagataagtaaaagtttattttaaatattatttgaagtttataatttagagatagaatacacttaaaatttaattatcaaaataatcctctttacttatccttaaatgtaattaaaattttatatgaagaaaatacttttaatagcgctaacattttcaattgttagaaatatagtaatatctgtttcagaaaactctatctttcaacaccttgtctctttcctatgaattccatcagttgatcataatatggataaccttccatatctccttgtaccaatgttgccatagctccaacaccgttagcatattgtccaatttcgtttagtgataatttttctaaatatccagctaaaaatccagctgcaaaaccatcgcctgccccagctgtatcttgaattaaatctgatacattatatcctgcgaccttgactccttcttttttatcttttatatagcagccttctgaccctaattttactgcgactattttcgcttccttatttaagaaaaaatctgccacatcatctttattagttaatcctaataaaagttccgcttcatctaatccaggcattacaatatctgccttactagcaatatccaccaagatctttctagcttcatcaaccgtccacaatttaagcctgatattaggatcgaatgatactaatatcttgttttctttagctatttctattgctctgtatactgctcttctacaactttccgataaagctggcgttatacctgtaatatgaagaattttagcttgcttaatatattcttcatcaatatcctctggcgataagctactagcagcagaattctttctataataatatacattcggattgcttcgttgataacgttccttaaaaagcaatcctgtaggcctttctttatcaattattactcttgatgtatctactccctctgcttttatagaacttataacaaatcttccgaattcatcatccgaaacttttgagaaccagcccgcactatgatttaattttgccaaggcagtagcgacatttgattcggcaccaccgagtgacttggaaaaactatgaacatgtctcaaagggccattaatattaggactaaatacgaccattgattctccaaaagttaaaacatccattttagattctctccttcgcttttctgtatgcatccataaattctttagcagtcctttgaactagatcataatcgcctgtttttgcacctttagttaaatctcctcctgttcctactacgaaggctcctgcttctatccactcatgtaagttagctatactaacaccacctgttggcataaagtctccttgagggagcggccccttaaatgatttaattactgatggcccatatagattggctgggaatattttaaccacatcaactccatactcaaaagctgtaatagcatccttaacggtcattactcctggcataaccagaatcttatacctattacaaagctttaaagtatcaatatccaaacttgggcttacaataaattgtgcccctgctaaaatacaagctcttgccgtttcactgtccaatacagttcccgccccaacaattacatcggtatccttatatttttcagcaacttctttaataacttcaactggatttggaacagtcattgtaagttccatcacttttattccgccttttgaaacagcatctacaattttaagagcttcttcttttgagtctcccctcacaactgcaacaacacctgcttcttttatattttttaaaacttcttctcttctcatattacacctcaaattctttcttaattaatatcttcatactgaatatatatacaggttttagataataaaattattctttagaatatccattagtttaaaattcatagtctttcaaactaatttttcagaatatatattataatttcaaacattcattttttaacaaatctattttgtgctatcactattaattaaatacacagttcttaaaatggttaacttaaaatatgattaataaattatagtatgaaaattataggtttgaagaattctatattatttatttttgtatttttaagaactgtgttatatattaaataagtttatagcttatttatatatcaaagcatttttttctttgattattaaattaaaatatttataaatattttaatttaataaataattttcgttcacgttaacaattagaggtcgaacaattgttaacgtgaacaattttagttaaaaattatttaagttatatttacattatagtatcaaataaaaaaatatgcaatacttttttgtgaacgttaacagttttttacaagtatatctttttttatttactcaatatataaagataaaacactatcaactctcaaaatacaaagctgatagtgccttattcttcttagctaaacaataatgatttatttataacattattattctaaaattcctttttcccattttccttcttgtaagtcttgagcaacttttctgtacttgtcatctggtagattatgtaatatacctactacaagagcagctaaagctaaagctactgctggatacaatgtcattgctcccttaattcctagtaatgtttctgcactttgttgtgcgtttgcaacatacccagtcatacctaatactgctgcactaacaagggctgccatagattgtgcaatttttcttgaaaagttaaatgcagcataagttacaccttcttttcttattccagtatgccaatgtccatagtcaattgcatccgttacgaatgcccaagtaactccatttggaatagctaaagctacatatcctattgtaacaagaactgtgaaagtagtagcatttgttggtattataaagtttaatccattagcaacaattccaatcaatagtcctgcaatcgcagttttctttttaccaaaatgttttactaagaatggaatagcgaatatacctattacagaacatccaatcattataccattaaccttaggttgaagtttaatatcccctaagttatattggcagaagaaaatcatcatttggttgttagtattcatagctgatattgtaaataattgcataagaattaagcataacaatggtctatttgtaaatacaactttaaaataatctttagcagatgctttttctgatttaccttctctgttaactacaacgtgttcttttgtgttagcaaaacagataaagaatgaaacaactcctataacagccataactgcggccgcaactggataaccaacttttttgtcactaaacatcataagaataggtacaaaagctactccagttattaattgtgctcctaatgaaccagcttgtctaaatgtagctaattggcttctatcctctacatctcttgtcataaccgatgctaatgatccataaggaacattagtgaatgaatatacaagaccccaaatcatatatgttgcataaccatatataatcttagatgaaagcggcatctcaggcatagtaaaagtaataattgtaagtagtgcaagaattatacttgaaatcatcattacaggcctaaactttcctgatttacctgcctttctactatctatcaatgatcctgctaatggatccatgaatgcatcgaatatttttgtaaatgcaaatataccaccaactgctccagcactaattccacatgtatctatgaaaaactttgtaagatatgattgacctaagtcaaacataaatccattaccaaaatctccaaaaccgtaagaaattttctctcttaaacttaatttaacgtttccattattagcattagttgatgcgtttttgtcaacagaatttaacattccttttcctccgtatctttaatttagttaattttttattcattaatccaatattataaattatcttttattttacaaattaggttttggtattcatcatcgcttaaatatattttttgtggattcatctcaaaagtttttccccaagatgggccgccttcatatttaggtacaatatgaagatgaagatgtttcatagtatcagcaaatgctccataatttactttatctggattgaacgctttatggattgctttagctacctttctagcgtcatttatgaaagctgctgcttcatcttcatttaaatccgctatttcacttttatgttccttataaacaacattacatcttccactataagtttgttccttaaacaaatatactgttgatacatctaaatcacaaatcttaatcattaaagaatctaaatcttgattcttcgaacaataaaaacaattttcatcaaaactcatttatttacctcctttattattgatatatatttacttatcatgcaattaagaaaatttaattgcatgataataaatttcattataaaactactttaactgcttccttcattcctactttttcaattatttctaaatatcttgaaatctcatcagcaagattaggaatttcatttaaattgcttccccaattcttttcatatgcaagaacagaagttacaattttgtttagtccttcttttgttccatcatatttttcccataatttcttaaataattctaatatatcctcatcatcagctaattgaatatcttcgtctcctctttttcctttgtagaattctattaaagatgcaagggagaatactaatttcttaggaagcgtaccttttctctttagatattcagtcaaacttggtaaatctcttgttttgtatttagacaatgaatttaatgctatactcattaaatagtgctttacatatggattttgaaatctttctataatcgcatctgcaaattctactagctcttcgtgaggcaaatctaaagtttctatgatttcatcatatattacatcgtggacatatcttcctataacttcatgatcaaccgcttcccctacagtttctaaaccgtaaaggtacgctactggaaccattgccgtatgaggtccatttaaaattctaacttttcttgttctatatggtgtcatatcatctacaacttttacattaagtccagctttttctattggtaattcatcttttatagactgagggccttctattacccataagtgaaatatttcacctacatctactaaattatcatcatatccaagctcttctctaacttcatcaattgtatctcttggatatcctggaactattctatcaactaaactacaacaaaaagtattagcattgtttatccaatcaataaagtcttgtcctaagttccatacttctgcatactttaatactatttctttaagtttttcaccatttctatcaataagctcgcatggaattataataaatcccttactgtcatctccattaaatgcattaaatctgtgatataaaaatgctgttagcttacctggataacttttttgacatcctccatttaaagtatcgttttcatcaaatgcaattcctgcctctgttgtatttgacactataaatcttaaatctggattttctgcaacttttaaatattcattatagtctctgtaaggattaattcccctacttatactattgattactttatgagtttttgatgcttgcccattttggaccccttgtaaatataaagtgtataaacaatcttgatcattaagcatgtccacaagaccattttctaatggctgaacaactacaacgcttccattgaaatctgcttcatcattcattttatctatttgccaatcaacaaaagctctcaaaaagttaccttctccaaattgcaatactttttctggatatgttttaaattctttatatgattccttatttaatttcacagctattcctcctaaatcttcacttcatctgtatctttgcattattgtatgaaaataagcatctcacttattttcatacataaaagattacatattaaagtatttgtctgcgttattataactaatgtcagctacaatttgtcctaaatgttcaatgtcgttaggtaactcgccattttctacccattctccaattacgttgcaaagtattcttctaaaatattcatgtcttgtgtaagataaaaagcttctagagtctgttaacattccaacaaatgtgcttagcatacctaaattagctaaagttctaatttgatcttgcataccaatcttgtgatcattaaaccaccaagctgatccaaattgtattttgcccttaattccgtctccttggaagcatccaagtaatgttcctattgtagaattatcatttggatttaaactatatataatagtcttaggtaaagctttttcactatttaacgcatctaataaccttgacagtggaattgcaacttctgtatcattaagtgaatcaaatcctgtatcaggtcctaatttttcgaacattactttgttattatctctaacgcaattcatgtgaaattgcattacccatcctagatcgtgatataattttccaaagaactttaatatatatactcttaatttattttcatcttcaaaagatacttgtccatttttaagtacgtttgcaaaaatttctctaacttcttctaaagaagcattgcctactggaacaaaatccaatgcattatctgacactctacatccagcttcatgaaaatattccactctcttttttaatgcttctaaatattcatcaaagtttgaaattttagaaccaactacttcttctagtttgttaaaccaatctttaaatgtttctttattaactcctagagctttatcaggtctaaaagctggtaatactttcacatcaaagcttttatcttcttttattgctaaatgatattctaatgaatctataggatcatctgttgtacatatcacttttacatttgatttctttataagatttcttactgtaaaatcatcgctatttaacagcttattaactttttcccaaatagcaggtgcacttttttcatttaaaacttcatctattccaaagaatctcttaagttctaagtgtgtccaatgataaagtggatttccgatagcaaatgatatagtctttgcccaagctaagaacttttcataatcacttccatctcctgtaatatatttttcatctatgcccaaagttctcatctgtctccatttataatgatcaccataaagccatacttgagttatattttcaaactttttgtcttctaatatttccttcggattaatgtggcaatgataatcaataattggcattttttctgaataattatgatataatttttcagatgcttcgttgcttaataaaaaattttcatccataaactttttcatatcaaaatcctcttttcttttttgttcacgtgaacaaaaatacgtgcaaatccctgttcacgtgaacattttcttgtatctacttgataactttattataatatcatatttcaaataacgcaacacttttttgtgaacgttaacaactttttttaataattagtgcttaaattcactaattattaaaatccattattaaagtttttttactgattttcttaccacaagctgagattgtatataaactttttctttatctacttctttattctttataagatttaataagtttcttccgccatattcgctcatcgccaaagaatccttccttacacttgtcaacggaggagttacatagttacagaagttgctatcatcaaaccctataattgagatatcttccggaacttttaacccagcttcaaatattgctttcatagcacccaccccaatatcatcattagcgcaaaatactgctgttggaacattctctaatttaagtaactttttcatattttcatatccacttttcagatcatatctaccacttaaaatatattcctcattaattggaatattattatcctccaacgctcttatatatcctctttttctatatactgttgattcaaattccttatttccttgcaataatgctatttttctatgatcgttctctataaaataagtaactgcatcgtaaactccttttgtatcatctgacattatgtttactaatccttcattttcaatgtatctatttataactacagttggtatatttttttctagaatagtctgtatgaattcatcatcatttttactttgacttacaacaattattccatcaaaatttctgttatcaattaaatgggagtattgataatcatctatacctcttacaactaaattatattctttatctatgacattattgactcctcttataatttcgtgaaagaatgtatctgatgttccttcgctaatcgatgaaaaaaatacacctataacgtatgattttaataaaacaagactcttagcactataatttggtacataattcaattcttttgctaaagctataattttaaccttggtttcttcattaatatacggactattattaagtgctctagacactgttgtatgagaaacattagctaattttgcaatatcctttatagtgacactcatattttctttacactccttattaagtaaacttttttcaccatatacgataatcacagtatataaaaaagcttaatctacttctaataatattttaataattaaaattcatttttgcaacctatacgattttaattgtttttccttaatttatcaatgttatatttaatttttattatttagttgttttcacagtaatcttcaatggtttgagcaactattttggcttgcactactgcttctactacagttttagcaccagtaacaacatcacctgacgcgaatgtaccttttttagttgtatttcctttatcatctgttattaacaatccccatttattggtatctaattttgttgtatttgaaactatattagttctaggggtttgacttacagctacaattattgaatcacatttgaaaaattcttctttttcttcaataagtttgttttgaacttttccatctgactctactacattctcagtattaactaactttactccctcttctgttatttctaatggcgatttaaataattcaaaattaattttatcttccttagcttcttttatctcctgctttgttgcagacatttgatcaaaaccttttctatatattattgtaacatcttcaactccatttctttttgcacttcttgcggcatccatggctacattaccagctccgataacagctactttattacctagcttatagttctctggtgattttaaataatcaatagcaaaatgtacatttcctaaagtttcacctttaatatttaatgtttttggattccatactccggtaccaataaacactgctttataaccatcttcaaatagtctatctaatgttattacaggaccgataagagtattaggcctaacttttacaccaagttctattaatctttcttcaatggaatctactaatttttttggaagtctatattctggtattccataccttagtactccacctatcttctcgtgcgcatcaaaaatagtaatattatatcctttcctagctagtataaatgcaatagtaattcctgctggaccaccaccaattatagcaattctgtctttctttttagaaacagctttaaacctagtttcttctatgtatctttgagatatttcctgttctatatcatgaaatcgtattggttcccctttaatccctcttatacaatttcctttgcattggtcttcatgaatacatactaatgaacatactgctgaaagcggattattttcaaataatatttctcctgcttcttcaatttttccttccttatacatatttataatatcaggtataggtgtttctactgggcaattagacttacaagctggtttcttacatagcaagcatctatttgcttcaccaatcaaattattattatttatcatatttgtcttcctccttatcatcatttgtatataaagtatactaacttaatttagtatttatttcaataatatatatcaaaaaatatgctatactttttatcataaaatatagcatattttattgactctgtccttatatttctttatattacataaagttttgttcaaacataaatttatagttattctattattttttatataaatataggattccatttttagggctgtatattaacttgcctgtaaagctcctcttcttcaattctttctgaagactatacataaaaaaaccatgcgtgacaattaaaatgttttctgtaccttcttttctcgcttcatttaataataaatcaacaaacttctcagctttctctcttgtaataatcttattttcttgttgagatttatggttgaaataccacgctattcttccactaatcgcccaaaaccaatacggaagctttaaattacttttaaatattggatcaatgatagtttctctaattagatcattttgaattatatcatccttatatacatgttgtgctgtcgttattgctcttataagcgtactagaataacatttatcccaatttatccccataagctctacatcttttctaatcacaccacttatattgtaattttcttcccaatttttaaattcttttgatgtcataaaaaaacttttacggtaatcaactttaaaatgtctgataagaccaacattcataaaaatccctcttgtcttttattattcatataagaactataatgattaggcattaatctgcttaataatttcaattaacatattaaccctattaaaaggagtaatgaaatataatccatctgcaataccttttagtttctttcctatttccacagtaatttttacaccgatttcttgtgcctcttctttgctcatattttctgaaaacatttgtacatatttatctggtatagttactccaggaagctcattatttaaaaacattgcgtttctataacttacaacgggaagtaatcccgctaaaatctttacattagtcctctctttaatcattttcaagaactctatagcattgtcatcatagataggttgcgttaaaaaaaactttgcacctttttctatcttcttcatcattctattatattctacttctttatttaaaacattcaaattcaaagcaccacctacataaatactatcttctttgaatatttcttcattcatgctttctattaattctattagcctaaatgaatttaaattaaatacgctttttgtttcaactttactagcatcagatatagggtcaccagtaattgcaaggatatttcttatattttcaatatgagatcctatcagacttgaccttattgcattagtatttttatctctacagcaaacatgaggcatagcttcaattcctatttctctcttgattttagacgatataatagttgaatctgctctaaccttcgacattggtgaatccggaactgttactaaatcaatattgttttctttacatatcttagctccatctatgattcttgatatatcggtatcaattggtgccgataattctatagctacaacaaactcaccattttcgagcttatctttaaaagtattcttagcctttttctcaaaacttttaacttttggctcagccttagtattagcattgattactttagaattctcattaattattttggttaattgtttaatatagcttggatttgttccacagcatccccctataattgaaaccccaaaagaccttatttcactaacttttttcgcaaaatatacgggattgtttggataaactgttctttcgtgaattatctctggataacctgcattaggcagtaccgaaacaatttcattttctatattaatttttttaaccatttccaatatatgtgctggtccagaaccacagttaaacccaaatgcatctatatattctgtatttcgtacttctttaatcaatttagccgcacttatcccatctcttgtaaatccatctggcttaacagcaaactgagtaagtatgaaactatctatattcttgtacttaatatactcgcttatttttttcaggtaattatagttgctaaaagtttcgaatataaaaatatctataccattttttaaaaagcaatctactatgtatttatattcttctaaaacttcattgctaaattcatctaaattatctgttttaataggtccaatacttgcacctattaaaacagaagtatttcttgttacttctttagctaagtttattcctgacttaattatgtccattaatgtttctaacgatactccaagatcatatgtattagcagaaaaagtatttgttctaattagtttagcccctgcttcaatatactctttatgtattctttttatagtttctttatcatttaagttaccaaattcacaataggatacatcattacctgttacttctgaataatatgttcccattgctccatcacatattagtatatcattttttaatatctcttttatcatttttaatctccccaaatccttgttaataatgcttactagtaagtatactataattttttattctagtcctcttttttaatacgattttcctattgataaatttattttttagccaaattgcatgtaaaaataaaaagtagatctatctttgatactatgcatctagataaatctactcttaaataactcattaatttttaacagtcttattagctgtattctcgtcagtttttggtacttgtatagtcttattaggatcttcctgaatttttcctgacgtaggattatttacaatagttccgttatctggacctatattaatagtattgtcatcctttgcaggacttgtcactggtgtatttcccttgttatcattctcattttgtgcaggaacctctggttgtaaatttaacacaccatcatccttttgttcttttttagggttatctgtagctttccccgaatccacattaggtaatgaattgtcagctgctccatttattacaggcttatctacagttgttttttcaggttttgcatctgaatttgaattagtagctggagtaacgacatcactatttttttcatcttttgcatcccactgagttacattttctttatcttttatacttgcagtaatttcttttactggtgctacatctattttattctttgtactctcatctaccactagagatgcttcatatcttcctaagcttattccttttgtcttagcttcatcaacatcttccttatcacctttaacataagtaactttttctgtattaaaggtagattgaataacatcctttatatctttctcataagcactgttatcttcattttttataaatgcaaatccaaccaatacttccctattagtatctaaatattttttttctataagtttttcctttattttttgtattccttcatcaagagatatacctttaacatctgtaaaatctatattctttccatcattgtttacaccttcaactctaataatcttcaatttattatcagcttctatttgtatactaggattaatatctaaactaacaactgcatatgctgtatcagatttcatagtatgaaagaaggtgaatactattaaaaacaacgctgcaattgctccaattgacttaataaagttattatacctataagtcccactattactagccttaatgagatcatcttcaaaataaaatattttttgccctattttcatatctttcttaggttcaatcttttccattatgccattatcatttaaagctatagcataactttttttaatttccattattattcccctattcattcttttcacctactttctgatccaattttttaaagcactgagatttttatcaattattattacaacagaaattataaattttttgcttctttttattaccttttctgtaactgaaaactttaaaacaatccttttgattggtaatcttttctttaaatacataaaagataaaaattcttcatcctttgatatttcttctgataaattaattgcattctttctcgttgcttgttgtttgggagcttcattcaccaaatcttccaaagtaaaaccaaacgaacttatttcattctttaaggcagttatttcttccagcaacatgctattatcttccttaggctcaaaatattcatctctaaaatccaaacctttgtccactaattcgtccaaagatgaatgattatgcttattttcaccttttaagtaattctttattctacttccaattactaattttgcaaaagataaaaaatgtcccttctcattatcatatctttcaattgcctcatgaaaaccaagtaatccaacgctaagttcttcatcattttcgcaagatacatagcgacctgtcacatctgaaatactttttattataaaaggcatatgattttcaataagttcatttatacttgtgttcttatcaacatttaaatctattaaaacacattcgagcatgacatacgctcccttctccggtcattattatatacaaaaaaaaatataggttttggtactttttattaaacaaatgtaaaactttaatttctaggcttaatttaacatttaattgaaaatactttcgtaaaatctaaagtgatatttactattatatcatgtattaaatatatttttaactttgttggttgaaaaatatatttatagaactttttttctcttatcaatgtaacttctaacacttttttattaatttgacaaaagatatcattcacatacttatattattaaaacataaatttgatttttaatttaattacagcttattttactaaaacaaaaaggagcttagagaccggcgaaggacactctaagctccacattagcactttacgtaccaactgcttatttagaataacataaatatttcaaaatttcaacacaaattataaactttatctatatatgttaaatttaaaatcctaatatagatatatatatatgttttaataaataaatttacatttaaaactctagtaagcaaaacgctaaattaagagtagaatcttgaaatttgattacaacatatatactaacacattcccccgttaccactactattattatctccaccgcaagcattcatactattagaattaggtttaacatttttatttgcatattttttcatataatcaataactcttgcctgcaatttgtttaagctgtccaaatattcatggttattaggatctaattctacagcttttttcaagtaattaagcccactgtcaaaccatcccttttgaacagatataaaaccttgaagataattccattctgctgaattcgcattatttattaagttcaattttgcttcagcctcagaaaagtttttattatcgactaaatcacgaatttctttatatagattaccattaataatgagctcatatgccgcactaagagccaaaactttttgtttagtggtctcattttgattttgtgtatattcttctaaaatatctttgaatttattttttatttcttcttcagaagctgttttttcaatgcctaaaacctcgtatggatccaatttaattacacctctttactctatcttctattctactattaaatatatttaataaaaattagtaatattcttacatgtaattaatttggtccaaaataacctaatagattttattaattgactacaaatagtacttttttaaaattacagctcttatgctttcatattttatatgtgaaggtagttctttttttagtacatttatcttatcatatccatgcttttggcatgcatctattattagcttttcatcttctttattataaaattcttccaaatttatatgaaatgcattttctccaaactcttttatataatctgttacatatcctaggatagttgaaattgagatctctaatttttgagatacttcatgtatagttatgttctgcttaagcatatctattgagatttgatcattctccctagtctctccatcaattataacctttcttctttttctttcaatccattctacttttctatcattttctgacaaatattcgtttactatatttattatcttttctccatacaaacttattttcttaggtcccatgcctgttatatcttttaattcatctaaagaactcgggcatcttccacttatttccttcagagtattcattgtcagtattgcttggggtaatgctctttcttctttagcgaattcttttcttgcattgtctagtctctcgtataattctaagtctgttttaacttctattctagattcttcatctttatttatactcttttgttcgtctagcaagccttcatcatgatcagatatagcaatttcatgttcttctacaaaattccgtattacatcttcaaatacttttccgtatttattatatttaacttctccaactccagaaactttaagcatttcatattttgatatcggataatttacagtcatttcttttagtgtaacgtcaccgaatattatatatggtggaacattgttttcctttgccagttcttgtcttaaatttctaagaatctcaaaaagttcattttcttcactagctttcttttctactctaaactcttttaattgaactttttcttgagatgttaatactcttcttgatctatcatttaaactcaacactggatatgtaccttcaaccacattaatatatccatgagaaatcaatgtattaataaagtttttgagatcttctgctgaatattctttcattaatccataagtagaaagctcgttaaaatgaaattgaataacttttttatttttagatcctctaagcacatctacaagcattccaattccaaatttaactttcatcctgtatatacatgaaagaactttttgcgcttctattgtcttatcaacaaactctcctttactcaaacaattactgcaattatcacattgcccattatatgtttctccaaaatactccaaaacgtattttctatagcaataattgctatatacaaaatccatcatttgttgaagctttctatattgattgttctttctctctacatcttctattgagttttctattaaatacttttggacctgaacatcttgaggcgaaaataataatacgcattcgctcttttctccatctcttcctgctcttccaatctcttgatagtaactttcaatatttcttggcatattatagtgtacaacatatcttatattaggtttgtctatccccattccaaaagcattggttgctatcataataccagctctatcatatataaaattttcttgattttcttttctagtattttcagataatcccgcatgatagcaagtcacattataccctttcgcttgcaaagattcatataaattattgacttctttcctagttgcagcatatataatgcctgaaacttctttattgttttctatatatttatataaatattcctttttgttaccacttttaatcacgctgatagataagttttctctatcaaaacctgttataaagacttttggattattcaatttaagaagatttattatatcttctctcacttcctgtgatgcagttgcagtaaatgctgttattataggtctcttttgaagtaaacttataaaatttgatatttttctataacttcccctaaaatcatgtccccattgagaaatacaatgagcttcatctatagctatttgagaaatattacatttagaaataacactcaaaaactcaaaagattctaatctttcaggagctatataaagaatctttatttcactattttccaaattgtttattacttctttttcttctatagcactcaatgtactatttattaaagcgccttttatccccatatcttttagcgtatctacttgatctttcattagggatattagaggagaaattactattgttattccttctagcatcaatgctggtatctgataacaaattgactttcctcctccagttggcattatagcaagtacatcttctccatttattattttacttattatgtcttcttgcccttttctaaatgacttatatccataatatttctccaaataatttaaagctacattatccatttaataatactccttagattaatacttccattaaacaaggtagtcaaaattgatttaaaaaccacttttaactaccttaatatattacttagctaaaatttctattccagtctcagttatcaacactgtatgctcccactgcgctgataatttatcatcggctgtataaatagtccattcattttcttcatcaacaaaaacatcataagttccttgattaaccattggttcaacggtaagaatcattccgggaacaagcaacattccagttcctttctcccctatatgaggaacaaatggatcttcatgaaattcattacctattccatgtccacctaatgctcttactattgtatatccatttttatgagcatgttcctgacacgctgcacctatatctcctaagaatccccaaggttttatagcttcaattccttttatcatacattccctagctacttctactaatcttttagcttcttcactaacattgccaatcataaacattctagatgcatctgaataatatccatctaaaatcgtagaaacatctacatttataatatctccatctttgattataatattttcacctgggattccatggcacacttcattatttattgatgtacatacactctttgggaaaccttcaaaattcaatggtgctggaatcgccccatgttctatagtataatcatatactaatttatctatatcagcagtgctcatccctgctttaattttacttgcaactaagtctaaaaccccatcattaatcttagcgcttcttttgattccttctatatctttttggctttttataatatttcttggtgggactatatggccttttcttttaaaactttcaattttttcatcaaattctaaatgacattttttatatttcaacccactgccacaccaacatttttcatttctatctaagatcattgtttttataacacctctttataatacattattatttattaatattttagttttttgtcatcaaatattcagctatatatatataatacacctaaatcaatttaaatgctcatctatattctttctctgccaaaattttaacatcttaagctagcttcctttaagtaatatggcatttataattttataatgcaaaagactagtaatcaatttacttttatttcctatatttaataagatttcatattcactatctataataccacttaatattatttatgttaacattctttaaaattttatattaacatacttacttttttgctttttcagctttaataattttaccttttatagttatattttttaactcttctataactctttttccttttccatttaatatatcaacataggataccgaatcctggacatctattattccaatatcttcagatctaatgccctctattttacaaatagccccaactatatctccggcacgaatcttcttttttttacctccatttaaataaatttttgttatattgttatttatggcttttgatttttcttcttttcttttcggtttacttttaagtgttttaaccccttcatttttttccttttcaaccattattttctcaggcaaattatagacaggaattttgaatccaataaactcttcaatttcacttaaaagcttatctttttcattaacacaaaagcttattgccttccctttttcccctgctcttcctgttcggcctattctatgtacatatgcttccttctctacgggaagatcataatttattacgtgagtaattcctttaacatcaatgcctcttgaagctagatctgttgatacaagtattctaaaatcgcccaatctaaatccatccataatgcttaatctttctttttgaagcattcctccatgtattctattaacagagtaccccttagattttaaccattgaaacactgtatctacattctctttagtttttgcaaatataactactgtttcaggtttctcaattattaaaatatcatttagtttttctatcttctcttcataattagtataatataaattatgatctatattttcgttaataagtttttgattatcaatacttatatctacaggcttattcatgtatttatcacataatacctttatttcctctggtattgttgctgaaaataacatagtaactttcttctttggaagtcttctaataattccttcaacttgccctataaatcccatattaagcatttcatcagcctcatctataacaaaatatttaatttgagctaaattaagacttcctctatctatatgatctagaattctccctggagttccaaccactacatgcgtcttctgtttcaattttctctcctgctctgagataggttctttaccaaaaatcgaaacagattttattcttttaaaccttcctatattagttatatcttcacttacttgaacagcgagttctctcgtaggtgttaatactaaaatttgtgggatattttcattccaatccactttctcacataaaggaatcccaaaagctgccgtctttccacttcccgtttgtgatttaactatgatatctttatttaaaagtatctctgggataactttttcttgaacttttgatggatttttataaccaagtccctcgattgattttaggatttcatcacttattttaaatttagtgaattcattattcatatattaaattttcacctcaattattttattaaattatattaatcagaaattatataaatctttcttattataccattcttatctatttttcaaacactatttgtttgtttattttttcattgttttaatgcaatttatactttaaatctaaattttgctttagagagtagtttttttacataaatatataataattctatatcagataatatatctgtgggattatgtaactttaactagaaaaatgcacataataaggatataattaattagcaatatatatagaaaaattattcaactataaaaggagaaattaatgattaactcatttagtgatttaaatttaaattcaagtataatagaaggactacaaaaacaaggaattaatataccaacttcaattcaatcctcttctattttacctgctcttgagggcaaagatataattggtgaagcctttacaggaagtggtaaaacattagcttatctattgcctctttttcataaaatagatacatcaaagagagaaatgcaaggattaatattggctccaacacatgaacttgctaaacaaatagaagatcaaattaagcttcttgctgagaactcatcattccctataacttcactatctattattggtgatgttaatataaataaccaaataaagaaactcaaagaaataaaacctcacataattgttgggtcaacaggtagaattctagatctaattcgaaagaaaaaaataactgctcatactataaaaacaatagtaattgatgaaggagataatttattagatccgaagagatctaacgttactaaagacattgttaaatcaacaatgagggatagacagcttatgctattttcagcatctataaaacctgaaacattggaaactgcgaagtctctaatgaaggaaccaataataataaaaagtgaagataagcctttaataaatcctaatattgagcatatgtttatcttatgtgaaagacgtgataagtttgaaaccttaagaaaagttcttgtggctgcaaaaccagaaaaagcaatcatctttgttaataacaatgaggatattgaattaacaacagccaaacttaattatcatagcaaagattgttttgctatgaccggaaagatttctaaggaagatagaaaacttgcaattgaaagctttaggacaggtaaaataaaaatactagtctcatcagatgttacagctcgtggtcttgatgttgctgatataactcacgttttccatttggatttgccattaaaattaaatgaatatctccatagatctggaagaactgctagaggaaacgctcatggtacttctatatgtattttaactgttcaacagcttaatataataaaaaaatatgagagagaatttaatatacaatttaaagaaaagaaagtttttggcggagttttagaagatgctaattataactctagttcaaagcaatatgagcaaaaaaataaatcttatagtagcaaatttaacaaataaaattttattatagtacttaataaaacttaagcaaattagtattagggatacttattttttcacccaaatgattaaaatgagtatcctttcatttttataataaacttaaatctctgcacactcttttatatctaatctaattattctctatataacaattagttaattatttaattattgatgtgccttcactttaatttatgattttcttccattaattttattaacgataatagttaataataacttattattttattaaagttttcttaagtaaacaattacccaacttaatcggtgctataatcggtagtgatgtaacggtatatatgttctaagaagttcaattcataaatgtttatcataaacttatcaggtatttatagaacaatgaactatattatttaggacttatatccaaaaaactcactaaaatatacacataatgttggaggaaaatttttatgaaaaagaaaatcattagtctattgttaattgcagcagttagttcaactgcattaatatcttgtggaaaaactaaagattctgcaaatttgaataatgaaaatataacggagcagtcttccacaacatctacaactgaacaatcacctcaaagtaattctaagatagttggcgaaaataacaaacccactgtagaagttaaacaaattgcttctttgactgattttaaagataaagacaaaagtgaaattgaaaaacttttaggaaaagctattagcgaggaagatgataagggtacctatgaaaaagatgattatagttttgaaataaaatataaagattcaaaatgtaatgaaattaagataattcctaagtcagaaatgaaattcccagctgatggaactaacatcttaaaattagtaggaataaacgcagatgattcggattctacaatatctccagctggacttgaatggaataataaatttgatacatttaagatcaatgtagtttctaataatgaaccaaatggtaaaatttcttatgtaacaattattttatcagatccttctaaataatgataagagtttgtggattttgtatataaaatactacagtattaaaatttaaaccaaaccatattaaacgtatattcatacttttttacctaacaaattacttttgttagtgatttccatgaatatacgtttaactttaattttctatctctaatttttctatttttatagatggtattttatgctctacattgctttcatctttaatcaccgagctacctactttccctataactttaatcttatcattttcttttagttgatacgatttatcataatctccaactattccaacgatttttgaatcagcagcacagcatgtcattataatccttcctataattatttgatctttatttaagtaattttctttacatacaaatccatgtatttctaactttttccctatatatttttctggattaatccgtatatcatcaagcattgtaggattatgttcgtcaattcttatagtttcttcattgtttcttatgttgctcttattaaaattatactcaaattcatgttcatataatgactttctatcaataacacttgttttgttttctaaaatttctaaattcagctctgaatgtttaaatgtttgctgcttattaatagatatgaaacctattattaaggctagtattattggaaacaattttattttaatattcatgctgcctttaggtgtaaatatattttttatttgaaaaacagtaattatacttatcattattatagtaatataaaaatatttaatcatattactacctatataa

SEQ ID NO: 27 - DNA, 65094 bp, Clostridium beijerinckii
atttaatatttttgtataaatgatattttatataaaaaattgagaatgaaagcatttctttttatagaaatactttcattcctaaaatttataatcgttcttcaatttattatgttacgattttagtaaaccatatttaaactaaatctattagttaaataattctatgactccgaggcttataagtaagagtcctgaaattaacggagcaaatttacctaaaaatttgcctaagatatggtttccagctctttcgccaagtttaagtgtgcaaatacttattataaatgttaatatgactgtaagttctatattaacgcctgttacgcttgcagcaactcctgtaccaaagttattaaatgttaatgcaaaagctaccaaaagtgcctcttttttatctatatctcctgatttatctaaatctgatttttctgcatattcgatcatatcattagtattctttaaagcgagttcttttatttttttattatttataagtttaaaaatactttgaattacaaagtataatcctagaattataataattccagcacctaagctatttgataaaaagcttggtaaaaatttagatacatatatgccaagtaacatagataaaaatgttccagtagaagttacaagtgctactataagatttgcagctgtgtctattcttattttttttattccatatgcaatacctataactaaattatctaagttagaagataaactaaataataaagcagataaaattaatatcatatatgtcattccttcttaattattacttatatttaatatatggttgtaaatttgtgtggtgattaagaatttttaagagaaattacgtttaattactaatatctattaaatacataaagatatttaagttatattttataagatgtccatacaaaaatgtgtagattaaattaatagtgggaagaaaactcttctaaggctctggaagaccgaaaagaagagtttttatcttttaacatgttaatagacttaatcacaaaacactcctaaaatattactattaagcttggccagtaaatgttaaatataagagaaccatatttagtgatatgattatagctgcgatgataatacctaaaattcttacccaattgcgatttgccataatacccattaaatccttacgtctagctatagttagcatttgtattatcggaaatggcaatatgaagctaagtgctacttggcttaaaacaagggtattcattggatttattccaagtgcaattatagccaatgcaggcatcatagttataagtcttctaatattaattggtatacttaaattcacaaaacccttcataattgtttgacctgccatagtacccacagcagatgatgacaaacctgaggcaagtaatgctattccaaaagctccgctagataatgaacctagtaaaggttgtaatgatgcatgggcttgctccattgtatcaacaattaatccatttttattgaatacagcagcggatacaataaccattgcagcattcactataaaggcaatattcatagctattgttacatcaattttttccatttttaaatgttttagctttccttcaatggatgtatcagttcctctatgctggaccaaatgtgaatgaaggtatattacgtgaggcataactgttgcaccaagcattcctactgcgattaataatgcctgactatttggcagtgatggaattattgtatgaattcctacttgaaaccaatcaggtttggcaagaaataattctattgtatatgcaatacagattactgcaacaagaattgatattattatttctatagttttttggccatacttttccatataacaaatgaagaatgttattattcctgtaataatcccagcatatatcattggtatatggaacaataaatataatcccaaagttccacctagaaattctgctaagtcagttgccattgcacctatttctgcaacaatccaaaatacccaatttgtttttttagaaaatactttggcacacatttctggaaggttatggcctgtggctattcctaattttgcagacattatctgtaaaaagatagccattaagttactaaataaaattacccaaattaacgcatagccaaattccgatcctccactaatattagttgcaaagtttccaggatctatatatgctacacttacaataaaagctggacctaaatattttaatagttgcctaaatttactaatattagcactcctgtcttttttaaatggaacaaatccagtgacagatacatcagtgcttcttaaacctctttcgttctccaagaaaatacatcacctttcttactttatttttttatgtgtctaattttttaatcttatatgtaattaagatagttattaacagttaactttcttagcctagtctaaattattttatattataagttatgcaataatattctaaatgttacagtaaagtaactttttcgccattaaagcatataatttattaagtagattattacggggagcgagtaagtatatgggcaaaaatgatttctatacttttaacgaatatatgaagaaagaagacagcaagctaactgcgtccatggaagattatcttgagatgatatatagattgtcattgaataaagggtatttaagaattaatgaactttcaaatgcacttaatgttcaacctccttctgccacaaggatggtacagaagttatcagaggaaagacttgtaaagtatgaaaaatatgggattataatacttgaagaaagtggtaaagaacttggcgcagcacttcttaacaggcatcatattattgagaattttctaaggatacttgatattcctgataaagaaatattagatgaaacagaaaagatagaacatactgtaagtaaagaaacatcaaaatgctttcaggattttgtacaatttatagaaagcaatcctagtatagctaaggcttttaaggagtatagagagtctataaaatagaaagatggagattgtttatttaaacattaataaagataaatcagatagcaagttagatcttaattataaggcttaatttattatctgatttatttatgttgcttttatttgagtttgagtagatataattaaatagtaaatatagtttttattattttttaaataaagatgcctgttgaaattacactatatttaaaaaagtgagccacaaattgtatttttgaatgttctgttttataagtggaagaaacttagttaattgttgtatgtctatgtaaaaatctttattactatctgtatacataataatgtgattaattaacatagactatataagaaatatatattcaaagaataaggggagaaaattttcgatggtaaaatgtaagaatctttttgaaaataaaaatattgaaattgtagaatcaagagggggcgttaaggttcttgaatataaaaaagatttgagtgtaagcactacaactgcaatggcagcatattttgcttcagagatgaatgttagaaaaagacaggttttaattgagttgaatggtaatgcttacacaataagttccggagtaatgcagtggacagcaggatctgtgagtatggctgctgatattaagggaattggtgatttttttggaaaagctatatcatcaaaggtaacaaaagagtctgctattaaaccaaaatatcagggaaatggtttattgatgttagaaccaacatataggcatattttgcttgaggaagtttcggaatggggagggatggttttagatgatggacttttcttagcgtgtgagtctaaggttcagcaaaagatagttgcgaggacaaatatctcttcggcaatgcttgggaatgaaggactatttaatttgtgtctaaaaggtgaagggatagccgtgctagaaagtcctgttccaagaagcgaattgatagaatttatattagataatgatgaggtgcggattgatgggaattttgcaattgcttggtctaattctttagagtttagagttgaaaagtctagtaaaagtttaattggatctgcagtctcaggagagggattggttaacgtatataggggaacaggaaaaatacttatggctccaatatcatagaaatacggatgtgaatatttaattgtagaaggattggtaagaaatattataatcaccaatccttttgctataagaaattaaaaggtaagtcaaaaataatgtttatttgggattaatagtaaacaggataatataaaaagttaatagaataataaatataaatattaagattgcttaaaaactaatattcggaataattttacatgcgaggaattatagctatattattagattttttttgcccaaaacatataaaaacacgaacattagataaataaaaataaaaaaaatacataaaatatttaatttactattgatttatagtccaaagtattgtagcattaagtatgtaaaataaagagctatatattacgcactgaatatattacattttatttattctatgctttaacattcgatgattgtatagaaattcaaaaagtaatttattagtatgtcatatataaataatgaaattttacccgtatatgcttgaaaataaggttcaagcgtttctaccggactaccgtaaattgtctgactatgggtgtttataggtacttgttacttataagcccctttgtaaaaaaacaaaggggcttatattttacaagaaatctttaaattcttgttattatcttttatatttttttcaacgttagtgcatcctactaacagatgtattattttggagtagcagtgttaatttgtgtagctcaaaaataggaggaatctatattggacaatgtattaaaaaaatcggtaaaaacaacggaggagaacggtatgttagaaaaaatatttcacttatcaaaaaataaaacaactgttaagacagaaatgttagcggggttaacaacctttttaactatggcgtatatcttagtagtaaatcctagtatcttaagtcaatcaggtatggatgtatcagctgtatttactgcaactgcattggcttcttttattggtactgtaattatggcgcttattgctaattatccatttggtatggcaccaggtatgggattaaatgctcttttcacattcacaatttgtttgggaatgaagttctcttggcaaacagctttggcggcttcattaatcgaaggatttatatttatggcgcttaacatatttaaaattagacaagtaattattgatagtgttccgccaacattaaaatatgcaattagtattgggattggtttctttataacatttataggtcttcaagatgctaagatgattgttgctaatcaagctacattagttggaataggaaatttaaaagatccaacagtacttttagctggtctaggtgttattataatatcaatattatattataaaaatgtaaaaggttcattcattattggaatgttttctgtatatgtattaggaatgatttttggagttgctaaggtacctacaggaataatatctatgccaccatcagttgctccaatatttatgcaatttgattttaagagtgcaatggtaattggtataataccagcaattctttctatgttatttatagatgttttcgatagtataggaactctaattggtttagcttcaaaagctggatacttagacgaaaaaggtaatgttaaaaatgcagataaagttttaacagctgatgctattggatctgtagtaggtgcatgtttaggaacatctacacctgtagcgtttgttgagtcagcagctggtattgctgaaggcggaagaacaggacttgctggtcttacaatagctggattattcttcttgtcattattcttttcaccaattttaactgctataccaggttttgctacagcgcctgttctaatagttttaggtgcagtaatgatggaaccaatatcaaaggttaatttctcagatttcactgaaggaatgcctgtattcttaacattgatattaactcttttaacatattcaattacagatgggttagcatttggatttgtttcttatgtattaataaaattatttacaggtaaatcaaaagatattcctgtaccaatgtattttattgccttagcatttgtaggattattcgcgcttatgtaataatagataagaagagcctcatggtgtaagaaaattcaccatggggcttttataaattaattactaactattaattttctatgttatttgttaaaaaataatgataatagtgctttgacttattatttagttggcaattttgattttatattgaagatatttttaaggacgtccgaagatttataattccatacgtaactttacatacttcttaatatattttacgcatttctcgaagccgagcttgctggtatctagagacagatcatagtttcttacgtcctcccatttattaccagtgtggtaatagtagtagtcacttctatatttatttaatttcttaatttccttaattgcttctttttcagaagcgccaaggatatccatttcatgcttaatacagtaatcttctgatgcatgaataaaaattttaaatatatttggtttatcctttaagatataatcagcacaacgccctatcacaacataagattctttatcggctaattcacgtaatatcttagcttgataattgaacaaattgtcatttgaagtaaaatcattactttcaggtgggattaattcaccattatatactttctttgaaaccttatataacaaactattttttacaccttcgtctgcattggcaaatagagcttcatttataccactgtcatctgaagccaaacgtaataactcacggtcatacatatttatacccaaatctttagataacatttttcctattgttgtcccaccgcttccacaagttcttgttattgcaattacaaacttatccatataatctcactccttccctatatagaaattataccacattctattaaattattttcataaatatgatattcaaacgaaagataatagaataatttagatggattttgttaatatgatcaaatcagaaaagttcttttgcatttttatttgtttaaagatatctaggaataatactgagaaacaataataaaatattatcagcatgcaatttataagcgtttttagaagggaggaattttatgatttataatattttaattggaggagcagctgggctaggaatggagactatttcctctatattagagaaagttttaaaaaggaaaggcttcgaaatatttactatacaagactatatgtcaagggtaagaggcgggcataatttttttcaaatacgctttggaaatgagcaaataaattcccattgggatgatatcgatggaataatcgctttagacaaagaaacaatagatcttcatatcggcagattaaaggaagacgggtttataattgctgacgagcaaattaagcttgaagataaaagattctttggtcttacgcttaaagctttagctaaaagcattgggaattcaaaagtatatggtagcatagctttgggcgcttttgtaaagttatttaatttggatttaagtggcattaaggaagtattagcagaaaagttcaaagaggaaatcgccaataaaaatttcaatgcctttgaagaaggatacaagctagttgcaccaaagtatcaaattgaacctaagaacaatgataagagtattttaattggaggaaatgatgctattgctcttggggctattgcagctggatgtaagttttattctgcttatccaatgacaccatctacaagcataatgaattatcttgcttcaaagatgaatgaagcagaaattgtagttgaacaggctgaagatgaaattgcttcaataaatatggctattggagcttcttatgcaggtgttagagcaatgacaggatcgtctggaggaggatttgcgctaatggtagaggctgtaggcttatcgggaatgcttgaggtacctcttgtaatagcagaaatacaaaggcctgggcctactacaggtttgccaacaagaacagaacaagcagatttgaaatttgttatatcctcatcaccaggggaaatacctaaaatggtaatagcattaagggaacctgaagatgcattttatcaaactataagagcattcaatcttgctgataaatatcaaataccagttattttacttggagatcagtttttagctgatagtataagaactgtaaagccttttaattttgataagattaaaatagaaaggcatttaaaagatgatgaatatataaatgctaaagattataagcgttatgaattaacaaagacaggtgtttcgccacgtataacgccaggtaaaataccaggattaacagtattggtagatagtgatgaacatgatgaatatggacatattactgaatcaggtgaagtaagaaataaaatgaatgataagagactaaggaaaatggaatatttaaaagaagagcttttagaacctgaattcatcggtgaagaaaatgcagatactttaattttagcatggggatcattatatagtccggttaaggaagctataaaacttcttaatggacgttcaggaaataataataaatactgctcattagtatttggggatgtctggcctttacctgagaaaaatcttaggaagtatgcaaaaaaagtaaaaaatataataaacatagagcaaaatgcgacaggacaactagcaggacttattagagaatatacaggtattgaatgcaatagcagtatcttaaaatatgatggaagacctatttcatctcaagaaatatacagtaagctaattggaggtgagcaataatgaataatgaaatatttctaacatcagaaacagcttggtgtccaggatgtggggatcataatattcttgatgctctaaagcaagcacttatagatttaggtaaggctccacacgaagtacttattgttggtggaataggtcaagctgctaaaacacctcaatatataaatactaatggattttgtggacttcatggaagatcattaccacctgcagttgcagcaaagattgtaaataaaagattaactgtaatagtaaatacaggagaaggggattcttatggagaaggaggaaatcactttattcataatattaggcgtaatgtagatataacacattttgttcacgataaccaaatatatgggttaacaaaaggacaagcatcgcctacaactgatatcggacatgtaacagatgttcagccaaatgggtcaaataacattcctatgaatccagtagcacttgcaataacacttggtgccggttttgttgctagagcatttagtggagataaagagcacttgaagaaagttatgattgaagctattaatcataaaggctactctcttgttgatatcttacagccatgtgtgtcatttaataaagttaatacattccaatggtataataaaagagtttataagcttggaaaaggatacgatccaagcaataaattgaaggctattgaaaaatcaatggaatggggagataagattcctttgggaattttatataaagaagaaaaatccacttttcatgataaagttagctttttaaaaaatggagaatcacttgttgaaagtgaagttaaaatagataagatcaaggaatttatgaaagatttcctataaaaatagcatagaaaaaaattaatgatcaaaagtaattacattttagtagtcaaggcctgatttttattaaatcgggccttttaaatgcgaataattgttataaagcttatatattttcttaaacagataatttctaatgaaatcttagtttgtattttaataaatgttatatttttatattacatttatcgaaatagatataaatgaaagtatattatgcagattttaaataaaaacttataaagtaagatatgctataattatgataataaaaattaaggaaaaatgtggaggaaagcaaaatgaatacagatacattaagaaagtacgcagagctcgttgttaagaaggggataaacttacaagataagcaacaattgcttataaattcaccaatagaatgtgcagagtttgctagactgatagcagaagaagcttataaagctggtgctattaatgttatagttgattacaatgatgaagaacttgctttaataaaatacaataaagctcctatggaaagttttgaaagggagccaaaacatgctgtattatcaagagagcaacttataaaggagaaaactgcatttataagtatttctgctagagatccagagctattaagcggagtagatcctaataagatttccactttagcaaaaacagcaaatagagctatgaaagatgttagcgctgccatgatgagtaatgaagttcaatggtgtgttgtttcaatacctacaaagggatgggcaagaaaagtattccctgatttatcagaagcagatgcagtagaaaatctttgggactcaatttttagtatagtaagagctgataaggaatcacctattgaagcgtggaatgaacatttagaaaaattaaaaaatagaaaagattatttaaatgaaaagaattttaaatatctttattataaatcagaaggcacagacctaactgtagaacttccagaaggacatctatggttaagtggtgaagagaattctaaatatggtattaactttgttgctaatataccgacagaagaggtattcacccttccaaagagagatggagtaaacggctatgtaactagtaaaaagccacttaactatggaggaaatttaattgataactttaagttgacattaaaagatggtaagatagttgactttactgcagaaaagggagaagaaatattaaaaggattactagatacagatgaaggtgctagatatttaggagaagttgccttagttggttataactcacctatatcaaattcaggactaattttctttaatacattatttgatgaaaatgcatcatgtcattttgcttttggaaaagcgtatccaacttgcctaaaagatggtgacaatatgtcggaagaagaactaataaaaaatggagctaatgattcgttaactcatgtagattttatggtaggatctgaggaacttgaaataataggtgaaactgccgatggagaaaagatcccagtatttaaaaatggtgattgggtgatataattgtgttatctatatagattgccaagtgaaaacttgatgagagattaaccaatataaatgaagatagacatttgtttaggttgttaagtgttcagaatttggttatctattgaaaaaatcaaaattattaaatttgaacctaataattaaaaaaggctgttaaatatcaaaatttactagatatttaacagtctttttaattattaaggattttatattaatttataaaagttgctatttatacaaaatgggcataaaaaaataccattgactttccatatagccgatgatagaattaattgttagaaagaaattttatttatctgtatataataatcataacatatttagaaggtaaagtcaatacttaaaaataaaaaagtttggatggtgttatttatgaaaaattatcttatgtctatttctgattctataataagtaaacaaacttttgaagagattttgcagtgtaatgaggaaacagtggaatatggattaaagctgagtgaagaaaatgttaaagagatagttgagataagaagcgaagctttaagtaagaatggcagagttgaatttggtggaggtataataaaacaaataatatcaaccttttgcgagtcgccatatatttctcaatataattatattgaaactatagaggagctaatagaaacattttattattataaaaatgaaactatggaagaaataggtgacattgaattaattaatttaatgaaaggctatttcgataatgaatgccaaggatctttagagctacttagatataagtatttggatactatagctcataatattaaatatggggtttctgattatttaaatgtggatggagatgaagagttataatggataattatattactgacagaaatgataccattgaaaatttattaagtaaggaacattattttcagtcattactacaagtacttcattcaaatgatatattaaataataaagaactagaaaatattcaagttcaaatattagatattttaagagaaactgcaaattattatacaaaagctgaaagctattcggtaagagttgaagttgcagagcaaataatgttatcaatttattatactataggtagctttctaaaaggtaaaacatcaataaaggaacggattacgttaataaaagaaaatacaatgaaatatttattttctgaaggggaaaaagttttaaagattaaaatagaagaaagtaaagaactattaaagaatgtgcaaaaaaataaattaaagacaggtaattatgcgtatatagatactataaattatgggattccattattttttatagaatacgatagtagattcgcagctcatgaaactcaggggtctatagattatccactagctatagatgagatggatttagtaggcatagaatatataaacgaatatttaagaaaaatagactttgaaaatcaattttgttcccactttgatagtcatgaaattgaaaatttgcttaaaagttttgataaaaattcagatcatatattaataaatatctttgaattagttctgactaattatttaggatgtatgctattagggaaagaaggaataactctagatataacagatattgaaaaacgttatcttaaaaataaattaggaaaattgaaagaagaggaatttaatgaagtaatatctaggatagttgaagatattttcaaggagtttactataaatgatataaattttattaattatataaataaaactatttacaagattatgccaaatattaagaagaatattgaaattaataaattggaaaatacatttataacatttaaaaatgcaaatgaaaatttaattagatatgaagatggagaaagtttagagaacagcagatttaagggtataactgaagaaattagagagtgtgataaagtagagaataagatacaaattataagggaagaaattcatagtcttagggatttagtagatgttcttggctctgattgcatatttgattatgaatttattgagatatttaaggtcttagatgattttgaaatatcattgctacttaaatatattccaaatgattcagttatggatgtggattatggaactgaaagtgagaaggagtggcatgaaaagcttaaggaatatcttaatatgattaatgaagagaaaaaaagtaaaataattgctgaatccttgaatattatattgtaatactagtttggcatatataggcagtgggatatgtcctaggtttataacatgaaatatatcctgacttaaaataagagatacgtataatgtgattattatctagagctattgctgataaaaataatgtggattattatggtattataaatatatttctattagactaaaacattaaatataaggagtagagaaagatatgagattaataatgaatgcagatgattttggtatttcaaaagcaattaatttaggtataattgaaggattcaaaaatggaatagtaacatctaccacattaatgtgtaatatggagacaacggaacatgcggttaatttggcaaaagaaaatcctaaattaggtgtaggaattcacctggttcttaccgcaggcagaccattatcaaagaacgtgaaaaccttagttgataatgaagggaattttttaaaatatgataatattgttgagtcagcgtgtattgaagatatacgaagggaatttagaaaacaatttgaaaagtttttatctcttgggatagttccaacacatatagatacacatcatcatgtacattctattgagagtgtttttgaggtagttgctgagttggcaaaggagtataatataccagttaggcatattaaggcaattagagaagaaaagtatgaaagtattaaaacaacaactaagtttgttgatagtttttataatatttctatgattgaacccaaaatgttaataaacattttggaagataatattaatgtagattctttagaaattatgtgccatccagggtatcttgattctaagattattagtagtagttcatatgcatacccaagagtaaaggaattagaaacattaactaataaagaagtaatacagtttattaacgaaaaaaacattgaattaataaattttagaggtatataactaaaatttaaaaatgattcttatatatgaagcaatacatttaaaggttacaattatttggaaataatggttaaggtttttggtaaagatattattaaatatattgataaatagtattttgctattaaagtgcttctgaatttaataaaaacacaactgtactagcacagttgtgtttttatattattgaataggggattatattgagttacgatatagaaaacagatctgttataattttatgaaaataagagaaaatacaatttttatataaagtatagaagaggaaatttcctataagagtatctaaataaattacttaaagaataaaaaaaaagtataccaatataaacaaatacttaaattattaaatcaaaatttaaaaatgattatgcttatattttataatatataggaggatatctgatggaaaaaggaattaaaatagtaacaattggtgggggatcgagctatactccagaattagtggaagggtttataaaaagatataatgaacttccggtaagggaattatggctagttgatattgaaagcggaaaagaaaaattaaatatcgtagggaaattagctaaaagaatggttaaaaaagctggtgtacctatggaaattcatttaactttaaacagaagagaagcattaaaggatgcggattttgtaactacacaattaagagttggtctgttagatgctaggattcaggatgaaagaataccattaagccatggagtaataggacaagaaaccaatggtgctggaggtatgtttaaagcactaagaacaatacctgtaattttagatatagataaagatatgtcagagctatgtccaaatgcatggcttgtaaattttacaaatcctgcaggaatggtaacagaagctcttcttagatatggaaagaataaaaagattattggattatgtaatgttccaattggcatggaaaaagcagtagcggacatgcttgaagtagagcatagcagaattactatggatttcatgggattgaatcatatggtatttggtagagaaatttatttagatggtgaaaaaattacagataaagtaatagactcactagcagaaggtaaactggggtcaattgtaaaaaatattcaagatttagagtggaacccagaatttattaaagctcttagaatgatgccatgcccatatcataggtattactttcaaacagcagatatgcttgaagaagaattaaaagaattttctaagggagaaactagagcagaagtagttaagagattagaaaatgatttatttgaactatacaaagatgaaaatttagatattaagccaccgcaattggaaaagagaggaggagcatattattcagatgcagcttgcagattaattaactctatttataacaacaagggagatattcaaccagttaatactaaaaacaatggggctattgaaggaatagagaatgactcagcagttgagatttcatgtattataactaaggatgggcctaaacctattgctatggggaaattaccagtaagtgtgaatggattggttcaaacaataaaatcatttgaacgtttagtggttgaagcagcagttgaaggggattataataaagcacttcttgcattaactattaatccattaattccatcagagaaaatagcgaaaatattattggatgaattactagaggcacataaagattatttaccacaatttgcttaatattataaaagatttaagggaaagaatatgacccttagatcttttattattgtatttatgataattttaatatttcatcataaataatatttaatgctaatttcaaatcagtagaattaattctagcaatactgagtcttagactattgtcaaaattctctgtattgtagtatgaggccgaattatgggctagaagaatatttttattttttaaattgtctaataatttattacagtcgatatgaggagctaatcttatagtagaataataaccagaacttccgccaagtatattaactaaatttgaatcccaagcagaagttattttcctaaataattgtaaagtgtcctttaaattgctagaaagaatggctacatgcttattatatatagagctttttatatatgattcaagtgttgcttgagaaaccaatgatggcatataatatgaaaaataatatgagtatttcatccattccttaaagctattaattaaatcatcagggattatagctacaccaattcttatataaggtattgtcttagaaaagcttctaagatatatacaatttctaaaatccgaataataataaataggtgaatatcttgacaaggtacttaaatctgaaaaataatcatcttcgataacatatacattgtaagtatgggcaagcttcattattgcttttctttgatttaatgaataataagtgcctaaagggttatgatttctaggaatcgtgtaaaagaatttaatactttggtttttaaatatttcttcaagttcatataaattaattccattctcgtctctttttatagttctaactttcatattctcatactttaaaaagtttatataataagtataagaaggatcttcgataagtatagtatcattgccatttggaaattccatctttgaaaaaagagttaatacttgcagaataccttgggatagaattaaatttttacttttagaatatatatcatctctcataagtaaatcagttaacagttcacgtaaagaaggaaggccttctaaatccatgtttagagacatgttgctgtggagctccagagctgagtttaagcaatgctgaatatcctttattggaatattgctaaccaaagagttaccagttgatagatcataaatattagcttgatttgtgccaaatcgtacaaggttatcagcaacgtaaaatccactctgaggtgaagagtaaactatatgttcattacataggttattgtaggctttaatcacagttcctttactgcatttgtattccttgcagagggaggtgagtgatggtagtttagcaccttgagacatttgatcaaggattattttttgttttatgtcgtatgaaatttgttcgtatatcttcaacaatttaatcctccctaaatttttataaaattagtttaacatatgtagataattttataaataatctctaaatggctattagagattatagtatataattgttattttcaaatattgaatgataggtttatttaaaaataattttagtattatagtaggaaaaattctacaatgtcacattttatattaataattatatatatcaatatatttactctaattaagtctaaaaattcgatattttaatgaaagaatatgttataattttcttgttaaaacagaacatatttaaataaaatgttgaagttagaaatcagagaaggcagacaatgtacagtaaaaataattagtaaattatatatagataagaagtaagatggacttgtttaaaaataaactatttaatattagtagcttaggagaaaataatggagaagaattcagttagatatactagagttataaaaactataagaaagagatatatattagcattgtgcataattatttttgcattattactaagccagataatagttcaatgtaatataaataatgaaatgagctattctaggataatcaataaagattaaaaataatagaagattcagatggtaaaacatataaactagaaataagttttgcatcaactagctataagctgagtgaagcagataatttagaggagctgttaaggaaagctgattataaaatgtatgaaaataaaaagttgaaaagagtttctaggtaatgaaatatatgcctcttataatctcaatgaaggaggtatatatttcattataaatctggaacacgtgtgcaaaaagcgttatttagttaagatacatatgaaaggcaagctacatgcaaaagtgaagattatataatgaataagaatttaagcatggtaggagaaagtaaaaatgataaaatatttacaatctaaaactcttaaaatggcactatcagctacaatagcgattattatatcaaattatattggtttacaattcggagtgacttcaggaattattgcaatactaagcattcaagatacaaaaaaagaatctttattagttgcaggaagaagaataattgcatctgcattagccattcttttgtcgtttatgctatatttattacttggaaataacccaatcatatttggattatttttaattatatttatacaaacgacaacaatcttaaaaatagaggaaggaatggtagttggatctgtattatcaacacatttacttacaagcacaaatataaatatttcatggattataaacgaagcacaattaactgtaataggaattggagtagcaatgatgtttaatctatatactgcgtcattagaagaacaatttgaaaagaataaagaaagaatagaagattattatagagctatattatcagatatggcagtaagccttgttactcaggctgtaccaatttatgaaaaacaaatatcagtgaatgttgaggaattaattaataagtctaaatttatggcacagataataaataataatcgtttatttaaaaaaaatgattattatttgagttatatagagatgagaataatacagctagatacaatgaaaagaatgaagaggcatttttcgagattttatatgacttatgatcaaactagaatattatcagaatttacaaatgaagttgcaatgaatctaaaggaagataatgattgtgtagagcttataaataaactaaatttacttagaaaagattatgaaaaaatggatttacctaagaatcgaaacgaatttgaaaacagagcgttgctatttcagtttttgaatgatttagaagatttcttagttattaagaaagaatttaaagaatcttttcaaaataggtagagattataaatataacttactaaaattagttttaatgccattaatggtaaaaatattagtataaatattgaaatttatcaaaaataagtgtaaaattatgcatatcatatgcattgataatagcacacttgccgaaaggcagggccgcaaagctatgggtctaaagaaatttattttcaatgattgccaggttgccaaaatgtagttatataaacattagtcatttgtttatttttggtgcctattaataattaataggcacctttttattttaatagaaaatcattgaaatatgtgtatatgataagaatttaaataaagaaaggttaggtgtagtaaatgaaaaagtatcagttgtctttggacaaagcaaaaaaggagattaatataaggatatggggaatgtttgaaccagacgatgctaatagttttgttgaagattttagaaaagaactatctcctatacaaacttcagaatatgtattaaattttgacgcaagagagttaaacgtttcaagacaagaaatgttaccgatgttagaaggatgttttcaaatgtacaaggcttgcaagtttgtaaaggttatagcaaatgttggtagtaatataactttaaagatgcaattatcaagaataagtaggaacactggattgggaattgaaataatttaaaacaatacataatttataatattaaatttaattacattagctaggagattattatgggaataagattaagttgcattgatatttgtcatgcatctaaagttgtttcaaatgatatttatataaaacattttgaaaaacaagataaggatgtagaacatttattggtagatgtaatgggtagagataaacgctttatgtttaatgaacaggagacaactttatctctagcagtaaaagtagcaaaatcagcattagataaagctaacttgacaggtagtgacatagatgtgctagtatattcatctatattatctgaatatgtagcaccagcaacatctattttaatacataaggaattaaatgcgggaagaaatgtaatgtgttttgatatgaatgcaaattgtgctggtatgactgtcgccttagagaatatatcaaattatttagaatcgtcaaagcgagctaaaagagcattgattattggttgtgatgatgtcgattcgttagctgatcccaataatgagctttgctatggaaattatggacatgctgcatgtgcaatgattttggaaaaagttgaagaagagtgtggaatagttgatgcagaatattatataaacacagaggaaagtcataatattatgtatccaagtaaaggattctctaatttcttcaaatcaaatgatgtaggtgagctttatttgaaatggttgccattcgatggtggggcatgtgtttatccagcagcagagattgctaaaaagatgctgaagaaaaatggcttagaaaatgaagacattaaaatgttctgcttttctcagtttgcgtttataaatataaaaaatataagacaacttttagatataggagaagataagagtatatatatagggaataaatatggatatactggaactactagccctttcatagcattgtatgaatcgataaaggaaggtaaagttaagagaggggactatgtaattttctggactattggatctggttctcagagtatagttatgttatataaatattagtattagaaaacgcacttcataaatataaccttctgtagtaaaatctatagaaggttatatttatgagtttgatgctattatatgaaatgcaagtaagtaaatatacttcagataaatatatattagaatatcactaatttaagaataaatgcttatagatgatttaatgaagtagaaaaatatatagagatagcgttagaatttaaaaaatactatattaattaaagaataacaggggagatggtttgataatgtacgattatccactatatagacctccaagtgaaagtaatagtcttataatacaagtaactttagggtgttctcataataagtgtaatttttgtaatatgtataaatctaaaaaatttacaataaaatctttcgaagatatcaaaacagatgtaaattactttagagaaatgtattcgcatgtagaaaaaatatttttggcagatggcgatgcattaataattccaacggaaaaattaaaagaaatattaacgcttataagaaatacattttctgaatgtaggagggtaactctttacgggacacccaaatcaatattaggtaaaactcatcaagagttgaaagaacttaaagatttaggcttatatatgatatatatgggcgttgaaagtggaagcgatgaggttttaaacgatataaataaaggagtgagtagtaacgagataattgatgctgctagaatagttaaaaatgctgatatcttactatcagtaacagttatagctggagttggtggcattgaaaagagcgatattcatgcaatcaaaacaggcaaattaataagcgatatggctccaaattatttaggcgtattaactcttatggttgaagaagaaacggatttgtataataaaatattaaagaaagaatttaaacttctaagtgatagagaaatattaaatgagatagggatattaatacaacatattaatgtcaatgaatcagttacatttagatgcaatcacgcatcaaattatgtttctctaagaggaagtttaccagaagataaagaaaaattgcttaatcaaattaactacgatttaaaaactaatcaaataaaacaagaggaatatagaagattgtaagcaaacaattgaagttaataatccagcatttgatgttattgggataaaatccattgatggagcaggagagtttagaagtgatacagacggtagaatacaaaactttagggcagcgattaagcagttaaaggatataggggagactcggtatatcaaaaatattgatgagaatgatattagaataattggagctgtagtggttggaagaccaaaagaactaaaggcaatcgagaataatcctattataaaacatgctgtcttaggcactgtggttgataaatattaattaaagggaaaaatttaattttagcagtaataatgcaatagttgactataaaagtaacttttggttctagactgaaagttactttttttatcctctagtagtttatattgtaatgaaatctgaggacattgtgctccttgtaagtgtaaattatggaaaaggctgattcacatttttaagaatgtatatatttttcaagctaaggttaatatagtaaatgattttatgaaattaaaatattaagtatattacagggaggcaaagtatgagcatgtttagaacaaagttaattgataatattatagggcttgttgaaaaatgttattacattatattaatagctatattgttagttgcctcctttaatatattttacaatttaggtgtcattcctatatacagctgggatgaggcacgacatggtgttagcgcttatgagatgataaaaaatagcaattatatagtaaatacatatgcttataaaaatgattattggaatttaaaaccgccaataagcttttgggcaatagctatgggatataaatttgcaggatttaatgctttggggctaagggtattttctgcatttgcagcaataataactatagtacttgtagcaatttttagtttgaatatatatgggagattgacagctctgattgcgacaactgttctaacaacaacaataccatttattacagagcattgtgcaagaaccggagatgcagatgccatatacgttttattttttacaatatcggtaatgtctttaattttaatggaaaggagtattaaatggatatatgtatttggattatcattttcagcagcttttttaactaaaagttttcatgcaggtaatatcttttttataggaatactatatttaatatttagtaaaaatttatttaaattaacattaaaacaaattttgacatttgtattgagtgcatcttttccgattcttatatgggcaatcttgagatatgccaatgatggaatagctttttttaagaccatgatagaatttgatttgatggcaagaacatcaagacctttagaaggacatattggaggaaagtgttactacattgaacatttgcaatggtcatatttttactggaatcttgtatttgtagctgttagcatgacatatttgactatagcgcatagatatattacagacaggaaactaataaattgcaatttgataatatggctgtcgatgattattccgtttatattatatactatttcaaaaacgaaaatttcatggtatgttttaccgatatatcctgccgcagcaatatggataggatatgcatcaagttttatattaaaagagcgtaatagaaattttgctacacaaatagtattggttgctatgattatattatcgatatataaaagtgaagaagttatagtaactagaatttcaaatccaaaagaggacttgagtcaagagcttattcaggaaatcggaaacttaccagaatatcgcggagaaaaaatatatgtaaatcattttgagcaaagctattggctggatagcgaactttatgcagatttgactccattagaaggtggcatagaaggatttttgaaagataatgaagataaaacattattatttattaaaaaagaagatttggactcacttggaaatgaaaaagataatttaaaagctatactcgaaaatgatgaggcctatatttttgcaaaataatataattatggttttttgttgacgaaattcattacgaattatacaatagaaaaagtgttttgtttaatattatatataaaaatttaaaattgagtcaggagatgattagcatgaatgagtcaactcaaaagaataaagaaaatgttattcctaaaggtttaaaaaaagaaataggacttattgaagctattactatagttataggggtagttatagggtcaggaattttctttaaggcgtcaacagtatttaaaaatgcagggacaccaactctgggaataatggcttggctgattggtggatgtataactatagcttcagctttaacagttgctgaaattgctgtagcaattcctaagacagggggagtctttgtttatattaaagaattatatagtgaaaaatgggcatttttgtttggttggatgcagactttaatctatgtgccaggggtggcagctgcattatcaatagtttttgttactcaagcaacttattttattccagatttaacaccaatgctgcagaaaatattcgctatatgcattctattttttgtaatggctttaaatgttctatcatcaagacttggcgggaaggtacaagtaatttctacaattggtaagcttgttccgataatttttattgttatatttggattaataaatggtacagctcatgatttctcgactacggtattctcatcaaatacatcaggagcagcaggatttggagctgcaatacttggtactttatgggcctatgacggatggattagcgtaggaaatatggctggggagcttaaaaatccagaaaaagatctcccaaagtcaataataatgggattaatagcaataataatagtgtatatattaattaatgtagcgataataaatataatgccagttaacgatgtagtactttcttccaagccagcttcagatgcagcggtaatattgtttggaaatatgggagcggctttaatcgcggtaggcataatgatttctatttttggagcgctaaatgggtatctaatgacaggtgttagaattccttttgctatggctcaggataatcttttcccttttcctaaattttttgggaaaatcaatgaaaaatttgagactcctataaatacatttgcttttgaagtattactagcaagtttatatgtattaagtggatcttttgacaaacttacaaacttggctgtgtttgtaatgtggatattttttgttatgtgcgtatgtgggatttttatattgagacgtaaacataaagaattaaaaacttcatacaaagttcctttatatccaattgttccattgatcggaatagttggtgggctgtacatattaataagtacttttataacagattcattaagtgcaatatatggaataggaataactttaataggtcttccagtttatttttatataagaaaaaaatataaaagagattaatattatattgcaatacagactaagtaattaaaatcaatcgcttagtctgtattttttatccttaattatgtaagaaacaattatgtttttatgattaagcacctttagtaatattttcattaatggtattggtccattttccacagcgatctccaaagcatcctattattatactatcatcttctattcgtacaacttcgcaccgattagagcagccttcacattcaaagctagtggatataaaactagaatcagcaatatcaaagcctctaaagttagtagcgccggtcttgtcaacagtttctttagcaataattgcggcacctatggcgcccataacattataatgttcaggaatgtatacttcacatcctaaagctttttcaaaagatgccttcatacccttgttagctgctacaccaccttgaaagaatattttagggcatatttcttttcctttcccaatatcattgagataatttctaacaagggcttcgcataacccgtttataatatcaggctcattataaccaagctgttgtttgtgtatcatatcagactcggcaaaaactgcacatcttccagctattcttagtggagttgttgattttaaagcataatctccgaactcttctattggaattcctaatctttcagcttgcctatcaaggaatgatccagttccagctgcacagacattgttcatcgcaaagtctatagcaactccatcttttaatattattatttttgaatcctgtccccctatttctaaaattgtcctaacatcgttatctatagcaagtgcagcacatgcgtgagctgttatctcattttttactgcatctgctccaaggatagaggatgcgatttgtcttccactacctgtagtaccaacagctttaatttgttcatcatcatatttctctttcaagattttaaacccctgttggatcgcatttattggctttccttttgttcttaaatatagtttatctacgacattcagattattatctaaaagaacaatgtcagtacttactgagccaacatcaacacctaaataatacatttttgctttctcctttccaatagatctaggaatgcttctattcttgtaatatatcctgtttcacccgtcatttcgtcaactacaagagttaaaatagggaaattcttatctttagatatggaaggaagcacagctttgcaaacaatttctggcatacatcccatagggaatatttgtatggcaccatcaaagccatcatgtgccgccattactgcttctccaatgcattctcgtgcgtgtcctccaatatataatggaagatattctttagaagcttttcgtatgtctaaagaattcattccaacaactgacataatagagtttttagcccaccagcttggcgtaagttttctttgggttgaaactccatattccataagtttatcctcaataaaaaggttcgaaaatggctctattattgtatagatttctcctattattgctacttttattggattcctatcactacatatctctagggaatctagtcttttatcatatttgtttagtatttttatcatatcattaggactattactattttcggcatcaattttacaattgcttaagagttttttacattcatttttatttttttcataccctgctaagtaatgtgcttttgcctctattttatctattagatttaaaactttaaatcctatgcgtaatgcatttagcttttgcggcatatttttattgctgctagatgagatggaagatatcctatttagaaattcttttgggcctatttctgacggtttatctaatacaataaaatttaaattatgtcctaatttttttagagtgtttatttggagttcgcaatattctccatatctgcaaggtccgcagcttccagtaattattattgtatctgcgccttgttcgattccctgtatgtaatttcccatcataagtttaaatgggaggcacatatcatctggagaatacatagatcctatttctaatgattttttactgttgaattccggaattatatagtctataccaagagtatcaaacactgctttagtaaccagatatgtatttcctaaatgaggcgtcataattttcataacattacttcctttctaacatgtcgacaaaggcttctattcttgtgttaaatccagattctccagtatgttcatcaacttttaatactaagaaaggaaaatctttcactttttgttttataagagctataacaacagaatcaataccacaagcaaacgaagatatgtatactataccgttaatttttttattttctgctaagtatgtagatgccccataagcattttttgcaaatgtccagaaaggtcttttaaataattcagttgttttgtcagcaatagaggcttcgtctataaattcttccgttataataccaacacctaatttatttaattttttcactaagttcatattcacaaatttatcataaatattgtaaggatggccaattagagctatatttaatttatatccatcgcttttaattcctatttcatattcatcttgtgctattaaagctttatcataagcatcccgaattctttttttgtttgttgttattaggcttccagttgaaactatccatttatataatttttcttttgacgttgcataaataggaaccatagtaacttttggcatattgggaatgctatttatgatcatttcaggtaagccacaaaattttggacagataaattcatgttcacttaattgcataattctagggataaccattaaatcacatttatcttttattgcatttacatgaccgtgaaaaattttaataggcaaacatgcttcatttacacaattctttacaccttcatctaatattgttttgtttgtatctggtgatctaacaatatctgcaccaagttcagaaaagaacttctcaaggaaagcagaatatttgtaatttaataatccattgggaattccaaccttcatatacatttcactcctataaaattcatgctcattattatatttttttcaaaattactagaattattcataaaaattggattaatttatattttactttaaagttttacattaaattattaaaataccattttatctaatattaaaaacaagaaagtacttttagatatatctatataaattgttgtagatggtatttttttatagtatacttacttggaaatttatatatttaagggatctataataacttttgagttcttgacctcttaagttcatattttaagatctatgtacaaggaaggaaatgacataaatatgaaaaataaatcacatataattccatactttactgctataataactaattttatttttggattaagcttcttattttcgaagcaagcattaagtgtagctacgccaatagaattactttcgtttagattcttagcagctttgctaataatgacaattttgatatttttaaaagtaataaaggtaaattataaaaataagcctatgaagtggcttattattttggctgttatagagcctatagtttactttatatttgaaacctatggaattaagaaaacatcttcgtctttaggcggacttatgattgctcttataccaatagttgtgacagttttagctgtgtatctattaaaagaaaaaccatctcctaagcaaatcgtaagtataatactttcggtatctggagtaatactgataattcttatggaaaattctaatgattcaggagggagtactctattaggaattatccttctaggaggagctgtattttcagctgcattatttaatataatagcaagaaaaatatcacaacaatttacagcgattgaagtaacatactttatgatgcttattggagctatattttttaatattgtttcaattactaatcacgtgataaatgcaaatttatcagaatattttataccattaagaagtataaactttatagtatctatattatatcttggaatattatcttcagttgtagcatattttctggctaattatacgctttctaaaatggaagcttctagatcagctgtatttgccaatatatcaactatagtatctatcgcagctggtgtgctcgtattacatgaaaacttccaattataccatgtaataggatcagtgatgattctagtgggtgtatggggaacaaattattatcaaaaaaagcttaattcagaagagtttacaccaactgttggttcttttgaacaataagctatatgaatgtattagtcttctttctaatggattaaagttaaaactttcaaattcttctttaattatgtaaaatattctggtaatatttactatagagggggatgagaaagttggataattttaaggtgaaattagttactttcgtacttggttttgcaatagtgtcaagtttggctccagcaatacgtgtacaagcatcaacatcaacacaaagcactttaagcaaccaggcaatgaccgctatagctaaccttgataaaaagaaaaagacaatagtggttgatccaggtcataactacggtggtgatctaggagctgcatctacaattaaaggcataacgtataaagaagtagatttaaatatgcaggttgcatctaagttaaaaacggaattagagaaaagaggatataatgttgtaatgactagatatcctaaggaagtacaaacgatagggacaaatcagagtcttaaagatagaattacaattgccaatacagcaaatgcaagtttatttgtaagtatacaccataatgctgtaaaggatgctccagacgcaaaaggggtagaagtttattatagttcggcacagcaaagtcaaaattttaaaggtggggtatctcctaacaagttaacgataagtaagaacgtagcaacagttattgataacaatattgttaagaagtttaattttaatgatagaggtgcaaaggatagcagactattcataaaaagcacaaatatgccatcagtaattgtggaagcaggatttataactaacgaggaagaggcgaaaaggtgttcggatccagtgagtcagcaaaaattagcagaaaacattgctgaatctataaaaactgttatataaatataataatgaaaatgaagaacatgttttggtattaagttgataaatacttatatgaaacatgttctttttaatgtgaatacactaatatatagtttttagatatattgttgtaattttattttgaattataaatgaagatattctataattaagcttcattcgcagaatataaaagatcatttagcattttttcggtgaatgttccattacttaaggtagtaaatcttcctataggaatatttttaaagtaatttataagcttttcttgcgcatttgtatcagaagttatggattgagcagcgctgcttaataaaggctctacaatttccttagtttttggattaatgagaaaatcttgtgcgagtgtatctctagtataattagtcttaggtagatatggtgactgaacataaatgtttttagataaaggaagatctctagaagatttaccaattaaaatttcataaggaccgctttcaattacccagctatttgtgtttatatcatagtgagaaaaatcttttgtatcaatcaaaaaactcacctctttttcttcatctggaaaaagagatacttttgtaaaggcttttaattctttttcaggtcttaaaatgttactatcagtattctttatatataactgtacaatttctttaccaaaatattttccagtattttttactttaagtttaatttctaatgtatcattatcagttaatatatctttatcaagagttaagctgctatatttaaaagtagtataggacaatccgaatccaaaaggaaattcaacattcatattttttttatcataatatctatagcctacaaaaaccccttctttatactgtaaattattttctgaatctatataatctaaatatgttggagtgtctgacaattgtatagggaaagtagttggtaatttaccggatggattagcgatgccaaataggatttctgcaagagcacctccacttgcttgtcctggaagccaggtttctaaaatagaatcagcatatttggcccaagatgatatagtaactggagatccattgctaagtactacaattaaatttttctggactttacctatttccttaattaatttcacttgatcagtggggagatctaggtttacattgtcagcatattctttatcatagtattgtggagttcctacaaataatataactatatccgcggtacgtgcagtttttcttgcatctgcaagaagtgtgttatcatcatcttctgaatttttagaagtattataacctttttcataatatattttgacggaacttccgacgagttttactatttcatcataggcattttcaaacattataggtatgacgttagaattaccatcaccttgacatcttgtttcttttgcatattctccaattatggctaatttcctattttttaacctatctttttttaaaggtaaaagattacgtttatttttcaaaaggacaatgctatcttcagcaacttctcttgctaaatcattatgtttttctttgtcataaatattgcattcacattcttttacaggtttaataactttagatatagtatttaatatatcttcaatagcattatcaaggattgatgaatctaaagtaccactaagtacagcttctataatttgttttgtattattaggtgagtttggaaattctaagtctaatccagcctgtaatgaatttattattgaatttactgcatataagtctgataaaactaatccgtcaaaattccatctatttcttaaaatatcgattaacaaatagtcattttcggtacaaggtattccatttattttattgtaagcaaccattacagcgaagggattagaattttttattacccgttcaaagtttgataaataaatttcatttaaagtttgttcatcaattatgttattaatattttgtctatgtgattcctggttatttccaatgtaatatttaacacatgcgccaataccctcactttggattccatttataaaagctgcacccatttcaccacttagaactggatcttctgaaaaatattgaaaatttcttccgcttaatggagaacgttgaatatttacagcaggaccaaagagaatattaacattttcagctaagcattcttcaccaatagcttttccgacagaataagcaagattaacatcccaagttgcggccaaggcagtaggcgtaggaaaacatgtagctggaacagggtcataagaatcacagtttatttttgataatccatagggaccattcgcaaaagttattgaaggaattcctaatctttcaatttctttagtttcccaaaggttttttccagaacagagagaggctttctcttctaaggtcatttcattgattaatttctttatatccactcagataccaccttatctttcttaatagtattaatttatacatttgaaattaaattgcaacatattttaaggaaaatttagctctcattattatatatttaaagtaaataatatatattacctttaacttttttggttattaatgtatgatatagttgtgaatgtaattgttttttaaggaggtaagaatgggaaagaaggcagttttttttgatatagatgggacactatataatcatgaagttggtgtgccaaagagtacaataaaaggtattaggcagctaagggagaatggtcatcttgcttttatatcaactggaagggcaagagcaatgatttcacaagatctaattgatattgggtttgatggaatactcgcatcttgtggttgttatgtagaatatgatggaaacgtagtttataacatagatttggaaaagcaaatagcggataatgcaataagtgctttaaaaaataataaagtattttgcattctagaaggacaagattatttatatatggatgaggaggaatttatcgatgataaaagatcttcaataatgatgtttaaaaataaatatagggaaaaaataaagccaataacaggaaatgaacatagtttcaataaaattacatgcagaacatatgagaatagtaattttaaagaagcatattcaataatagaaaaggattttgactgcatatgtcatagttcagaatttattgaattagtaccaaaaggattttctaaggtaaagggaatagaggcgattatagagcgtttagaaattgatattgaaaatacatatgcatttggtgatagtttaaatgatatagatatgctaacatatgttaaatatggagttgcaatgggaaacagtagtcctgagattcttgatgttgtaaaatataaaacagataatattgaaaatgatggtatttataaaggattaaaacagtttaaattaatatagcaatataattaataactgagtatgatattgaaattatgtcactagtaattttagcagtactaatataaattatatatttttcactgtatataaatttatttagaattaaaatataagtaaaattagttgagagttatcagccaaatataaacaactatccaattagagggcaattggatagttgttttattatttatactggcttattttacactttatgtttgatttgataaaaaataataatatgttaaaaaaatgttgtaaatatgaaacattggtatagtaagaatatacaaatatgcttaatttttagaacaaacagacagaataatacaagcattgacttttaaagataaatcatttaaattataatcagatagttgtttacataatacaaccaatttatgcaagtatttcacctataaacgtttgcaaataaaatatgcttgcaattatttttaatataatttataaaaggctattatttaaatagattggaaggattatgtagtaatatagattgaaatattattatcttaatgaagttatgatgaaactggaggggattatttatgaaaagaatacttgtagttgatgatgctgcatttatgaggttatctttaaaaacaatgcttgaaaaaaatggttatgaagttgttggggaagcagaaaatggtcgtaaagctgttgaaatgtataaaatgctaaaccctgaacttgtgacaatggatattacgatgcctgatatggatggcattgaggcattaactgaaataatgaaatttgattcaaaggctaaggtaattatgttaagtgctatggggcaagaaaccaaaattagggaagctgtaattcaaggggctaaaggtttcgtagtaaaaccatttaaagaagattatcttgttaaagcattaagcaagttttaagagtgtttactaaggaggacaagcatggatactagagaaccgatgctagaaatgtttatattcgaaacatttgatatgatagaacaacttcagcaactcattattgatagtgaaaagaataagagactagaaacagaagctataaatgaaatatttagaataatgcacacaattaaaggttcttctgggatgatgatgtttgataacatttctaatctttctcacactatagaagatttattctattttattagagaatcaaagccagggaaaatagattattcaaaacttacagatttagttttagaaggaagcgatttaataaaaatagaaacagaaaaaataaataataataaagacacagatggagattttactttatttatagagaaagttaaggggtttttaaaactccttaaaacatacgatgaaaattcagaagattcgggaaatggcgggtcagatgaattagtaagtgaggaagatgtagaacaaaaatattacttaagcactgatagggtaaattcgaaccttaatttatttagtgctactttgttttttgatgaagaatgtgatatggagaatataagatgctttactgttgtgcatcagcttaaagagatttctgaagtttcatattattatcctgaagatattattgaaaataatgatacgtgtgaaattataaagaagcagggatttaaaatatttttcaagacaaatcaaagtattgaggatattagaacacttttgatggaaaatgcttttttgaataatgttgatataaacaaattttatagtgaaattgaattcagtgagcaatttagtaagaagaacgaaaaaccacaagaagatattataaagtcaattaataatatagttaatgatacaaatgacaatgagaaagtagcttctaaaagcttatcgtataaacaaagtttaattagcgtagatgtaaataaattagataagttaatggatttagtaggagaattagttatttcagaagcgatggtaactaaaaatccagaaatatctgaattgcaattggatagttttaataaggcagcgaggcagcatagaaaaaggctttctgatcttcaagatgttgttatgtcaataagaatggtatcacttgccccgacattaactaaaatgaatagaatagttagagatatgtgtaagaaattgaataaggaagtagaacttgaaataataggacaagagacagaagtagataaaaatataattgagcatataggtgatccattaatgcatatagtaagaaattcaatggaccatggaatagaaaccaaagaagagaggttagtaaatgggaaaccttcaattggaaaaataactattgaggctaaaaacactggtggagaagtttggattattataaaagataatggtaaaggccttaataaagataagatattaaaaaaggcaaaagataatggactactaaaagtaaaggaaaacgatttgacagatagagagatatattcaatgatttttctacctggtttctcaaccaaggaaaatgttacagaattttcaggacgtggggttggaatggatgtggttacaaaggagattgaaaaaatcagggggattgtgacagtcgatagtatacctggtgaagaaacaacaacttctataaaaattccattaactcttgcgattattgatggcatgacaataaaggtaggaaaatcagtttttactattcctgttacttcaataaggcaatcattcattataaaaaaggaagatattataagagatatagataataatgaaatgatattaataagaggagaatgttattctatattaaagcttcatgagttctataatataaaaactaatgtagtaaatatagaagatggtattgtaattatggttgaagatcaaggtaaagcaaaatgtattttcgcagatgaacttattggagagcaacaagttgttattaaggcacttccagaatatataaaaaaggtgaaagcaataagtggttgttcattattgggagatgcaactataagcttaatattagatatatctgaaattgttaacttataaaattgcgttatgggaggattagaatgtcagagttagtggatgtaatgattgaaaatgaagaagatactcaaaaggataaatacctaatattttcgatcggtcaagagtgctatggaattgatattaaatatgtaatagaaataataggagttgagccaataacagaggtgccggaattacctaagtatattaaaggtgtaataaatctaagaggaaaaataataccagtgatggatgtcaggattaaactgaaaaaagaggaaaaagaatatgacgataggacatgcattattgtagttgaaattgaaaatatagatatcggtttaataatagataaagttatagaggttgccaatattgatgaaagtaatatttctcctcctccaaaagtaaatttagagaaacacaattcaaatagttatataaagggtattggaaagattcagaatgaagtaaggcttcttatagattgtaataggcttttagaagatgatgaaatagaagaattaggaaatggagaaagttaacaattataagagcatattaagtaagttttaatgaaattacgttcagataaaatttgaagaagatgagaggtaaagaatatgaagtggtttttgaatttaaagataaggagtaaaattttaacggcgtttttaggaattgttatattaatgggaattgtaggatcggtggggatttttaatttacaaaaaatcagtaaattagatagtgatctatatgaagacaacacaaaagctattagttttgccagtactatacaagtaaatttacaaaaaaataaggtattgtgcagaactttgttaattgaaactgatacatataaaaataatgaaagtaagaacataatatctaaaaatgatgaagaaatagataaagctatggaagagcttaagctcacccttaaagatcaagaattagttaatgaatataataatttaaaagtaaatatggataaatacagaccacttagagataaatttattgattttgcgttgcaaaataaggatacagaggctgtaggtatcatgaatggtgatgcgggcatattctctagtaatattgataattcagctaccaaacttattgagctaaaagaagcagaaggtaaagtgaaggctgacattaattcaaaagctgcgagtagtgcaattattataatgcttgtagtaatttctatgggaatagttattgccttagtatttggaattataatatcgggattaattagtagaccaataaataaagtattaactattcttggtgaaatgagtaaaggacatcttggtgaaagggtagacatatcaactaacgatgaaataggacaaatggctaaagttatggactcgttttctacgacattacagaatgatgttataggggctatgaataaaatagctaaaggtaacatggatattaatatagttgcgaaagatgaaaaagatgaaatagctcctgcattaaataaggtggtagaaaatgtaaggatgcttgtgacagatgtaaatatgttatcaaattcggcaatagaaggaaagtttgaaacaagagctgatgcaggaaaacatgaaggagatttcagaaaagtaatagatggagtaaatggaactttagatactgtagtagataaggctgtttggtatgaggctattatagatgctatacctttcccaattcacgttacagacaatgatatgaattggacgtatatgaacaagtcatttgaaaatttaatgattaatcaaggtgtcattagagatcgaaaatctggttacggtttggcgtgtagtcatgcgggggctaatatatgtaatactgaaaaatgtggtataaaacagctacataagggaaaatcagaaagtttctttgaatggtgtggcatgagcaataagcaagatacgtcttacttaaagaataaaaatggtgagaatgtaggatatgtggaagttgtaacggatttaacacctatcattagggtaagcgattatacaaagggtgaagttaagagacttgagggaaatctaaagcttttggcatgtggaaatactaattttgacttaaaaattaaagaagcagatcaatttactgatgaagttagccgacaatttgaaggaatatctaatagtttaaaagatgttaagagtgcaatagataatcttatatttgatgccaaaatgctgtcaaatgctgcgatagaaggaaaattagatataagagcagatgaaacaaagcacagtggagactttaaacaggttgtagagggcgtaaatcaattgattggagctatggtagaaccaattaaggaagttacaagtgttatgagtgaaatatctaaagggaaccttgatgttccagtaagtgaaaattataaaggggaattcggaattctagctaaagctgtcaatgagactgaaaatggattaaaacgtgttgttggagagatttctgatataataggacaaatttcacaaggtaatctcaatattgaaaatgcaaaagagtttcatggtaattttaatagcatatcaatttctctaaatacaataatagattcattaaattcagttcttagtgaaataaataatgtgtcagaacaagtttatacaggtgcgagccaggtttcagacggtagtcagttattatcacagggagctacagagcaagcaagtgcgatagaacaattgacatcgtcaataaccgaaattgcagcacaaactaaggaaaatgcttttaatgcgaatcaggctaaggagttagctcttgaagtaaaagtaaatgcagaacaaggaagtaggcatatgaatgaaatgcttaaatctatgagtgaaataaatgaatcttcagcgaatatttcaaaaattataaaggtaatagatgaaatagcatttcagaccaatatacttgcgctaaatgcagcagttgaggccgcaagggcaggacaacatggaaaaggctttgcagtagttgctgaagaagttagaaatctagcagctaggagtgcaaatgcagcgaaagaaacaacagctcttattgaaggttctataaagaaatcggaaaatggaactgaaattgctaataatacagcaaaagctttatacgaaatagttgatggggtatctaaagcagcgactcttgtatcagaaatagcagcgtcttcagatgaacaggctactggaatatcacaagtaaatttaggaatagagcaagtatcacaagttgttcaaacaaactcagcaacagctgaagaaagtgcggcagctagtgaggaactttcaagtcaatcagaactgcttaaagatttagtttctagttttaaacttaaaaatgataattcgagagggagagtaagcaaaaatagtaagaactatatattgagacaatcgtatgatattggagacaactcgctagataaagaagtggcagttacttcaaataaaaaaagaataaaactaagtgatagtgaatttggtaaatactaatctacaaagataaaggtaggaagagaaaattaagagaaatttttattttgcttcctaccttaattatatagaatgagataagataagcggtttattcctctaaaataaggatagtattaacaggagttaatatatctaaagggaaaggttggggaatattgtggggaatgaaagagaaaatatgtataagtttgaccgagcactgacaaaagaagaacttttcaaacttaaagaagcagcagaggcggccaatagagctaaaagtgagtttctagcaaatatgagtcatgaaataagaactccattgaatggaataataggtatgacagatttgacgctttcaactaatcttacagaagagcaaaaagaaaatctgagtattgtaaaaagttgtgctcattcgttattatcattaataaataatattttagatttgtcaaaaattgaagcagagaaagtcttgattgagaatgtgaattttaatatacaagttcttattaaaaatgtaatatatactaacttgccaaaggctaatgaaaagtatatacaacttcactatacgattgatgagaatattccgcaagttttagttggagatgtatatagacttgagcaagtattaaataatttagtttctaatgctgtaaaattcacagaatctggatttgtaattataaaagtaagaaagataaacaaaagtaaaaatcaatatgaaattcagtttgtggtcgaagatgtagggattggaattagcagagatgagatgcaacacctttttaagagttttagtcaggttgatggatctataacaagaaaatatggaggaacgggacttggactttctatatccaaaaaacttgtagaattaatgggcgggaatatagaagtagagagtgaaaaaggagttggaagtaaattttactttgctattaaattagaaaaggcaatgaatgatattggagaattagatcatcaaaaaataaatgatgaaaattctaagagtgaaaaaattctcgtagtagaagatgataagatcaatcagatagtgattaaaaaagtgttgaaagagctgggatatattaatataaagattgcatcaaatggagttgaagctttgaaatttattgaaaattacagatttgatttaattctaatggatgtacaattgcctgaattagatggaagtgaaactgttaggataattagaaaaaatgaaataaaaacaggagggcatattcctattgtagcgatgacggcctatgctttgaagggagatcgagaaagatttttatcacaaggcatggatgactatatttcaaaaccaatagatataaataaacttaaaaaaattttagaaaggactctaaagaacatcgacttagaggcaaaaagcaccattcaactattcttaagaaatactacatataataataattttattatagttgataaagagattaaggagacgttgttaaaatggttatatagcatggagagatattttattaaagaaaaaacgctagaagattacattaagattgaaaatatagctcatgaaataaaagaatattgtgaagaaaatagtttgaataatattaagattttagcatttaaaattgaacttgcggcaagaaagaaagatgagttgggaattaaaaataactacgagaaaattacaaatagtttataagttttatactatatattttataagggggcttaacagtgaaaattttaatagtagaagatgatctttcaagtagaaagcttttgtttaaatttatgtccaagtatggtgagtgtgatatcacacttgatggaatggaaggattagatgcctatttaattgcattagatgaaggagaagcttatgatttggtgtgcttagatataatgatgccaaaggtagatggagtaaaggttctaaagactattcgagaaatagagaagcaaaaaaatattgagaataataaaaaagtaaaaataataatgacaacagctctaaatgatgcggacttagtcaaaagtatttttaacaatggttgtgaagtatatgcgacaaagcctattgatataaaaaaaatggatcttgtaatggaaaaattgaactttaaaaagatagaataaggcttttaagtgtattaagtatattattcaataggcagtataaaatatatcataaacaaataattaataatatatatatgctcaatgataaatctacataataaaacttttatcacactaagtgatagtaattacagaatgtagagatttaattgcaaaatagatattagagaatgattgtatttttgaagaaaaattctttatttttttgggataaagatatataatattattaattaataattattatttgtaagtaaaaattattaaaagatttcaggaggatatgatatgaaggttattgtaattggatgcacacatgcaggaacagctgctattgttaatttaaaggaattatacccagatagtgatgtcgtagtttatgaaagaaacgataatatatcatttctttcttgtggaattgcgttaagtataggaggaatagttactgaaacagaaaaattattttataattcaccagataatttgagctctttaggagttaaaacaaagatgaaacatgatgttttagatatcgactttgataataaaattgttaaagttaagaatttagaaaatgatgagatatttgaagatagttatgagaagttagttttaacattaggatcttggccaataatacctaagtttgaaggtggaaatttacaaaatattttattatgtaaaaactataatcatgcaaaagaaattgaagctagacgcagtgatgcaaagaatgtagttgtaattggtggcggatacatcggtgtggaacttgcagaagctttcaaaattcagaataaaaatgttacattaatagacgctgaagagagaataatgtctaagtacttggacaaagaatttactgatattgcagaaaaggaatttagagatcatggaataaacctagttttaggggaaaaagttaaattgttcaagggagagaatgataaagtttcacatgtagtgactgataataatgaatatgaggcagatttagttatattatgcattggatttgcaccaagcactgctcttgtaaaaggtaaattggagacgcttcaaaatggtgcaattatgattgatgaatatatgcaaacaagtagaaaagatgtatttgcagcaggagattgctgtgttgttaagtttaatccggctgatgatacacgatatatacctttagcaacaaatgcagttagaatgggaactttaattgctcataatatagttgaacctaaattaaagtatatgggaacacaaggtacatcaggaattaagatatatgaaaaatgtattgcatctacaggattaactgaagaagttgcaaaaaatacaacatcatttaatgtaggagcagtttctgttacagataattatagaccagagtttatgcctacttacgaagaagcattattaaaattagtttatgataaagacagtagaagaatacttggaggtcaaataatttcgaatttagatttaacacaatttatgaacacattatcagtagtaattcaaaataaaatgactatagaagaacttgcaatgacagatttcttcttccaaccacattttaataaaccttggagtttactaaatatagctgctttgcaggcattaaaaaatatataataaaaattcttataataggtgttaagtaaaaaaatcattggccataattttgtggcaatgatttttttactttaattagatgctaattatctaaaagtcttatattttttcctattatttcaatacctttttttatatcttcatcacttactcgaccaaatccaattctaaaagtatcataaccttttaagcttttctttctatgtgtaataggcttgttatcatctgttttagtgtgaaattctacattgtcattggaattttcataaaaaatatcaccaggcataaataatacattatctttatagcagagttccagaagagttcttgcatttatgttgttctttagctttatgaatacatgaaggccaccctcaccagttatatattcatatggaatatatttttcaaccatatctagtacaagattgtatttatctctataatattttcttacatttttaacatatctgctgaaggcaccactttttaggtaatagaaaaatgcgctttgatctaaaaaagaagaatgaatatttcttccacgttttacactttctaaagtttctataagattatcatctgcgaatatccatcctattctaagaccggggaacagtattttagaaagacttcctatatatatgactccattaccagttccgcatagtgatgctattggatcaattggggagcttgagtagagtaattcttcattaaagccatcttctattataggaacagaatattttctaaaaagtttatatatttcctttcttctttcagttttagttacgattccagttggattattgtaagacgggatcaaatatccgaactttggattatatttgcttaaagcattttcaagagatactaaatctaagccttctttatccatttttacttgaattatctttagtccataggctttcataatttttaaagctgtattatgtgttggttcttcacataaaataatatcaccattatttgttagcgaactaattactatatcaaaggcttcggtaaatccattagttactaaaatatctttgttattagtatcaactcttttatctctcatataatctaaaaaataatctattagcggcttatatcctttagcataaccgtaattcaatagattggcttcttcgtaagtccaagcatctaacagagatcttttaaaatcatcaagattaaagagatgactttcaggggaaatggatttgaatgatatcattcccttcttatacggcaattcactttttatgatatcaaacttctttaaggtagttccataattgttaattcttttagaaaaatctacattatattcataactttcattttcactttctatggagataaaagtgcctatccctctttttgttgttattactcctatgctttctaattcttcataggctgaaattacagaatttctacttatatttaaaaatttacttacttcccttgtagatggaagtttgctatctttttttaattcaccgtttttaatgccttgttttatatgtctttcaatttgaatataaataggttcatctttatttatattaagattagaaaatatcaatgctgaatcacctcactactttagataagtaacaataaatctaataagaaaacatctaatgtttaaattatattgttaataccaatatctaatcaattttataaatgtaattaaactgtatagaattaatttatttcaattattttagatttaccatactatttcttttgtgtcaataaaatgatgcgatagttattgaaaataaagatatggagatattaaataataatatatattaactagtaatatatttactcactaaagcaaataagtgtataattatattatagaataacgtgaaatatgataaatggaatgaaatactgttatagaaaaggaggtaatgtgtttatgaaagggaccgttgtatcaacatggatgaagacaaatagaaagttgtttggagactcaattgttaatgaagcaatggattatataggttggggaaaaacaaaaatattttcacctattgaaaatgtagacgatggagaagttaagaaaataatatcatacatagctaaatctcaaaatatagaggtaggagctctttggagaaaaattggacaagataatataaaagcttttagtcatgattatccggcatttttcaaacatgacaatgtatattcatttttaaagtccatgtttgatgtacatgtagtgatgacaaaaaagtttgcaggagcgaagccacctttggtatctatagaaccaatatctagtagggaagctatctttagctataattcttctagaggaatgtttgactattttttaggtatgcttgaagggacttgcgaacactttaacgagaaagtagatataaaagaaatatcaagaacaagcagtgagcttaaattaaaacttacttttgaaagagatatatattacaataaaaaatacttttttaatagagttttttctttgggtattataaaaagttttggggcaaagacaggagtattttcatttataatatcagctatagtttttttgataatgttaggaataaatgatattacaaaggttttaatagggagcctagtatctgctttagctacatttgtaggtgtttctttaatgatgtcacctataggaaaaataaaagaagaaatagaacgaataattaaaaatgaatacaatattgatggaaaaatcaccactaatgatttctttgaagaaatttatgatttacttaaggaacataaaaaagtaattcaggcagatttcgttggatttaaaggtgttacagatgaaatgaatacttttgtaaatacaataaacaagatttctgattcgatgaatcatacttcaacagaaataagtggcgttgttgaacaggttgcaaatggagctgttacacaagctcagaatacagataaagccgtacaagcacttaatggaaacatcgaagccttaaggaatatagttgaaaacgagaatgaaaataaatcagaacttgaagatgccatgcttaagattaataatagctatgaaaatgttgaaaatgcaagtaaaaatattttgaaatctttacagagttttaatgaagttaaagagaagggcacacagcttgaaggaagggctaaagatataaataatattgtatctatagtatcaggaatagcagaacaaactaatttattagcgttgaatgcatccatagaagctgctagggcaggagagcaagggaaggggtttgctgttgttgcagaatcaataagaaaacttgctgaacagtccaaagaggcagtacttgatattaactctaatttagctcaatttgttaaagaaataggtttcttagtggatcacatagatgttcaatatgatgtgttagaaagagaaaccaataacttagacgttgtacgaaatattagctatgaagctaatcaatcagtgcagagtgtagcaacttctatgattgagactataagcaagttaaatattgaagctgattctatatctgatgtatatggtagtatagagtcgttagcagccattgcggaagaaaattcagcatcatcggaagaagtaagtgctagtgtaataaattatacaaatgagataaaaaaacttatagataatatatctgattttaaaggtattacaaaaacctttaaaaatgatctagagaaatataaaatttaacttcatgatatataaaaatacctactaaaagaaaatgatttacttttagtaggtatttttattaaatattaattgaacaacttggttgtaaattaagagcagccccaaatttttgagaagctgttataaagcatattagagcaataagctctgaaatttctttttcagaaaattcattatttaaagggatgaaatcctcatcactaactgcagaattttttgaaaatgagtttgcaaatttggtagctgctaaaatttttgaatcgtttatgttatttaatggcttacctttagccatacaatattcacagccattattaaatgccaaagtgcgtcttacctgttcttttaattcagaagtgaatgtattggtagagaaaagaagattctctaaatcggaccactttaacataatatctttattgtgtcctaatagtttttgaaatggtgtatttccttcttttgaaaaattgattcttgccataataaatctccttttatataatattaacaattaatattatataggagttatagttttatttgcattccaaatgacatataatactaatgataaaattatatttgaaataaaaaacatactaggagtgttacagatgaaatttgatgaaatagatatagcaatattatcagagttgcaaaaaaatagtaggttgtcaataagggaattatctaaacgcataaatttatcacctccttccgttacagagagagtgaacaagcttgaagatagtggtattatagaaggctatacaattagaataaataagaaaaagctgggattatcaattgattgtataatgaagattacaatgaagaacggagaatataacaaatttaaaaattttattaaaaatcataaacgaagtgaatggggatataggatagcaggggatgggtgtttcttagtaaaattatctgtaaagaatttagaagagatagaagagtttataaatgatatatcagaatattcactgacaacaacaattattgcattttcagaagtagaaatagataataacataaataagtttatggaagatatataaataaatagttattaataaatatgcatgaacttacatatgaagttttaataatagctaggagatacagtatgtatatagcaaataataatattattcaaaaagggtttagtggattttctttgaagataatcgcattagtattaatgacaatggatcatatgcatgaattcttagcatcgactggaattccaatttggtttaattggcttgggagattatcggctccactttttttctttacaatggcagaaggctttttttatacagggaatagaaaaacttatgttaaaagattatatttattttcaatagtaatgtctttaggaaaatttatttcatggaagatatcagttgatgatccatcatattttccagtgagtaataatatattcgagacattctttttgatagcattaaatatattactaattgaatatttaagagatgaaaacaaagatttgtataggaaaatttatattatttttttagcgataatgtttgaagttgtattaccaataagtacttattcaatattttcaaaaaacatagctggaattattatatcctttttaccctgtccattgctttgtgaaggaagtgtttcatttgttgctctcggaataatatttttttatttaagaaatgacagaaaaaaaatgatgattgtttatgcaattttttcagtatcgttttttccattcgctagtttttcatttaagaatatattttatggttacaatcagtggattatgattttcgctataccgctaatgatgctttataatggaaaaaagggacgtggattaaaatatttattttatttttattatcccgcccatatattcatattatttttcttgggaggaattacacatataaactgaagttaaataatggcttatgaaaatgcaaaatggagatcgtgttcaaaagaataggatcttcattttgttttttttatatttgtatagtacataagctaatatttttaaaaagatatttattgatactatgtgaaaaagttattcagggcaattaaaatactcgttaaaaaaaacacaaagtattcttaatttactaaatataaattaaagttacttaatattttaaattttcagacaaaatgatattatctagttacaccaaacaacagcaaaatattaaatatcaaatgtaaatgtttaaatatagaggggatgttttaaatgaattattttgaagaaagtttaaaattacatgaagaaaaacaaggaaagatttcaatcacatctaaggttaaggttgaaacaagagatgatttaagtcttgcatacacaccaggagttgcagaaccatgtagaaaaattcatgaagaccaagaaaacgtctacaaatatacatcaaaaggaaatctggtagcagtagtaacagatggaagtgcagtgttaggactaggagatatagggccaatggcaggaatgcctgtaatggaaggaaagtcaattttatttaaagaatttgcagatgttgatgctttccctgtattagtagattctaacgatgttgatgagatagttaatacagttagattgatagcgccaacatttggtggaataaacttagaagatattggagcgccaagatgttttgaagttgaagaaaaactcaaaaaattaatcgacattccagtattccatgatgaccaacatggaactgcaatagttgttcttgctggtgttataaatgcacttaaagtagtagataagaagcttgaagatataaaagtagtagtaaatggagcgggggctgcaggaactgcaatagctaagcttttattatcatcaggagtaaaaaacttaattgcttgcgataaagtaggtatcttatatagaggcatggaaaaaattgatgatgctaaagatgctttagcggaaataacaaatccagataatataaaaggcaaccttgcagatgctttagttggtgccgatgtatttgttggagtatctgctccaggaatattgaagcctgaaatggttagagcaatgaataaagatgcaataatctttgcaatggcaaatccaacaccggaaattatgccagatgaagcaaaagcagctggagcaagagttataggaacaggacggtcagattttccaaatcaagtgaacaatgttctagctttcccaggtatttttagaggtgccttagatgttagagcaaaagaaataaatgaggaaatgaaacttgctgcagcatatgccatagctggatacattaaagatgaagatttaaatgaaaataatgtaattccaagtgctttagataaaaatgttgctacaaaggtagcagaagcaattgcaaatgcggcaagaaaaagtggggtcgcaagaaaataagataattcaatttgtacatgttgctaaaaggtaagaaatcagaattaatgcatttgtgacatgtacaaattataagtaaaacataattataaataattgtatcccacaagattataaattagagttgtttatataaaaatttattatgaaaaatatgtaaatgtttaaaaataaaaaaacaagattttaggaggtatatatatgcaaatcccaattaagaaaacacttgataaaataccaggtggtatgatgcttgttccgctttttttaggagtactagttaatactttttgtccgcaatttcttaaaattggtggatatacaacagcactatttagttcgacggcatcatcaacaattctggcttgctttatgtttttaattggctcacaaattaatttcaaattagcacctaaagcactaaaaaaaggtgcgctattaatatctggaaaatttatagtgggtgctggtatcggtataattgtaggaaaagtttttgggccagctggtgtattaggtttatcaccactagcgattctttcagcactaacaaattgcaacggtgggttatatgcatctctagcttcacaatatggggatgaaacagatgtaggtgcttatgctttattatctttaaaagatggtccatttttcactttggttgcattaggtgcatcagggcttgctcaaattccatttatgtcgcttgttgcagtgttaattccaataggaataggaatgattttaggaaacgccgaccctgatatgagaaagtttcttggaagcagtaagttgttattaattccattcttctcattcccattaggtgcaggaatgaatcttgatacaattgtaaaagctggaggtcctggtatattattaggagtgatagctgcctttactggaataggagcatatatacttttaaaattatttagagaagaacctataattggacttgcaacaggatcaacagcaggaaatgccgtagccacaccagcagctgttgcagcggcagatccaacattggctgcaatagcaacaatagcaacagcacaagttgcagcggcatgcgtagtatctgctattatttgtccattcattgtttcttatgtgtttaaaatgcttagagcaaataaagaaaagaaattaagtagagaagcagtagtacaataaataattattagtattgggttaagagcttatagtatgaattaataaaattaattttaatattgaaaaatacttgctaaagctgatacctacagagtataatttaaaaacaggttttgtatctgtgttgataataataacaatagatgcaaatactataattaaatataacgtaggggaggaaaatgtgtgagtcataaattattaattataaacccaggttccacatcaactaaaatagcagtatatgaaggtgaaaaggaaatttttgaggaaacacttagacattcatcagaagagataggaaagtttaagtacgtagttgatcaacaaagctttagaacagatgttatattaaaaatactagaagacaataaaataaatataactgaaatggatgcaatagttggaagaggtggacttttaaagcctatagttagtggtacctatagtgtaaacgataatatgttaaaagatttaaaagaaaatgttcaaggagagcatgcatctaatcttggtgctataattgccaatgaaattgcgaggtctattaataaacctgcttttatagtagatccagtagttgtagatgaaatggaagatatagcaagactttcaggagtgccagaacttccaagaaaaagtatatttcatgcattaaatcaaaaggcagtggctaagaggtatgcgcaagaaaatatgaagagctatgaagatataaatgttatagttgctcatatgggaggcggtgtttcggtaggcgcacataaaaatggaagaataattgatgtaaataatgctcttgatggagaaggcgcattttcaccagaaagaagtggtggtataccatctggtgatttagctagaatgtgttttagcggaaaatatactttagaagaaatattgaagaagataactggaaaaggcggctttgtagcatatcttgatacaaacgatgggagaatagttagacagcttgcatcagaaggagacatgaaggcaaagttagtttatgaagccatgggatatcaagtagcaaaagatataggtgcagcagctgcggttttatgcggaaaagtagatgcgataattttaactggaggcattgcctacgaaaaaatgatggtagacatcataaaagaaaaagtggaatttattgctccaataactgtttatccaggtgaagatgaaatgcttgctttagctcaaggtgtactaagagttttaaacggacaagaagaagttaaagaatataaatagacttctatatatactaaagattagaaagtatttggaaagatagcatttagcattactataattattgagtattgtttactggctttaataaatcatgaattaagagcggattcctagggatacgctcttaactttttgtgggaaattgctttgataaatagcaagtaaacgtattactaaagaagttgtaccattttgtaatgaggaattatttatatataatgtaagtaaactaaaatttagaattagatagaggggataaaatgaagctaaaaggaaaaataatatctcttgtaatagctatccttgtaatttcaattggaagtataacaatactttcttttatcgaaatgaaaaagttattaagagatcaaatagataaaaatatgttgaatatagcggattcatttgcatcaacctatgaagttaaagaatatttgaaaggaaataaggcaattccgattgatctgctaaatagtgagatagagaaggcccgtataaagacaaatgtagagtttatagtaattatggatatgaatggtataagatattctcacccagataaaagtaaaataggcgaaagatttgctggtggagatgaagatagggtattaagcacaggagagcaatatatatcaacaggaagcggtacacttggtatttctgtaagagcatttgcacctatttatgatgatagtaataagcagataggtgcagttgctgttggtatgttgtataataaatttgataacgaagtctatacgaaaatgtataaatttattcctataatattaatgggattaatattgggtatatcgggagctatagctctttcttataatataaagaagtcaatatttggacttgaaccagaagaaatagccttggctttaaagcaaaaagaaactgtaattgaaaatataaaggaaggtataatagctttagataataatggatgcataacgctatttaacgggcaagctagtaaaattttacatttgaaagaaaatgatatagggaagccgattactgattttacttacgaaagtatggctctaaaagttttaaacagcgggaaatctatgactaatattgagataaaagtacgccctggagtaaacgttatgtgtaaatacagtattataagaggatttaaaaaacaaattcttggattagttgtaacatttgaagatttaagtgaagttagaaaaatggctgaggagttaactggtataaagaaaatggcatggtcacttagagcacaaaatcatgaatttatgaataaacttcacacaatctcaggacttatacaactagaagaatatgatgaagtaattaagtttgttaatgtaatagtggaaagtaaaaagaatataactactataatatctgataaaataaaaaatgtatctttagcagcgttaatactatctaaatacagtaagtgtgaagaagctagaatcaatttcataatagatgatagctcaagagtaattaaattaccacaatatatgacatcagaagagttaggatctgttgtaggaaatctaatagaaaattctattgatgcagttaaaaatgatgggtctggtgaaatatatatgaaaatctttgaggaagatgatcaaatgaaaattatggtgaaggataatggctgtgggataccagagaatatcagaaattctatttacaacattggaatcacaagtaaagaaggggaacgaggatttggaatgtatatagtgaaaaagatcattgatgaagctaaaggagctattaaatttaaagttgatgatggtactgaatgggatatatctatacctatgaggaggagttgaatatatgattaaaactatgattgttgaagatgatccgatggtaagacaaattaattctaagtttttgaaaaaaatagagggattttcactggaaaaagcagttgcaaacctttctgaagcaaaagaatttttgatgcagaagcaggtggatttaattttattagatatttttcttcctaatgaaaatggcatagatttgctaaagtggttaaggcaaaatgaaatattatctgatgttatattaattactgctgataagagtgtagaaagagtaaaggatgcttttagatatggtgttgtagactatttgataaaaccctttacatttgaaaggtttaacgaatctctaaatatttttagagaaagattaaatagctttaaaaataaccagactatggaacaaagtgatttagataagtttattttgagtaataaaaataagaaaacaaacggtagtgaaacaaaaccaaatctagaaaagggtttgaataagtatacttataattcaattgctaatgagcttaataatactaaagaagagtattttactactgaagacttatcagaaaagttaggcattgcaaaagttactgtaaggaaataccttgattatatgagcaaacaaggcgaactagagaaaatcatagagtatggaaagattggaagaccattgtataaatataaaataaaaggtctataatattacgatttatgaattcacggatactctaaaaattagtaatagagtatcctttctatattaaattaaaaaaggttttctactagctgcatttatttcagaaattgtttggtttttcccatcatgtatgcaactttaatcattgatttttcatccttagtaagttctctattatacattttttcaaattgttttaataaagcttcagtatcaattacttctttgggttctgtagttctttttgatggcaaaggaacgtaagtttcaggtttcatgtatttgttataaatgcgcttaaaaatttcagatgtatagtaagcatcattaagtgcatcatggaattcaccataaattggtatatttaaaatttcaacggcatttcttaaaccaattctagaatttttaggtgctttaaggtattttgaagcatacttttgaatgtcaatatattttgaaatatatgaagtagatagattataaaatcccaagtttctatagagttctttaatatccccaactccccatacacagagtagtacatcatcatttccaatgaattctaaaaaagctttatgaacattaataaagtttttgcaagaagaaactttatcgtaggttattttagttaaattctcaacatatggatggatggttttatatagagttggtttgactaaggaattgaatgtagatacttcttgaaaattattatctagttttatagcgccaatttgaattatttcaaaaggaataattggtgtgttagtatcgttattagattctgaaagtttaataacatccgaattttcagaggcactacttttttgattaaattctaaatcatatattacataatacatactttcacctgctttttggttaagaataagatactatttatattatagccaatgaagatgtgaataatataaacataataaaaaagattcaaaaatttttgaacctttttaatatatttataataataatttatatttatcaaagaattttatctattattccataagataaagcctcttcagcagacataaaataatctcgttccatgtctctttcgattttctctattggctttttggttttttcactatatattttatttagtttattttttgtttttagcagccattcagtatgaatcctaatatctgtagcttgaccttgaaaacctccatgtacagatggctgatggattaaaatctcactatttggaagagcacatcgttttccaggtgcgcctgctgcaagtaaaaacgagcccatacttgcagctaatcctaaacatattgttgatacgtcaggctttatatattgcattgtatcatatattgccattccggctgtaatagaaccaccggggctatttatataaaagtgaatatcagcatctggattttctgattcaagaaatagtaattgtgaagtaattatacttgcggtagaatcgctgacgtgatcgcttagcataatgattctttcttttagcaatctagaatagatatcataagaacgttcgcctcgacttgtttgttcaataaccattggtacatagctcataagattcactccttaaaaaatatttttgatgaattctaagcaaccatagaaaggtaagttgtagaattctttcttgaatgtattgttgttaaatttattttgtttttcctaaattccttaggggggattccataaagctttttaaaagccctggtaaatgactcttgattactaaattgatattttagcgctatatctataatcttattttctgtagtcaatagttcatttgcagcttcctctaatcttttcttacgtatatattcagcaacaggttctccaaccactgaatgaaaaaccctatgaaagtggtactttgataaaaaggctttatctgcaagttcctttagttgtattttcttatttagattattttctatatattcaatagacttttttatacaagcatcataattcatgtaagagaaccacctcatttaatcttttcctatattatatagcaacattttatttaaatcctgtctttttttgctcattacatatgtaggcaatggagcaaaattgagatttcacgttcacttttaaataatggtcttcaactgttatgaaaaaattaactaattaataaaccagatatagtaataataaaagaatataaaaagtaattataactatagaaatgaataaagtggagaaatatatgggaaagtcaaaaaaggttaatagaattgaaggggaaaacatcatacaaataaataagaaaaaatgtattggatgtacggcatgtgcttttacatgtgctcaagaaactaagatggctatattaaaagaagttgattcgggaaagaaaactgtggaaaccaaaaatggaagctttgaggatacgggatgcttatattgtggacaatgtacacttgcttgcccgacagaagctatagacgtaaggaatgacttagaattagtaaaagatgctttgaatagcggaaagtatttagttttaacagcatctccggcagtaaaagcaacattaggagaagaatttaatcttccaattggcacttatgttggaggaaaaattgctccatctgcaaagagattagggtttcaaaaagtatttaatactgatttcggaaatgatatgacggttgtagaggagagcagtgaatttattaagaggattgcaaataaagaaaaacttcctatgttcacatccttttgtccttcttttatacgttatgctgagatgtttcatccagaaatattagataaaatatctacgtcgaaatctcctcaacagatgatgggagcgggaataaaaacatactttgcagatgtatataatattttacctaccaatatagttattgtatctgtacagccatgtagtgctaaaaaatatgaatctgagaaagaggatatggggagagacggttataaagatattgatatagtcctaactgtgagagaatatgcaaatctcttaaaagagaagggaatagatataactgctataccagacgaaaaacctgatgattttatgggggaatatactggggcagcagctctttttggtatgagccaaggggcaatgcaagcaatttttagaactgtaatgagttatttaaagagtgatatatctgaggctgaaaatatgacattaaaaccagtagaagggtataaggaaatagaagaagcgttggttactttaggcaataaaaattgtaaagttgcagtaataaatggtctaaaagaaattgaaaaatttttaatcagtaacaaatggaaagaatattgtttcattgaagtagtggcatgtaacggcgggtgcataaatggaggaggaactcctagaataggtacaaagtctcaaattaatgaaaatttatgtatatcatgtggtacttgcatacaaaattgccctgttaatgccatacaatataatattagaggaagggcagaggttaaagaagaagagtgtgttggatgtaaattgtgtaataacgtctgcagagctaaagctgtacagataaaatattatagtaaaacctcaaatgggttgttaggaaaagattataaaatattgagagcagacaccctaagaaatattgataaaaaatcaataaaaagagtgtctgatgaaaatgaaaatcttgaaaatatgtataaaagctatataggagatcctaatggtataaaagcagaatctttatttcatactagttacgttgataaatctaatgaatttagaaatagtaatacaaaaaagagaagaaggcattaactggataaagaagaatgaatgtcgaaaaacaaattaagaaaaaattaaaatatatggcgtttattgttgaaatatattaatatataggtatacaaaagatataaaccctctcccatttatacccacggataagatagattattcttaaatgagtaatctatcttatttttttataatattttattttatagacaagtttttgttagaaaatatttaatgaatttgtaagttgattttttggctgaattttaattccataatatatactgtgattgttgaaatatgggttgaattaataattagtatattacagttagccaatgctataaataatacaaagataatagaatggcaaaataaatatataaagttaatgaaagacatatgtataatttatgttataatttattaattcagatcaggaataattttgttattatatgtttttagtaggaggggaaaacaatgaatagtgaagaagtccaatattgcattaataaaatatctaaatttctagcagttagagatatcagtacgttagattctgaggaattagagaaagtctctggattaaaaagagttgatgtattaatcttattaggtaattctatcccttatacggtacagtgtgctgcaaacgcatggaaaaataatatgtgtgataaaattttaattagtggtggaattggccattctactcaattactaagagatgaggtaaggaaaaactcgaaatttaatttgattagggttgatgatagatcagaagctgatatattctttgatataattactaaaatttatggtgttagcccagataaaattatcatagaaaataaatctacgaattgtggagataatgctaaaaagacaatagagttattatgcaaattaaacataaaatatagatctttaattttgattcaagatcctactatgcagcttagaacttttgcttcattttctaagtatacatatagtgacaatgtcaaactagtaaactatgctccattcattcctaagattgatatagatttaagattaagtaatgttggaactaacggagtttgggatgaaaaaagatatctggaacttttgatgggagagataccaagattaagagatgacgaaaatggatatggacctaatggaaaagattttatagtccatgtaaatataccaagagaaatagaagaagcgtacaagattctaaagagacaaattaatgatgaaaatctttatagtagatgtggattatagaaattaaaatataaaatatagtaaatcatatatggaaagagagttgtaagtttatgaatgatattttaaatgagaccatgctgctttgccctgtttgtaaggaaaagttagtcaaggatatttcaaataagatgtacagatgtagtaacaaacatacatatgatatagcaaaagaagggtatgtaaatttgttaataagcaatcagaaaagaagtaagaatcctggtgattcaaaagaaatggttttatcaagaatagattttttatctagaggatattataaagcactgtctgataaaataaatgaaataatagttgatgggatgtcagataaaatcagcaacaaattgaatattgtagatctaggatgtggcgaagggtattacttaacaaacctaaaagattatatgaataagaaaaatattgaagctaattattatggcttagatgtttctaaagaagctgtaaaatacgcaagtaaactaaacaaagattgtatttgggcggttggaaacaattttaacataccacttggggataaaacagtggattgtattatttcagtatttagtcctatagatattgatgagtgtaatagagttttaaaggatgatggaatatttgttagagtgttacctagaactaatcatttaatacaacttaggaatattatttactctgaggttcatttaaatgataaagtttataaagcaaatgcagaagaaaatgattatatagaggaagctaatgtaacattcgatataacattaaataaagaagaactattgagcttattaaagatgacaccccattattggaagtctacaccagagaataaagagaagttagaagattatgaatccttagttataactatagatatgagaataggtatatttaaaaagaaaatttgattgagtaaaacttaatctaaatttaatgtaagcttatataggcagtgtttgccttaggagttttataactaatatattaaattgatccttttgtaggcaaagatatagaaactgtacaaaataggtattataatatatattaatatgcataataatttacttataattcataattattagttttattatgatgcatattattatttgaaaattaaaaaagtaaatttgatcacggaggaaacatgccagaaacagtattacttacattttttttagcaaaaattagaggatacaaaatatgtccgttatttaaatcatgggctatttatccgctaattgtatttgaaatattcacgtttgttggacaagttgctactttttctggcaattatgtgattataagaaccatagggagattgacacctatttatttaattacatatttgtttttaatattaaaatatgaattatacataagttcgataattggatcgctttttatgattttaggcggcgcattaaacgatattgcaataaaaactaattgtggatttatgccagtttaccaatcattatcacaccttacaggacgttcattagagaattttcacggaatgaatgatattcatatattaggagattcacaaactaaattaaagatattaactgactttatagacttaggatacactattcttagcgtaggtgatatatttataagagtatttgtgtttatagtaatttatagtgctttaaagaaaattaataatcaagggagaaaagaagatgttgagattaacagtatttgaatttatatttaggttagttccagaagcatttgtattgatactagcaatgatagcgttatctaatgtaaaacttaattcaaaaagatatataatttcgagtttattattagcagtatgcgaatatggaatacgacttctgcctataaattatggagtgccaaccatacttgatatatttgtaatgattattattatgtggagtataaataaagcagatatggttttgtctataaaatcatcattgataacaactatagttttatttattattgaaggactaaatatgttactattaagttttattttcaaggatgagttaggtgtagcgatgtcaaatgtagtaataaagatattaggtggattaccgtcgcttatatgctttgctgtaatttctataatttattatttaagaaagaagaatgtttagaaaatgttaaagataggaagtgtatgtactaaaatttctaattatattgccaaagaattaaattttgatgatgataaaaaatcagtaataaattatgggatatttgcatttattcatatgggaatttccatagctttagttatggtgtttggattgatctttaatgtgactattgaagcactcatagtatcatttactatgagtttattaagaaaaagttcagggggatcccattcagggtctcctgaacgatgtgcggtcataggtacggcctcaagcatcggtatagcgctaatatgtaaatatattaacatcagtcttaatgtagctgtattgagtggatgcattatttttgcatggtcatattatattgtgaataagttggcacctgtagatagtttggtaaaacctattaaaagtattgaaaagagaataaggtttagaaaaatctctattaatatattaaatatatatttaattattgtaataagtaatattttattctatatgaatgtgggggattttagattattgaactattcgctatgtatttatatgggggtattatggcaggttttttctttaactaaaagtggacattttgtattgggaaaattaggttaagttttagagattttatttttttagattttaaggaggtgagactaatgaaaaatagaattttaatgagtatagcaacattagcaactgttattgcttcaataatggcaacttcagcttgttattggggacattatcagccagaagagccaaaatgcttaagagaagattaattcaacgatgagaccaatgcattggtctcatcgcgactattatgagggatagatagtatgaaaaatgtaaagaataataaacaaaaacaaataaatgatatagtatctgtagtgaaaatatctatactcttacttataggtataatattatttcaaaattttataaataataatttgacggtttgggtacctgaaatgtattatacagtaa

SEQ ID NO: 28 - DNA, 64555 bp, Clostridium beijerinckii
gtcttgtttcaaaatggacaactgttaatataccttttgttctctctaaatatacacaagctgatggaaaagaagtagttacaactattcaaagtgtactagacagcttaatgccaggattagttccacttttactaacatttttatgtatgtatctattaaagaagaacgtgaatccattattaataatctttggattgtttgcagtagggattttaggagttgcgtctggaatattacaataaacattaattcatagtcttattttaagtaaaccattttaaattgaaatttattatagcagtatagattacctaattaatattataaattaaaggtctaacattaattaaattagtagggtagtctatacttgtattaaaaacaatattctcatgattatatagtgaatttaatcgtaaagtaaacgttacctaaggcagaggagttcatatagtacagtaaattcttatgaaagtacaaatttaaaagtactaaaataattatatttatagaatcaaaggataaacacttctaaaaaataatgataaaaggggtaaaaaaatgaaaaaattaaagttaaagttaatagcgataacagttgcaactatgacaacagcaacatttacttcagtaagtgcatcagcagcttggatacaaaatgaagggaattggaactatttaagtgattcgggagaaatgaagacaggttgggttaacgataatggtgcgtggtactatctagataattcaggaacgatgaaaacaggctgggtaaatgatagtagtacatggtactatatgcagccatcaggagaaatgaagacaggttgggttaacgataatggtgcatggtactatttagataattcaggaacaatgaaaacaggctggataaatgatagtggtacatggtactatatgcagccatcaggagcaatgaagacaggctggattagtgataatggtacgtggtattttgcagatacatcaggaacaatgcaaactggagtagtaaaaatagatggaaaaacttattatttagatgaaactacaggagctatgagggtaggagacataacaataaatggaacaactcatacatttgcacagagtggagaagcaataggttcagatttagtaccaactaagacatttaattcaaatggagttaaagtagctgaaacaagtactcaaggtaacagcgataaaacatcagataataataaatcaaatacaacaactagtgaacaaagcaactcaacaagtactacaagtagtggcaaatctcaccatagcagcggtagcagcagcactaaagttaataaagaagcgctaataaatgcaataacaattgcaaaaacaaaatatgaagcggcagtagaaggaactgatgcaggtcaatattcagtgggatcaaaggccatatttaaagcagctattgatgcagcacaagcagtttcagataatacaggttttacgcaaaaagatatagattcagcagtaacagcacttgcatcggctacgactatatttaatgatagtcttaataaagatgttgattcaagtacctcaactaattatctagaagattatcgtgatcagtaccacttctctgttgctaaggcatggggaaatgatccgaatggaatggtttactataatggtgaatggcatctattctatcaatattatccagatgatgcagtatggggaccaatgcattgggggcaatctgttagtacagatttaattcattggaaagaacttggaattgcattagagccaggtgatgatgatgttatggggaaaggatctagatatatctactcaggctcagctgttgttgataaaaatgatagcacaggcttctttgatggtggcagtggtttggtagctatatatactcaacatattgaggggaataaacttacagatgaagaatgtgattatctgggagttgctcatggcacagtgtcaaatacagaagaacaatctattgcgtatagcaaagataatggaagaacttggactaaatataatggtggtggagaaccagttttaaaaataactgatgatccattaaagagaccggctgaatttagagatcctaaagtgttctataatgaagaagcaggaaaatggtttatggtagttgctggtggtccattaagatttttctcatcagataatttaatagattggaagccagaagctatgcaacctgaaattactacagaatgtccagatttcttcaaaatgaaagttgaaggaactgatcaagaaaagtgggtattaaaccaagcaggaagatattatagaattggtgactttaagcaagttgatggaaagtggacatttgttccggaaacaggtgctatacaaatgaattttagtaaggattcatatgcagcacaaacttattatggaacaggtgaaaatggtactccagatggaagaagaataatgatcaattggatgaataactgggattactgtaatcaagttaagaaaataacaggaacatttaatggatcatatactttacaaaatgaacttaaattggttcaaacggatgatggaattcgtttaatacaagagccgattgaggaatataaatcattacgtcaaacacctacaacatacgatggtgtaatttcttcaaatactgcagataatgctgctatcaatataaataatttatcaggaagtcaatatgaaattgtagcagaatttgaaccagacgcaactacaacagaatgtggatttaaactacgtgttggaaaagatgtgaatcaagaaacaatagttaagtatgacgtagaaacaggagaagtagtaattgatcgttcaaaatcaggaaaaacaccagttagtggaagcgcatttgcaaactcatatagtagtgcggtaaataaaacagcagatggtaagattcaattgcatatatttgttgatgcagcatctgtagaagtatatgggaatgatggtgaggtagctggtacagcacaaatattcccagatcgtaacagtactggaattgaggtatattcagttggaggaaatacaaaagctaatattacttattatccattaaagggtatttggaataatgaaaatgcaagtgcattatcattaagtgaatcagccctaaataaagaagttggagatgaatttactatatatacttctgtacttccaagtacattaactcaaggagttacatggaatatatcaaaccctagcattgttacaattttaagtcaggatgataaaaaaacaacctttagagtattaggtgaaggaaatactaacttaattgcaacatctaaagatggaaaattacaaaaaacgacaacattatcagttgtaaatcgtagtctaccaagtacattctcaggtttaagcaatgttgaagcatctggaagtgattggtataaagatggtgatgcttatgttgctaatggttctggtgatggatttgctatgttagatgaaaagaactatgattcaactgcaacatatacttttgagacagatgttgagattgcaaaaggtactgcagggctagtgttaggcagtgcagtgaaaaattcgccaagtgaaggaagtgttgtagctaatcttacaagagaaggggcatggagattatttaaattcccaggaggagcaaaccttccagataatgaacatggttcaggaaatataacaccagatgtaaatggtaaatatcatatgaaggcagtgttgaaaggaaatcatatacaatactatataaatgataagctaatggatgaagtagattataatttctctgcgccaggaaactttggatttaatatttataatggaaatgttaagttcacaaatgcaaaacttacagtggcaggcagcgatacttctagcttaggtattgttaaaacaaattatgaacaaaacatgggtgatgaatttactgtttatgctaatcaagatgttaaatataagattggaaatcaagatgttgtacaaattataaatggaacagatagcaagaaaactacattcaaggtggtgggagcaggagaaacaacactaacagtaactcctgttagtggtagcgcttctccagtaataattaatgtatctggatatgatattaatccagatgctacacctggattaataacaggtctaaagaactttactacatctggagcaggaaaatggtatgttaagacagctacaaatacaggtgacacttcttatgcggtaaagagtactggagatacatttgcaatgtcaagcactaaggtttcagcaaccaatgatgctaattataatttagaaacagaggctacagtattaaatccagatgataattgcgcgccatctttagtgttatttagtaagagtaaagataatccaaaggatggaagccttgtatttaatgttcaaacaaataatggtcattggaaagtatttgagtttggcggaagtttgattggagaaggtaatattactccaactgaagacggaaaatatgatttaaaagtagatgtggttggtcaaacagtaaaatactttataaatggacaagaattattgtcaacatcagatttcactcaaagaagtggttatgtaggattaatgagttggaatgcaaataccgaatttagaaatacagtatttaagtcagtagatactgttataggaagcgacattgctgtcactacaggagcagcagttgcaaaaccagtatcaacaatatctgatactataggaaatgatataagagttactacaggagcggctattacagttgcaacaccagtaacaggtgaaactccagtatcaacaattgatgatacggatcaatatacagcaacaattgaatggaatgaaaatccagcaatatttgaagcaaataaagtatatacagcaacaataacaatcaaacctaaagaaggttatacaataatgggtgttcctaaagattactttaagattgatggagcaatagcaacaaatgatgccgattcaggagttataaaagcagtattcccagaaacaaattaataaagtaaaaggtggtgaagtttatcatatatgaattaacaaaataattagtagattggaatgtcacattattcagcaatggaaatgtgatattctttttttgcgaaattttaatatctaagtgaaaaatggtatcatttgtaataaatatggtgaagaataatagagtatgctgaaataatgaggtgttagcggatgtaggttaaataactctaaattttatctgctacccttgaaatagcaacagtcttaaagtctatattgttagcatattggatagataaatgaccagaaaatccaacgccttgtattgcaactacatctccataattttttaaagcatcaaaagtagtcgcgtcagtgcaaagtagtaatgcactctctacttaatttaattcttctagtatagttactaatttagaagaagaggttgccatatattcagcaaaaatctatattttgagtcatttcttatgttgtgtatttgtttttagagaaattattatatcataaaggaaaggtttatttgttttttataaaatttgtttacttaataacccaatttagacgttgcaatgattaactaggttgttgaataactatttttaccaatagctatttaagaaaatattcttgaagatcataaattccaaggatattttctggattttattcctttaactatatatatgtttttatgataaatttaaattgaaaattctagtaagacaagtatctgattaaggctaagatataaaaacttaacttaacaacgataaattttgattaagtttctactttaataagataagcgtcttggttctagatagtattagaacagaaaaaatttatatatgtaattaattaaatgccggaagaattaaaacttccggcatttaatttggtggtagcagatattatgttggtttaaagccaaagttgtcaaacactacttgtgctatatcccaattaataaaatgctatccgatatttatattatagattatgagtaacagtaagatattaacacgttttcatatcatttaaaagaacttttctcttaaattttatttgtagggatacaacattatattgtttttaaaatagttactttaaatatacaattaactcgaagcaaaacctgtaaaggattaaatttgaataataagaggcttttaacaatgtattgaataatagatttcgtcattcgaaggctatgatttctaattacataatgtaatatcatatcaaatataatagggggaaatattaatgaaaagaaaacttatattaagtaaattaacggcaagtgcagtagcatgtacaatgtttgttacaacttgtgttacatcttttgtgtcagcgtatacttcagcttatggggctacaacttcaaatgcagttacagagagggaaaagaaaaatgctaatctttcaatgaaagcagcaacagagggaatggtgctattacaaaacaaaaataatgcactaccaatagtatcaaaggggaatgtagccttatttggaggtggagctattaaaactctaaaaggtggtgcaggtgctggaaatgtaaacgagagatatgatgtaagtgtagcggatgcacttgaaaaagcaggatataatataacaagctctcaatggttagataattatcaaaaaacttttgatcaaggtcaagcagattggaatgaaaaaaataaaaataatccgtataaagattacttggcaccatataatttgccagattataatttaacagacgatgatatagaagcttcttctaatgcggatactgcaatttatgttataagcagaatgtctggtgagggaactgatagaactgggaagaagggagattattatttaactgatgaagaatatgcaaatattaagaagatggctgaatcttttaaaaatagcattgtattattaaacgttgggggcattatcgatacaaaatttgcaagagaaattccagagttagactcagttcttctaatgtctcaagcaggaatggaaagtggtacggcagcagtgaaggtattagatggtgaagtaactccttcaggaaaacttacagatacatgggctgaaaactatagtgattacccatcttctaaaactttcagcagcaatgataagaacactgatcaagaagattataaagaagatatttatgttggatatcgttattttgatagctttaatgtaaagcctgcttatgagtttggatatggattatcatatacaacttttaatatgaatgtagtatctgtagaagctgatgaaaagcatgttactgtaaaagtaaacgttaaaaatactggaaattattcaggaaaagaagttgcgcaagtatatttctcagcacctagcggaaaattagataagccatatcaagaattagctggttatggtaagacagacttgttagcaccagggcaaagccaaacaattacaataagttatgatacatcagagatgtcttcttatagcgaagatgatgctgcatatattatggaaaaaggtaactacattatccgcgtagggaatagctcaagaaatacacatgtgggagctgttttaacattagatgaaactgtaactacagaacagcttagcaatcaaatgaagaccgataagagcgtacaagctttatcagataaaggagttacaccttattcatatgcagaagaaggcaatgaaatagcaaatgcacaaaaaatccaattatattcacaggcattagatctaattgacggtaataatgaatctaaatatgatgatgaaacagttacaacttatattgcaaatgatgctggtaaaaaggagacaacaacagatgcggccgctaattataaggatgtagaaactgatgaaacaattgatgagaataagaatagcacattagataatgtttccaatgatatgaatatagagaagtttttatatgtagataatgtagacgatacgtccgcatttaaatatgatgataatggagctgctatatttgatgtaagtaatagcgatgaaactcaaagtaaaagtattatggaaaataagactctaaaaaatagtgttgacaatatagaaactccttcatataaggaaataagagaaaatattgatgtgaaaaaagatgctacattatatgatgtttataataaagatataactatggaacaatttgttgctggtttatcgactgaaaagttggctaacatagttaacggtatcgggacagctgtatcacaaacaccagttgttggagcacaatcaaatgctgttgcaggtggggcaggggaaactacaggagactattatgaaactgatgggattcctaatattgttttagcagatggaccagcaggacttcgtcttacaaagcaatatgataaagatgggaagacatggtatcaatatgctacagcttggccgattggtacgttattagctcagacttgggatcttgatcttatggaagaagttcataatgcaataggagacgaaatggttgaatttggagtcactctttggcttgctccaggtatgaatatccatagagatcctttttgtggacgtaattttgaatattattcagaagatccatttataacaggtactatgggattagcggctacaaaaggtgtacaatctcatccaggtattggtgtaacaataaaacacttcgctgctaataatcaagagaacaacagaaatcttgtaaatgaaacaatttcagaaagggctttacgagaaatttacttaaaagggtttgaaatggcaatcaaaggcggacaacctatgtcgattatgacagctttcaacaagataaatggagtatttgcaggagcaaactatgatttagtaacagatattgcacgtggtgaatggaaatttgatggagttgtaatgactgattggtattcaaaagcaaaacctgatgaatctatgcattcaggtaatgatttaattatgccaggagctactcaagacgctataataaaagcagtatctgattatatacctgcatttaatgaagatggatatgtggctagtaaaacagtatatgattattatggaaaaggaacttctgtggaacaatggaatgactttactccaagctcagatggagatacaactatatctactatagttaagaaaggaatacctttaaatgacaaggttattgaaatgattaacgacggaaaggcaagtgtggaatttgctaaaagtgatgccgaaacaacaatagaaacttcgtttgataacgtacaagcgttattaaatacagcagcatcaacagatgatacaacaacatcgccagcaggagatgaaacagcatcaacagatgatacaacaacatcgccagcaggagacgaaacggcatcaacggataatacaacaacatcgccagcaggagacgaaacggcatcaacagatgatacaacaacatcgccagcaggagatgaaacagcatcaacaggcgatacaacaacatcgccagtaggagatgaaacggcaccaattggtgatacaacaacacagccaacagaggaacaaccagagataatacatccggcagagatagcgacaactacagatgcagcagtagaagttactttagatccaatgactgatacttctcgtgataggattgttacttattatggaaaatacgtagataataatacaatttacttaggagatcttcaaaaatctgctatgaatgtattaaatataatcatgcaatcaactcaatttgaaaaaatgtataaagataaaggtgtaaaggctaaatcctatacagaaaaatataatgatcttaagaattatatgacatttgataaaggtgaaatcacaaaagatgaaaatggatcaggaaataatgggtcaagtggtagctcgtcacaccaccatagcagcggttcatatagcactagtggtgatacatcaacaacttctaattcaaacaatgcaaactccaatgatacaacagctaaaaataaatggagtaaaaatttagatggtacttggtcatttgtaaactcaaatggtgaaaaagctactggatgggtacaggatggtaacagctggtatcatttggatcaatctggaaatatgcaaacaggatggcttaaagatgctgatggatcatggtattacttaaataataatggtgctatgactacaggatggtttaaggatactgatggaaagtggtattatctaagtgataatggatctatgaaaacaggctggctaaaggatattgatggaaattggtattacctagataataatggatcaatgaagacaggctggttaaaagatgctaatgaaaaatggtattacttaaatactaatggagagatggcagttgatacagtaatagatggttatacaatagatagcagtggttcatggatttcttagaaataaaataatattttttaaataggttcattttgtggggaattccctacatgatgaacctatttttaatacagactgcattgaaatgttatgttaattagataataaatatttaattaattaaagaatgatagaaataaaaatacaagtcatcatacgtatggtgagtagtaagcactaaggaattttatagtcatttattgatcgatatgtccagaattaattgaatataatatttatcgtggtttttagtgtggattttggaaagaagttagaggtttaataagaatataatatttaagagagaaatattgataaaagaatcataatgttaagatatattaaaataaagtaggttcacaaaaattaatattctatgaacctactttattttgatatataaaagaaaagactatatgcttttttatattaaatttaaatatgctattattttcacggctctatttgattaataaataatgccaattcagttctgctacttaattctaacttctcgaatatatttgttaaatagttcttaactgtaccttctgttagaaatagagtatggcaaatatccttgttactattgccttgggcaacaagtttagcaacgtccatttctctttgggtaagcagttctaatttctttttttgtttattgattatcctaggattttgcttgtcaatagacattgaattaaaagctctaattaattttgtagttactgcaggatcaagaaggatatcaccgttgtaagccgcctttatggctttaattatatcatgtgatcttgcatctttaagtatgtatccatcagcaccattcctaatcccttgtaatacatattcatcttcattaaaagtagttaatattattacctttatattgttatacttttccttaacaattttagtagcctcaacaccattcataaatggcattctaatatccataaggattatatccggctgtatttcttggagaatttttagcaattgttttccgttttctgcctcttttagaatgtttatttcattatctaaacttaaaataatttttagaccctctcgtacaatttgttgatcatcaactaatacaacatttatcatatttaataattaccccatttctcctatattggaataaagagttttataccaaatcctaagttgttatggctaaaataggatatttcaccccctaaggaatttattctattttcaattccatttagtccatttgatttaagtacattgtcgcaacctataccattatcagtaatgataacttttacattatcgatattttttatgatttctatattaatttttgttgcattaccatgcttcaagctattagttatagactcttgtattgttttgtatattgaagtttttaaaatcggatttaagctttcaatatctgtacttttagtgtaagtaatttttaggttactaaataaataaaaattattaattagttgttctagtgatgcatttaaatcctgtacttcaggttctgacttgagcaaatcaactgttttccttaaatcattaatacctgctcttgctattttttcagattgcgctaatatttcttctaattttaaagggttagtagtacagatattcttagcaaattccagatgcataactaaagcgacgagggaatggcctaatgaatcatgtagttcatgagaaactctagttctctctttagaaatagcaacttcttctatttctaaagagcactcttgaagttttacattagctaatcttaacttttcgttaagctgttttacttcttttgattccatctcaagttttcttttattgtaaagcattccaaaaatgcttaaataagataaaagaccaagaatgaaaattaaaaaataactaattgaattaagattataagatttcaaaccaatagcgtagaaagacaaaagtaatacatgtattgggataaagaattttaacatatttcttttaaactgaaaaatctcaaataaaaaagagtaataataaaaataagtactaatcccatctatagtaaagattagtattgaactagtgcatagactaaaaaatagtgatatatgtacatatttagtatgatctttaaatcttatatttctaagataatcattagttataattatagttgcaaaaacaaataataaaatcataattaaaagagagtttttataccggatgtagatatctgttaatattgataaaaataatatggactttataatcagaagatagtttctaaatgttagcattttttaatatcacccattttataataaatatatgttttattataccattatttttaatgtaaaatatatgactaaagtaatatgaatctcagtaactaaagtaactattattacccataattaaaatatagaattcaattatgggtaaattactaatatattctacaaatatattatatacaaatgcgaaattgttgattaaatgggggattctaaatggatgtaaagctactaaggtattttgttcaaatatgcaaagataaaagtttttcaaaagcttctaaaaatctttatattactcagcaagggttgagcagagctattaagaacctggaagaatatgtacaggttccattattctaccgtaagattaatggagttgaagtgacaaagtacggagaatatttagaacagcaatctatgagtattttaaatcaatttgatttgtttctaagtgatataagtcaaatgaatgatcttgagtcgcaaaaactatcagtcggtttttcattaggagtactggatgcattatctacagatttgatttcagattttaagaaaacgtatccgcaaattcaattagatatatatgaaggtccagattattattgtgaagaagctgttttaaaaggtgatttagatatagcattcacaattggtcctataaataaatcaaaatttcattcgaaagttgtcaaaacacaacatccatgtgttcttataaatgaaaaaaatccactttctaaaaagagtaagataaatttcgacgatttaaaggatgaaagatttattattacaaatcaaaattttaaaatatatcataattttattagtaaatgtagacaggctaattttcaacctaatattgtttttagtactactgaaattcacattgttcacaaacttagtcgtcttaataagggacttggtattagtattgactttgttgtaatcgatatcaattatcctaatgttcgcgcgatcccttttgcagatgaaacttttgtatgggagataaattttatacatcgaaaagattactttctatcaggggctagtaaaatgctcttagactatgtaatgaattattaaattaccaggaagaaatatgataaacaaatattataatacaatatttataaaatataacgaagttatacaaattgaacatgttttataagctagagtattattaaagattccaaacttcgacggatattttcactatttttagaaatgcttaaaaatataactggaaatttattttccagttatattgattataaaacattaaattcctataaaattatttggttcgcttaagctaataatttaagataaatttcgacgaagtaaatttttagagtacatataattacatcaaaaatagtgaatttcactgaagatagattaaaggttttattccatagttaaaacagctctaaagtgaaccttagcagtcatcattttttcatacgctgaatttatttgttctagtggaaaagtttcaactattgagtgtacatttgttagaatactaaaatttatagtatcttttctggcattagcatctgtggctaaccatccttgtatactttgtcttccaaccaataattgattaggaaagatttgaatcggatcatttattccagcaacaattattatttttccatcaaatccaagaccacttaaaagttctgatacagccttgctgcttggagcagttatgaggataactttagctccccccaatttttgaagttcctttgctgcatcttgttcttcagtagctataaatatgttagctcctaatttttcagcaagttcttttttatctgatccccttgaaatagcaacagtcttaaagcccatattcttagcatattggatagctaaatgaccaaggcctccaacgccttgtattgcaactacatctccaggatttgcaccagaattttttaaagcatcaaaagtagtcacaccagcgcaaagaagaggtgcaccttctacttcatttaattcttctggtatacttactaattcagaagaagtagttaccatgtattcagcgaaacctccatcatatgttataccagcaggccagcctacaccaacacgttgtcctaattcataaccagtaacatctgagccaatcttgtctacaacacctataatttcatgaccagggatacgagggtatgaaagcccaggataattacctccttcttttactaatgcatctccatggcatacaccacaagctagaatttttatccttacttgatttttagttggttctgaaatttccgtttgtattaactcaaaagctgagccaggtttacttacttgaattgctttcattaatttcataaaaaacacatccattcttttaatattgtatttaatatatactgcaacttaagttcatacagtaaataaaacattaattgtctttttaccaatgtaaataagaacttatcattgaagcagattatttactttgagtatcagtttctttatctaatattttcatcattttagcagaaagatcagaatgtattttatagatactgtcatcatatttttctggtccattaatttcgagattttcataatattgcagttttaaatcaattatccctagatttttatttatttcctccttttgggcttttaaaattttttgctgcaataataaaatttcttttctagatggtacgctcgaatatccatcaaaacacatattgacatagtttttaatatattttatagacataccagttgctctcatgcatcgtaccattattaactgttccaaatttaaatcactatattcgcggtttccatttttgtcgcgtgcaatttcagttagtagaccttccttttcataatagcgaagggtatgtttagacatattaagtttttctgtaatttcttttgttgaataactcattctcttcacctgccaactttaatataagctatagagtgaactctatagcaagtaattttttatattataccatgtctttttttacaaatcgcattcccattggtcagagcttcaaagtatttttaatccgacgaatgcgtcattttggaacattgagcttgatagggaagagtaaatttattttaatcaactatttaaaatttgtaccactccatgaccaccgtcaactataactttatctccggttttaagctttgtagtagcattgccacatccaacaacagctggaataccaagctctctggctactatagcagcatgggataatggtgctccaatgtcagtaattattgctgaagccttaggaaaaagaggtgtccatccaacattagtagttgacgcaactaagatttcgcctttttttaggttttctccttcttcaggatttgttaaaatacgcacaactccttcaatttttcctgatgctcctgcaaaacctttaagagtttcagaatcttgtgtagtaataggcatagattcatcatagtaatcaactcttctattagaattttttacccatttaaagggatcaaatcttccgcgaataattgatggtaatggtggaagtgatttatatttttcataatttccctttctaaccgcaatatgatttacggcgaagtcatttcctgaaagcaaatctaaaacttcattgatgtaaagaaaaaaaatatcatttcctatgcctgtaagttccccagcctttagtgcaaaagcacgattaactctaaaggctctagtccattccgaacgaacagactctctaagacgagctgcttcagccacctttacaattttcttttcaaaatgattagcttcttttgggaagttttctttcaatcttttaagagcttcttcatattgatcatgttgtttattaagaagattttctacatctgtgtttgaattcttaaattcttctatctgcttttcaagccaagtttcatcttctccaggatgaggtatggataattcaaactcatgtggcccacgatgtccgtatttcattctgtattcttcacgattcatttctccagttataatctttgatataccaataataggtccaaggctctcgagggatgaatctcctctaaaattagacataagtgtatttgtatcttcaattcctgctacttttattaactcatcctttaatttattagctatgaccatttttcttccaccagcaagtgcaatccacaaagccttaaaattaaaaggtaaaatttcagttttccatagatcgattaattcttcttttgtctttacttctttaatagtttcagtcatccttctacacaaattcggagattcattcaaatgctctggaatttccttagaagctttaataatattttttaaacgatgctttaattttggagccatcccttttatcaagcctagctttgaaaatggataaataggaatttctatttcttcaggcatttgaccaaagacttcactcattgtttttattagactcttaatatctttgccgaaggcagggtataaagacaatgcataactgatgtttgtatatgctcttccacaaatgttgcctgaaaataaatagtatccaggaatagtcatttgttcttcatctaaagcccttattatagaccagcttaggggagtgaaaacatcagacattgcttctccaacattagtattagtccataggaaatccccatccaaagtatcgttccattcatatgtatcaggattaccagttattaatgttgtaataggtcttgcttgtaatatatacaattttccatttgatactgcccattcaatatcttgatgagtaccatattctatttcaagtttagatgcatatttatataactctgaggcatatttcttaaattcaggggggccctcatattttcttttgggcctcataatattaaatggatatgcatttgcttcccctgatacaagctgttctcctaatccaaatacaaaattaccggtcatgctctcgtgactgcctgtaattggatcagcagtaaataatactcctgaaatttcagactgtatcataatttgaattactaccgctatctgatgagattgatccattccttggactgaactgtatgcttttactctttctgattctcttgagctaaaaacttcatatattgcgctttggatttcttcatctgtcttaacatttaaaactgtttcaaattctcctgcaaaagaagcttgagcagaatcttcacttaaagcagatgatcttactgcaaataaaacactttcattattttttctaatttctttcaaataatgtttgattttattccaagcatcctgattaagaatattctccttaaaagctgatggtaaaatcacaaatccgtcaggaacaggatatcctgcttgaaacatttttgataacatacatccttttccacctgcaagtgattggagttcaggggttaattctttaaagcttttgatcatatctaacattttaatacctccttttaaaacttaatacttatttataaaaacaacttttaagcatttctgtataggcttctgcttcaataaaagccttatcataattaatttgttttgaagatgatgactttgcctcttccagaacttttgtattaaatccttgaaaggaccatataacaacgtttattgccttttctatatctatgccatctctaaatttagataaatctataccatcaaatactctttttgaagcgctttctaattcttctttatttatcacatttaaatcattttctatattacttgatttttccatatttacagcttcaatgaatttaagaattttaggatatttattcaataattctgctttaatcagatggatttgacgtaacctaacgaaaaaatctctttcctttaaatcaatctttttgtaaaattcagtcatgctaacatctatgcaataatcatataaaaataaaaataattgcttcttatttttaaaatagtgaaataataaccctttagatataccagcctctttaacaatctcatttgtagaggcattctcataacctttctcagcaaattcatttattgctgcatttaagatacgattttgtttttctgaatctaaatttaaaaatttcgataccacagtattaccttctttcagatctatgtaagattaataaagaattttatatagatatttgtgctattaagttatgctcattactttagtaaaatattattattgtaatttaagtagtaaaaaaataattctttttattatttaagaggattataactctattgaccaatgcggtcaatgaataaatttaatacttaaaagtaaaaaaattgtattattgcttaataatataattagtattaaggggaatttaaaaagatgaagtgatactgggagagaaataagttctagttaatagatttctttctattattaaaagttacctctttcattttttgcaacattaaacaactaaaaagaataggttaaatctatgataaaaatgatactgaaatttaaatttattgacaataagatatattgtatatattattaagtagaggtctacctaatttgaagtgaggatgataaataatgaagaatagaaactgggaatacccgtatgatttatttataaagagcattgctcaaaagatgagatatacaaatgacgaaaaattaaaggaatatgatcttacttcacctcaagctttattgttggagcttattgaaagagaaataaggcacggaaacgagataactcgcaagaatttagagagtgttatgaatttaaaaggttcatctataactaatcttttaaatggattagttagaaaaggttgcatcatacgtagtgctgggatatcagatgggcgtacttttcaaatccaagttactgcaaaaggaaaaaatatattaacagaaatggaaaaggtttttgaagaaactgaggaacagttattaaaaggcatgtcacaagaggagaaaaaagtttttttggatctacttattaaagcttataaaaatttatatgaagagtttgattaataataaaaagcaaattgctgctttttatttagataagtatgtagaagtctacgtattttttattttctatgaagctttgttttattactattaaatatattaactaactttgaaaaaattaattgtttataaattaagttatgcaaatactttaaagagtcctaagttaactctcatttaacaaaataagtagaagtctacatatatcattaaatatgatatcagatattttaaattaagacattataagcagtaggattaaatttattaagataggagaaataattatgtcaaaatatatgaaaattttaaaagaattaaataaagattcattgcttgaagcaggaggaaaaggagctaaccttggaatattaataaatgctggacttcctgtaccacctggatttgtggttacaacaagtgcatatgatgctcatcttgaaagatctggtcttaaggagagaataacaaaaaggcttgaaaagattaagggacaagatattaatgaaatatcagaggcaagtaaagatatctcatcatggattgaaaaagctcaaatgcctcttgagattcagaaggagctaaacatagcttttgacggtttgtataaaaaaatgggagcaagtgaaaagatgtcagtttcagtacgatcaagtgcaacggctgaagatttaccaacggcttcatttgcaggccagcatgagacttatcttggtatctatggaaaagaaaatgtcattaaacatgtaaaaaaatgctgggcaagtctttggtcatcgcaggcaataaattatagaataagtatgaattttgagcatcttaaggtggatcttgcagttgtagttcaggcaatgatagattcagaggcggctggggtaatgtttactgcaaatcctgtaaatggaaagagagatgaaatattaataagtgcaggctatgggcttggtgaagcagttgttagtggtttaataactccggattcatttgttttaagcaaaaagggagacataaaagaaaagaatcttggctctaaagagattaatattaaattaactaaaaacggaattgttacagaaaaagtacctgattcaaagagaaaatcctattgtctaggatcaaatgaacttaatcagcttacaaaactagcagagattgttgaaaaacattatggtagtcccaaagatacagaatgggctctttctgaaggtaagatatatttactccaagcaagaccaattacaacaatggatgctgagggggaggattttaatatacttgaatctgaggataaaataatttatcaaggcaaaagggcagcttttggtcttcaaagtgtaatggaacatagtccatatccacacactcctttggattttgcatgttttactcatttttatcaggggatatatacttctttctccgaaacaggatttaagatgcctaaggagcaaaatataccagtagaaagagaaagtggatgtgtgtccctaagttatcaggcaccatcaatatctccatctataatttggaaagctcctaaatcagcaatcaatagtttatttaaagatacaaatattctatggcaggatttttcaagagaagctaatgagtggattaagaggatggatactgcgaaaaagaatacaaacgattcagagaagcttataaaacttattaaacaggggctgaaagaatacgagaattttgtttataaaaggttttctttaattgatatgcctagtggaattactgagtttaagtttaataagttaattaaaaaagctgtaggaaaggaaatgtttgaagaggttaaagaaaatcttcttagagctttgccttttagaactgcacttcagaacaaagaaatgataaagatagcacaaacagcagccatgaatggaaaaggtggccaagcattcaaagatgccattgagaatttcttgaaagaatatggggatagaccttctataggtgctggacgtatgatatcaccttctacatggagtgaaaaacctgaaatgataaatgaaattattgatgcattattatgcgatgcctctatactagattcggaagaaagttttaagaaacaggaagaagcctataaagttgcaaaagacttagtaaagaaagggctaaaatatgataattatagaaagtttactaaaattctagagagaataaggtatacggtaataatcagagaggaaagtgtattttacttagaaaaaatagcaggttgtttgcatagaatggctttaaagctaggaagccttttagttgagaaagattatattaatgatgcagaagatgtatttttcatttttcttgaggaacttaattcagtggcagaaggcaagttaaatatagaagaaagattaaataaaagaaagaaagcttttgataaggtttatgaggcccatgaaaaaggtgtgcattggttagtagctacagggtcaattccagtatttgagtcaaaggaaaaaattaaacaagataagagcgaagattgtaattcaattaaaggaagtgctgcaagtcgtggagtatatgaaggttcagtatgcatagtaagaaatccttctgaatttaaaaaattgaaaaaatgatatatactcgtatcaccatatacatctccaatttggacacctctttttaaagttgcagctgcggctatcactgaaataggaagcccaacttcccatgcagcaattgtagctagagagtatggtatacctgctgttgtggctattgataatgcaacaagtatattaaaggatggacaaagaataagagtagatggaacaaatggagtaataacattattataagtaagtgcgaaaatatgaatgataatataagaaagaattaattttatgaaaagaatttaatggatgattgctgatgaagttaagatgtttgtataatgttatcttatcagtaatagtttaacaatcaaaacattgacagtaaaaattcagcgtgataccattgtaattgaatgatttataaaaaggagacttaaagagatgattttagttgttcttaactaagctattaaaattaaatagtttgagatgctttgaagttctaccataaagctttaactaagtgagcattttaagaacaatatcttctactaagctcttttataaaaaataaaataactttagatatacatatatttagaagtacttattttgattaagctaaagtatatgttttatattagattaaatttaactataataaaagatctttaaataaatgaactctccatagatgatattgtttgtctatatggggagttttaattttgtataaagaaaggtgggactttttatggaatttacaaaggttacagaaaaggtttattatctaattaatgacggagaaactgacagaccagtgcttggatatattaaaggagataaatattctttaatggtggatgcaggaaattcaaaaaatcatgtagagaaatttaatagttgtatagaaaaattgaatttaagattgcctgattatgttgcaatcactcattggcattgggatcatacttatgggatgcatgcagttacaggaaaaactatagcatgtgaaataactaatgagcaattaaatgttatgtctaagtggcaatggacagatgaagcaatgaaaaatcgtctcttgactggagaagatattgaatttgcagatactaatattcgtaaagaatacgaaggacttcaaggtataaaagttgtaccagctgatatagtctttaaaaatgacttagaaatagatttaggaggattaacagttattttaaaaaatgttatttcacctcattctaaagattcagtaatagtttatgtacctgaagaaaaagtagtatttataggagatgcttatagtatgaactattataataattgtgaatatgatccgtttaaattagagtgttttataaatgtattaaaggatttagagtttgacatttgtttagcaggtcactcatcacctataaataaaactgagatcattgaatatttaaatttacagcatgagaaaatccaagcaaagaataaatagatatttattctttaagtaattaagctctgtttattagtgctgtattctaatattctttacaataaatattgtgaagaataaatattctaaaccatatatattctgaagaatatatattctaatattcttcagaatatgcttgaataatgcgggtttgaaggctagagagttaaataaattgagattaattaaatttaatctaatgctgctgttagccaagaagtcatgaaagaaagaatctcatcagctaatgcagaaactgcagaagcatctttcaagttacctttactatgccaatgtttcgtagcgcaatatataccgctgctcatcataacagtaatcaattctaatttttcttcttcattctttgaacaatttctagtattgttgagcatgttttgtactatattttgtaatttaagctgaactctcatatcaattaaaatattggcagatttatataatcttatatagctagtgcccacagtcttatgataatcacacatgataaaaattaaatcacgcaaagttttctcatttaactttgcatcaggactaatcctgctggatacaattgtcatgaattcatctgatataaaagaatctaataaatcatatttatctttaaaatgagcataaaaggttgcgcggtttacattagctctttctgaaatatccttcacggttatattttcaaaggggtttttattagctaatgaaagaaatgcatcttggatgagtttacgagatttagttatgcgtttatcatttatttgagatttttgtatcatatctgctcctttttaaatatatatttaggttgttgaataactaatttttacaataattattgagaaaatatcttatgaatcaaagatttcaaagatattttctagttttattattttcatatctttaagcgtaaacaattactaattagctctgttgatttatatttgtaaatacttcacgaataattgttctaacattccatatttcttcgttatgctttatttctgcgatgctaacatcccataccttagcatttccagtaactataattttaacgtcttctatttccgaatcaaaaaacgtctctaatttcatcatgtggttatctttgtcttgatcagtgaactgagcaaactcttccccattaatcataatcgtaacggaacctttatattcttctccattgggaataccataattggcatagagccatagatttttcttgcctaaattaaataaatactctttatctattccatccttgctgctaaacaaattaaattttggctgtaccacctcgtcttccaccgtaaaagttgaaaagctattagttattggcgtggttttattcacttcatttaatgcttcaataggtcctattctttcattcacatgtacaccataatcgattgtttcagaaaccaccataaccccaatgatcagcataagaatagataatgcagaagcaacaagtttttttaaggtaatctcagaagaaaatcccactctatatcctacaaatcccatgattgcacctaatgtattagatataatatccataatgtcaaatgtacccataaaggttaaagattgtaacacttccaaagaagaaatcactaatatgaataatgtcataaactttctaaaacgtatacgatacaacaatggaattactactccaaaagggataaaagcagcaatgtttccaaaatcgtataaccatgacattgttagttttggaaatcttagtgggaacccttccggcacaagcataaatgtatactgattataattgaatctttggtctaatctactaaatccaaagaacatgaaatacaatattaaaattgcatataatagcatccccataagaataaatctacgcaatttagcattcataacatcggaattatccatcaatacttcattaccctttggaatttcttcttgttcatttttcattattaacatctcctatcatcttcaaaaatcacataggaatcaatagtaacttgatttaactcaaaataaaacttaatgctcttttaaagaattcctacatcactatattggaaactcattaatcagaatattattctatcaacacaaatattttttaagcgaattttgttgttaatattttttactaaataaccgacatttcatgatttctgttggttgaatagctaattttagtacattataataatagcatgcataaatcgctacaacaacacgtgtttaataatttgacgattgagctgctatttacaattatgtatacgaggagaaagtaaaatgagtgaattaaaacatagaattgttgaaacaaatggtataaaaatgcatatagcggaacaaggaaaagggcctcttgtattattacttcatggcttccctgaaatatggtactcatggaggaatcagatacccgtttttgctgaagcaggttaccatgtagtggcgccagatttaagaggatatggagatacagaaaaaccacaaaatattgatcaatacactctgcttcatttagttggagatatagttggattgttggatgcattaaatgaagaaacagcagtaatagtaggaaatgattggggagcaacaattgcatggaatgcagcattattaagaccagataaattcgagggcgttatagctttaacagttccaatgatgcctcaaccaccaataccaccaaccactgttttctcacaaaatagtgaggagttattttatactctatattttcaaacaccaggtgtagcagaaaaggaatttgagaaagatgcacgatttgcaattcataacttgctgtattcagcttctggagatgcaggaccacgtaaaggcaatgatggaactccaaatccatttagtatggtatcaagagagaagggattgctttcagcattaccaatacctaaaatgacatcttggcttaaagaaaaagacttagaggtttatgcagaagcatttgcaaaaacaggctttagtggcggactaaattattaccgtaatttagataaaaatagagaattattaagttgttttaatggattaaaagtaacaattcctgcattattcatagtaggtactcgtgatgttggcttaagtattccaggaatggatcaaataatttctgaaatgaagagtattgttccaaacatccgtcaaactatatttcttgaagattgcggacactgggctcagcaagaaaaaccaaaagaggttagtgcagagatactttcatttcttaaaagtttataatatattatagaaattaaaataaaaacttgtgggctttgaagtcatcactttagagtccaccataaaacacatgaaaatgatatgctcactttataggagatagttaaaataataaaactgtttctataaagggggcattttatttttcgagttttaattatccaattatatcaacataacaaaaatgtaatattaatgaaatgtagttaaattgatgaagtagttataatcatatagaatagttaacatagaactaagttaagtatattgattatagatatatattcaaagcaaaagttatatttatacatatatgttgcaattcacaatgcacatttcacaattcacaattacagctaaaattcttttaatatttttagaattatgctgaagaatcatttttgcaatatatatcatgtttaaaatgaaattaaatacatgtttattccagaggacgtataaaatttttatttgatgagttctaagtgaaagattggatacgaagcaaaggtttaagaaaaaagggagaattatagatgaaaaatatattgaatgtagaaagaatcgagaaatattatggcaataaggggaatttaacaaaggcaatagataatataagctttaaggtagatgagggagagtttgttggaataatgggaccttcaggaagtggcaaaactacacttcttaattgtatatcaactattgatagtgttactgcaggaaagatattgataaatggtagtgacattaccaggctaaaatcaaaagaattagataagtttaggcaaaatgagttgggatttatatttcaagattttaacttattagatacacttacagcttatgagaatattgcattagccttaacaataaagggagaggacacctataaaatagataaagaaatacaagcggtagcagagcatttagaaataggacaagtgcttaataagtatccttatgagatgtctggggggcaaaagcaaagagttgcttcagcaagagcaattgtaactaatccatctttagttcttgccgatgaaccaacaggggcactagactctaagtcagctaggctgctacttgaaaggtttgaaaacctaaatgataatttaaaaactacaatacttatggttactcatgattcttttacagcaagttatgctcatagaatactctttattaaggatggtagaatttttaatgaactcataagaggtaaggacacaagaaaggaattttttaataaaatcatagaagttatatccattcttggaggtgatgataatgatgtattttaagctggcctttggcaatataaaaaagagttataaggattatactatatacttcttaacattaatattagctgtctgtatattttatagctttaattctatagattcacaaaaggcactttttgatataaaatcttcaaatgctaattacatagaaaaactaacagttactatgtcttatttttcaatgtttgtatcagtaatactaggaagcttaatattgtatgctaataattttctaataaaaaaacgtaaaaaagagttaggtatatatatgactttaggaatgggaaaaagaaaaatatctaagattttagtaacagaaacttctatggtgggcgctatatctttagttgcaggcattatattaggaatagcagcgtcacaagtcttatctactcttatcttaaagctgttcgatgtttctatgaatgaatatagatttacagtctctataaatgctattggaaagactatattatattttggaataatgtttttacttgtaatgatttttaatgtatttgttgtttctaagtacaaaataatagacttacttgcggcagatagaaaaaatgaaaaaatgaaatttaaaaatccatatatatatttggcagcatttgtattaagtataatatctcttgtagctgtatataaatttttttttaagatagggatagatacatggaatccaatgtttaagccagcactagtcattagtgtaatgagcacagctttattcttttttagtttatctggagttatattatattttgtaaataaaaataagaaagtatattttaagggattgaatatattcgttataaagcaggtaaatagcaagtttaatacacattttctatccatgtcagtaatatgtttaatgctgtttactacaatacttgtattatctacaggaataggtcttaagaaaaattatgaagcaggccttgaaaaaataacaccttttgatgctagtttagtcatatatcctcatggtgaaaatattcctttagatgaagtgtttaataaaattgatttcaaattgagtgaaaatgaaaaatatataacttatgatgaatatacttcatcagtagaacttaaagatttatttaaaactgaagatgaggcttttaaaagctatacagcaagctttgtaaaaatatctgattacaataaaatattaaaactaaaaggtgaaaaagaagctaatttaaatagtgatgaggttttaatcttatcaaattataacaaattagctgatccaattaatgaaaaattaaagcatagcaataaagttaatattaatgaaaaagaatatcaagttaaaaatcacaaggctttacaagaaaatcttgaaacttctataatggcagaaaattattgcgttatagtaataaatgatgagtttttgccagatagtaaagtttataaatcagtgcttgatgtaatgtatactgatgaaaatagagaaaaaaacaatgaaaaatacgaagagatttataataattctttgattggtggaaagtacgaaagtatggatgtcccccatatgaatgcctattcgaaggatgacatttattctagagaaaagggttcttcaacttcagaattatttcttggtttatatttaggtatgatatttttgatatcaagtatggctgtattagctcttcagcaattatcagaagctagtgatagtatagaaagatataaagctttaaagagaattggtgcaaataagaaaatgataaataaaactatatttcttcaaaccttaatatattttagccttccagtaattattgcattaatccattcaatagtaggcattattgtagttaataaagagataagcaattttaatcaaatagatattagattttcagcgttaatgacagctgtaatatttattgtagtatatgcaggatatttctatacaacgtatacagggtataaaaatattataaaaaataatatataaggactaatatagatagccgaaaccataaatagtttaattatgcaaaggcgttgaagtatttacgatttgtagtaaagatatgaacctaaagtgttgcaaatttataaatatgtttatttagtgagatgtatagatatttattatatatatggcatatgtaagtgcttaatatattactttccataatggcgagttaaagaaaaagtgaaggctttattatgatattgagtaaaattgtggaaaagtatagcatttagttttataatatttattaaggttattaagttttggatttcaaaatttgataaccttatatttctagtagggggatatgatgaggaaaattattattattgaagatgatgaagttataagggaggaattgcaaagttttttacagagatatggatatgaagtgaaggcccctttagatatggataacataataaattatattgaaagtgagaacgctgaacttatattgctagatattaatctgcctatgtatgatggatattatatatgtagggaaatacgcaagacttcagaggttccaattataatagttacaagtagggatagtgaagtagatgaactgatgagcatgaatttaggggcagatgactttattacaaaaccttataatacagaaatactacttgcaagaataactaatattttaaaaaggacttatggaaacataaagactagtagtatattaagctacagagattttaatttgaatctttcaaatgcaacgattatttataaagataactctctagagttaactaaaaatgaagttaaaatactatcatttttgataaataataaaggaaatatagtaaaaagagattctcttatggagtacctttggaaagcagatttttttgtagacgatagcactttaaatgttaatataaatagattaagaaagaagcttgaagaaataggaatagaaaatccaatagaaacaagaagaggaatggggtatattatgccatgactataagtgagtttcttaaagataaagctattgtaatactatgtaatagtcttatgtttattatattgtcaataataatgtttgttataaatgttaacctaattatagttgtatttgttttttgtatatggtttttcccgttgggctcttatatagctttagaatatataaagcataaaaagtattttaaagggattgaaagtttattagagaatttggacaagaaatatttatttccagagatgctaaaggaagcagaatctgtacaaggagaaaagtttaactctatacttaaggaattaagcagagatatgtatgagcatgtaaaatattataaggatctgcaggaggattatagagaatatctagaagcctgggtccatgaaattaaaacacctatagcttcttcaaagcttattattgagaataatcaaaatgaagtaactaataaaatagactttcagatagacaaaattgaaagatttgtggaacaggtactttactattctagaagtaataatgcttataaagattatataataaaacaaattagtctaggtgatatagtaaaaaatgtagtaaaaagaaactatagagatttcattcataagaaaataagaatcaatataaatgacattgaagaaaatgtatatagcgatgggaaatgggctgaatttataattaatcagataatagtaaattcaataaaatattcaagcaatagagatcctcaaattaatatatcatcaatgaaaaaagtaaattcagtaatgttatttatagaagataatggagtagggataatagagaaagatatagatagagtctttgaaaaaggcttcactggtgagaatggaagaagatttagcaaaagtacgggcatgggtttgtatttatgtgaaaagctctgcttaaagctgggcttaaaaatttcaattgtttctgaggttaacaaaggaactaaagttacattaatatttccattatcaggtatggaaacctttggtgatgattgaggggaagttaatgatagtctttttagaaagacaaaacataacacaaaaagtcgggaataaccgtttgaaaagagataagatatatgtacagacagggggataattatgaaatggattgaaggaataggtgaagctatcagctatattgaggagaatattacagaagagattacaataaaaaatattgcagaaaaaacatttatgtctccattctatttccagaaaggctttgcaatgctttgtgggtttacggttggagagtatatcagacaacgcaggcttactcttgccggcagtgacctcgtttctactgatgaaaaaatcattgatattgcattaaaatatggctatgcatcaccagatagtttcacaaaagcttttactcgatttcatggtgtcacacctactgctgttagaaaagatggggcgatgattaagtcatttgctccgctgaaaatcaagtttttattggaaggcggttatattatggattacaagattgttgaaaaagattcgtttactgtcatgggtgtatcaaaggtgtttaagtatgggaatgcatttgcagaaattccaccgttttggacagagcattatgaagctggaaagggaaagtttgtgtgtggaatgtatggaatatccatagatgagaacatgggatcagatgagtttgaatatttgattgcagatgattataatccatccatggaaatacctaatggttttgttacaaagattattcctaaacacacgtgggccgtttttgcttgcaagggtgcaatgccaaaatctctgcaagatatgaacagaaaaatcttctcagaatggttgcctaattgcaaggattatgaaattgcagcaggttataatattgaaatgtacactgatatagctgattatcctaaggggaatcaagatgagaattattacagcgaaatctggattcctgttaagaaaaaatagtaatgtaaaagagtatgatttgaagcacatcagattccaagtttgtaagtttgatgcagaatagttttaaatctagttctgtcatattttcataagctataaataactaaaaataaatagaaaattaaaaaatcgtattatttaaaaattgatatgctccatttaaggtggacagataaaaagataaaatctgtccaccttaaatggagcagttcaaataattgaatttgcgatttttttatatgcaaaactaaaattccatgaaataagaactgtaaagaatagccaatataacaaaacctataatagagaattgagcaaaggatctctgatgattagttaactttgtatttaaaaatacatatttataattaaatactccaagaaataggaatattaagctaaaatatctactatcactgtagccttttattaaacttagtgaaataataaatacattcacaagtactataaaaattactttaatatttgacatagttcttctcctaaataccattttataaaattataccataaatttaggaaataaatttataataatgtaatatttacaatatatgttataatagattaataatgtttaattttaaatagtgaggtgcatcacttgagtgagttttatggattttcaatctttgctatagtgttatttattcttggaacaagaatgttattaaaagatttatatacatcatgtattcatggcagaagtattttaaaagtagaaaaaggaataggattagctattttttggttaggatcaataattgtttggtgcctattattgcggcaatcggtaaagctttatgttagacacgaaaataacggtattattaataatattgttactaatatattttggatagaattttcaatctctaatataataaaatcattaagaagtttagaaataagagaaaatggaatatataagtcgggatatttttataagtggtctaagattagaagttataattggacaacaccaaatacaattgaatttaaagttagcagttttttaaaaattaattcaagtattgagtttacgataaatgaagaatataaagcaaaagtggaagaagtgattcaaaaaagtattgcgttatagttttcttatattaataaaaacaaaatatacattagatttagatgtcgcattagttgaagagaagaatggggcattttttatattttatgtgtagatttgatgtagcaattgatataaaatatgtttttttaaaactgaataatacgatattaccaataatattataattgattcaatataggaaagtattgttaaattaaaattatttgctgcttgtttaaaagggggtgtgtgaaaatatgaggattaagtttattttcttaacaatattaacttttatcttatttatttctattttttttatcgttcatagaaatgaaaataaagataagaaaattgttgaatttaataatcagcaatattcagcgataagaaactttcaagtgaatcaaagttattttgatagtaatagcaggcttaaaagtgagtattctactaatatagcaaatattaatggtagtaaggtctactcgattagtggacttgatgtaaaggattggatatattatgactatgctaattgtgatgtgagtttctatctttcaaaaaatatttataccaatcttgattataggtatttcaattttttaaacaaatttcagttaacaaaatataactatactatagaagatggtctacaaaaagtaatagatagaaccattgaaaatgaagagatagtctcttacgcttataaaactgcttcttcagatggaaattctgacatgggggtaacaagcgataaagtaacaacctattctctgttgttaacaccaaaggatttcccagctctacagtatattattaattattatgaatgtgaaaatggatattttatcggttcaaatactaatggtttatgtactaaagttgataactcaatccatgaaatgattattagattaaagtaaatgtatatggaaactgtaatattaattatcagcataatttagaagttattttgcttcgcattgtgtagatatgacaaatgggcagggggatatgaaatgagattgatattggaagaatttacagaattatatgcaaaagaaatttgtaattggaaatatgatggagaatattctagtactaatttgtatccaagcaaaataattgatttagaggtgcgatctttcaacgagcgggcagttaaatgctataaaagagcaggatttatagtaaaggaaatatataaaaaagatactcctattgggtacggtgaatttataagaatggaatttatctgttgactaattggtgatttgttagataaattgcaatttaggctgggagggaaagtaagctagatgtatttactatctatcattttttatctgattttaaaactgaatagttcataatttacaaaacatgctacaattaaataaaagataaatcataatttgaaaggaattaagataatggattttaaagaaattatgaaacaaaatagaggatattgctcaaagcacacagatatgccagcagaattacaactaaaagcgaaagaattatgctgggaatataatcagactggaccatcagaaaaagaaaagagaagtaatattttaaaagaactgcttggaacttgccatccgctaacatttattgagccgttatttcgttgcgattatggttttaatatacatacccatgggcttgctgtgattaactataattgtgtaatattagatacatcgccagtttacattggtgcaaatgcatttatagctcctggagtttgtttggcttgctcgggacatgctgtatttccaacacaaagggcagaagggattggaacctcaaaacctattacaatagaagatgacgtatggattggtgctaatgcaactgtatgtggtggagttactataggaaaaggtagcgttattggtgcaggaagcgtagtaaataaagatattccagcaggggtaattgcagtaggaaatccttgcagagtattacggaagattacagaagaagacataattaacttgtcagttgagcaaggcaatttctaatttgtagagtttattatatttttttgtaataataaaacaaatgtgcaggcagaagtttaaataatgtaatttgaaaagttaatagtgcgatatttacaagtatgttataatttataaaacaaattgtaatttagacttgggggaaagaaaatgtttatagtaaatttaacttatgttaaaccactagaagaggttgaaaagcatttgaaagatcacattacattcttaaataaatactatgctagtaacaactttatctgctcagggagaaaaaatcctagagatggtggaataattttatgcagcgcaaaaaataaagaagaggtaaatgaaattattagtgaagatccatttcataaaaatggagttgctaattatgatgtaatagaattccaaccaacaaagtattctgaaggttttaaggaatttgttgagtaaagtttgctttatagattaatataactcttaataaatgaataagaattttaaatatcacattattcaaaataataaatgggtaatgtgatatttactatttatgttagaattaattacaatataaattagttaaaaactagatattttctatttttacttgaggagatggaaaatcatgattattggctttattatgtcagctatttttggattacttggaatggtatttctgatttttaaagatgaagcatgtattctgatatcgggatataatttaaaaactaagaaagaacgagaaaaatacgatgaagttcgtttaagtaaagatgaacgtaatttctgctttacatgttcaattatatatcttattggtgcaataacatcaatatttttgggtaaattatgcttttggattgcttttctagtttggtttatatatctttttaaaaatattcattttaatccagaaaaagcatttgataaatataaaaaataataatttaattgggagatgagtacgtgattaacttgatattaatgattccactaggaatactttctatatttttaggatggcgtatttggaaaaaagagcagataacattgattcacgattatcattatgcaagggttgctgaaagtgataagaaaccttatactgaggaagttggaaaaggatgcattatcatgggaattggaattatactgacaggcattattaatttaataggaaacacaaaatatggatggatatgttttgtaatatttgctgtattgggatttaggatgatgtttagagcacaaaagaaatataatggaggattgttctaattttagggcatctcactattataaattaaaaaaatagaataaagttagggagaatatatgattattattttatcaattatagtatcttttttatgtggttcaattcctacaggatacttaattatcaaaaagttgcatggaattgatataaggaccaaaggtagtgggaatataggatctacaaatgttaatagagtagcaggacgtaaaatatctattattacgcaaatagtggatatttcaaaaggtataattcctgtagctttaggaatttgtttagcaaagattcttgaactacaaatgtcaatggatacttatctttcgattattgctatagcggtaattttgggacacgattttactccattcctaggatttaatggtgggaagggagttaatacaactattggtgcattctttgtaattgtaccaattccaacattggttggagttgcagttcattttatattgcgtttatttacaagtatagtttctataaggtcaattgcaataggggtaacgatacctttaatgtgtataattatgaaagcacctattttaataataataagcagtttaatagcatgtattttaatgatatataaacataaagataatttaataagacttttacataatgaagaaaaataatcttaaattatcattaattaattagagaatggatttaccactatttacaatactgttataatttgtttatatagcaagttagtttttattatatattaattgagtagtgggagggtttatgaatatttctattgttgaaaagggaataaaggaaattgagttaatgaaaccattatgggaacaacttaattctattcactataataaatctgtgcactttaaggataaatatgacagatttacttttgacaaaagaatagaatctatttgcaaaaaggctaaaaacggtgttgttaagttagatatgcttctagacaatgaaacgggaaattatgtaggatattgtttaagctcaattgaaaataatttgggagaaatagaatctatatttgttgagaaaaagtatcgaaagcttaagataggagacaagcttatgaaaaatgctttaagttggtttgaatctaacgctataacagatattcaaattaatgtggtatatgcaaatgatgaagcgttacctttctacagtaattatggttttaaaattggaaattacattttgaaaaggacgtgattctaaaaacttacagtcttgtatttataaaagtacaattggattgtaaatttatatatcacattgcgtaaaattaggaatatgatattttatataaaatttcagaatatgtactagtattagtagcactataaataattaaatttgaactcaatcaaatagcaggttagtagaaaaatattttatggagattgataaaaggtttagtttattattaatttgagagaagtttagagggagatatatggatattgagagcaaagaaataagaaaaagtgcaagatatagtttgaaaggtaattggaagattggaatattaagtacgctagtgtacagtggcgcaggtattataggaggcttatttcaagattctagtgttatatggaatttgatattagaaattatatttggtgcattatttacatttggatattttagtataatattaaacatagttagaggagaacaagttaatttttcagatatatttactggcacaaagaaattctttaaagcattaggaattacgctaacagtaaatattcttacactattatggtcactattattaataatcccaggtataatagcagctgcaaaatattctatgacatactatatatgggctgaacatcctaatataagcattcaagaagcaattgatagaagtattaaaatgacagatggacacatttcagaaatattttggttatatataagttttataggatggagcttattagtaatagctccggcagtagctataaaatattggcatcccgaatattttgatgtatttatgtcttttggaatgatttttgtaaatgtgtatgttaatgtatcttttggatctttatacactaagttacttcaagaagggcagagatattaattttaaattgcttaagttttttcaattattaatgcctagagaaataagatataagcaaaaacgacagtacttttgtagatactgccgtttttatatatattttaatgatttatgagattagaatatgggtttcaattttgctatcattttttaacttttggaaagataatcatgtacaaccttaggtgttccaagagttaaatctgttaggatatgagatgctgatacaatatctaatacaggtaaatcagcaagaggagctagtgcatggctaaataattgtagacgtgcacttccagtccaagcaccgtgaatagttatatcagtattttctgcacatattagttcacaaattcttggcttaccatcgtaaccttgaatgatttttagcataaaattgggtcttgcaatttgagcataggcttctttaagatctagaggctcgtgcttatatcccattgttgcggtagctactggtaatgtaccatacttaagtgtcccaactaaagtgtctgaatcaacaaatagctttggatagccaagcttttttggataagcgctactttctcttccaacagcaatagcaggttcattatctagatacatcatatgcaagtagtcacccttaacaccattatattttactggaatagcttgaccacattctgtatatgagcctagtccggttgtatcaggcatagccatcatctcaaatctaacatatgctccatctaattcaagtggctctggtactatttttcgaagagcatctaaatcagttcgataaataatgtttagatattctctattgtgaaatctatatggtcctctaggaaacgctggagcagcaagtggagttgtaatttgtttagatacttcactttctaacataaaacaatcaacctcttttcttagtttttaatacataagatttttaaagttatatatttaaaatagaatgattcatatatccataatctttaagttatctggaataattaaatctgcatctgttaaaaattttatttcatcaatagttgtatctttatgaatttcttttaaaagtaagccgtcatttgttacatcaattacacaaagctccgtaacaattaaatccacctgagctttagcagtaagtgggagagtacattttttaacgattttaggtttgccttttccggtatgttgcattgctactattattttttttgcacctattgctaaatccatagcgccacccatacctgggacaattttatttggaacaatccagttagctaaattacctttttcatcaacttctagagcaccaagaacagcaacatcaacatgtcctcctcgtattagtgcgaaagacattgaactatcaaaaaatgaaccttgaggtaataatgttacatattccccgccagcatttattatatctgggtcattttcacctgatgatgccatttgtgccataccaaccatgccattttctgattcaaaagtaatgttcatttcttttggtacataatttgctactaaagttggaagtcctattccaaggtttacgagttggtctttttttagttcttttgcaactcttttggcaattatctcttttgctaaaactttatctacaatcaattaagccgcctccttaacgatataatctactaatacgccaggagtcattatggcatctctttttaaatcttcacatttaactaaattttctgcttcaactataactgtttttgcagccattgccatatatggattgaaatttttagtagcagctctatagaaggtatttccaaattcatctacaacgctaccttttattaatgaaacatcagcagataaaggaagttctaatagatattctttgccatcgatagtaacttttttcttaccttcttcaacgatagtcccaagtccagttggagttaatacacctccgagtccagatccagctgcacgaattctttcaatcagtgttccttgtggggaaagctcaactttaagttcaccagagctcattttttttccagtttcaggattagttccaatatgtgaagcaattactttagaaacttgaccatttacaataagttttcctattcctttattaggaaaagctgtatcattgcttataatagtcagattttttatatttaaatcaactagcatatctataatattttcaggagttccacaatctaaaaaacccccaaccataattgtcataccatctttgaaaatgcgctttaaatctgttaattttactaatttattcattttaatatctcccttctaaatagtttttaatattttgtgggaacattgcatattaaagttatgtgaataaatgtataaatttagcaagaagttagccggcaagtacacatcttctttgtcttgtaaaatttcttgcagaggttatgccttcaccagtagatccagcaatagtgaaagttgtaaatccttcagcttcataaccaacaccagcaaaagatttagcgttctttacaaaaatagtagtatcaatttctctttcaaatctatttaggttgtctatatttttagaataaatataggcactatgttttctattttgttctgctatctttgcatatttaatagcttcatctatatctttaactcttacaattggtaatattggcatcatgagttctgtcatgacaaatggatgatttgcatttacttcgcagattatacatttaacatttgaaggagactcaacatctatttcatctaaaaataattttgcatcttttcctacccattttttatttatagagtattcttgagtttcattatttttttgtaatactaaatctattaattttgatatttgatattcatttataattacagcattattttttagcatgttagatattaaatcatctgcaatattctcaaaaacaaatacttctttttctgcaatacaaggtaaattattatcaaaagaacagccttcaatgatgctcctaccagccttttctatatcagcagtatcatctacaataactggtggatttccagcaccagcaccaatagctttcttaccagaatttaagagggtttttaccattcctggacctccagttccgcaaagaagttttattgaaggatgcttaataattgcatctagagactccatagttggattttttatagttgttactagattttcaggaccgccacatgaaataatagctctatttatcatttcgatagcaaaggcaacacattttttagcgcctggatgtccgttaaatactacagcatttccagcagctatcatgcctatactattacatattactgtttcagttggattcgtagaaggagttattgcacctataacaccatatggagacatttctacgactgtgagtccgttatctcctgaccaggcagtagtagttaaatcttctgtgccaggagtatatttagctaccaatttatgttttaatattttatcctcatatcttcccatatgtgtttcgtctagaatcattgtagccaagacctctttattttgtaatgcggcctttcttatctcagttatgattttttctctttgttcttttgtataatgaagggataatatcttttgtgcgtgtacagcgctgcttatagcattttcaacattttcgaatactccgaaacatgaagaattatccttgtagttctttaaattaatgttttcaacatttgtttttaattttaaatcttttgttacagatactagtgtgtctttgatcatgactaatcctccttatgatttaaaaattaataaacattaaaaattttatatgaaaattaaatttttatatgttattaaatatatgttatcactaaaatttacagaatcaatcttttaaaccaaaaaagtaaatataaggaagacaaaacgttatcaaatgacaagactatatgatattttttttatatagccgttacagataaattatcgtattattttggaattattgttatatattgtttataggtagagtttgtttagtatttgagtgaaatttcgaataaagactgtaatattgtaatataaaataaatattattgataatattccttataattatatattaaatgcgtaaattttaataaatataatcaataattcaaacaagcatcttaaaagtccgatcttttattaataaaatattgacataaatccagaaattaattggtaattcatattgtcagtgttttgaaaagcagtcaagaatatattgaatgcatatgttataatcagttagtaatagcaagaagatatgacatactaactaattaataatggaggtaaaatggagtctgaatttaaagttaagcaaattactaagttatatgaaagttgcaataaatgtgggttgccaataataaattgtatctgcgatattgtacctaaaataaagacaaaagcaaagatattgatattatcaacagaaagagaatttcgtaggccttcaaataccgctagattattgaaattggtgaatccagaatcaactgagttaattctttgggagcgagtaaggactcctgaaaaattaatcgaatatattaatagcgatgattatgaaatacatatattgttccctatggatgatgatgagcctgtagaaagaaagtctaaatgcaaagattcagaaaaaattccagcatttattatcttagatggcacatggaaagaagcagagaagatactaagaaagagcgattacttaaagaagcttccaagaatatcattaaatccaattaataaatcagaatatactttaagaaaaggtgcttcagaaggagaactttgcactatcgaagcagtaattgaagtacttaagttaaattctgagtttgagaatgcacaactaattaaaggtactttcgatttatttatgagaagttttaaagcaggggttagtggagtagagctaaaagacataaatatataaggttttcagattgttatttcactatagatagatatccaactttaaaactacatttaggtgatgacttaccgaaatcataaatattttgattccgaaaagctatgaaaatattgctggaggttctaagcctcaggttgtatccagtttaacatgctccaactttcagtttgacaagtaaactggaacaacctaaagctaagaacctttagcagctcattttcaaatgttttctccacaaatatatttatgatttctagtaaaaatatgacattaaagttttagcaactttgtaaatatatcaatctaataagtcgaattattaaattgtttatccatatcaatgtacataattgatagttgctacttatagaagatatactcgcattataagcaatcttaaaaatattgaagaagttaagatagaagatctcaaattcatattgtgaagttgggatctttttgtataattttgagattgtatttgatatatagcgttccacaatgatattcaaacttataaaatttcaatatcgctggtattcatgaaattgaaacagtagatatgtattgttatcaatatgtaacttatatagataagctaattataagttagatttatattatgaaatatatcccaaccggaacaaaagtatattattcatttcggagagttatatgcataagttcaggttttagttaggatatctataaatatgagaataataaaactacatttacaatatatgttataatttatttgtgatggaagtttattgtaaattattatagaatacgggggagtgagtgcacgtgaaaagaaaactacctatgatagtgatgtttattggagacatgagtctgctttatgtagccttaattataatatcaatttcacctatgaaaagcattatggagaatattggagtttatcccattcctatgtataattttttagatggtgcgctcagagtattaagcgcgatagtcctattaacaatagcctatggatattttaagcttaaaaaatgggcatacttagaaatcataatttataatgtattttttttagcagtatctatgttctttatagccatgaagacaagcaatccatataatactccaaatattatagaatcattgttaggactcataattgcatttccgtccaagagatatttttttaaagaggaatgtgattcgtaatatatattgcaaaaataatcattcatcataattgtaacaatattacaagaattttagccgaaattgtgaattgtgcatcgtgaattgcaacatatatattgatgcaaaaatagcaccctattttaatgatggtgtttaagttaaaatacatacttctaactaactagattataggaaagtttatgaatacgaacatagagaaggggattatatggagaaaatattatttttcatttttgatgaaatgacagactatgaagttacatttatcagtcatttactaagttcagaggcaggtaaagaaataattactatctcttatgaagataaaatgattgaaggacgctctggtttcttatataaaccagataaattagttaaagatgtcttaaattataatgtagatgggttgataattactggaggatggtatggtgaagttaagcctgaattaatagagcttatcaataaaatatatttggaggggaaattagtaggcggtatatgtggagcaggaaccgtttttttagcaaagtctggagctttaaataatgttaagtatactacgcctattaaccaatggacacaaaagcatattgatatatatggaaaaaatgacccatttccaagagaaaattttgtttctaaaagagtagtgagagataaaaatgtaataactgctcagggaacagcttttattgactttgcaatagagatatgtgattggttcaacttatttgaaaaccaagaagataaggataatttcgaaaaagaagttaaaggattataagtggataattttcgaaaagagacttaataattggagcatgtcttacgcaagttcctcaattagactcaattaaattagttctcccgttcattaccgtattaattttttggattatgaattttagactaagaaaattggcaatacttaaaaagtatgctcagataaagcaataagttcttatccaattagaatccttaataatattataaattaaggagagtataagaaatatatgctttaaagtttattatatttttaagataatttatttaaagacgaagaggagaaaaaaatatgcttgaatataaatttgatacgcaattattaatcgaaggaaaagatctttcagaagatgaaataaatgaatatataacaaaaaacattgagggagattctctgcttgcagttggagatgaggaattgattaagattcacttccatacaaatactccatggcaggtacttaagtattgtgcttctttaggggagatatatgatgttgtcatagaaaatatggagcgacaagcaaatggactcaaaggctaaaacagtgaattattgaaattaaatataatgctgaaaaatcgtattattcaaagaagatgatatgctccatttaaggtaaacagataaaaaataaaaatctgttattttaatgggagtatttttatatctaaaaatgtgaagtttaaagttagtatagataaacaacttaagaatttgatttataatttgcaataaatataatactagaaagtagaaacatttttatgcagcaggcattgaaaatgagctgttaaaagatcttaatcgtaggttgttcaactaatgcttgtcacaatgaaattgggagcaagcattagttgaacaacctgcaatttagcactttcagcgaaattttcatagtcctgtgaaataacaatgtttttactttcggtggattattgcataagtctagcttatatattgtttatctataattaagtttcttgtaggttaactttttctactaatatcaactaggaatccatttacggaaaatgtagaaacacataaaatattattagaggtgaggaatatgaaaaagttaaatataggagaatgtattgcttataagaggaaagagaagggaataactcaggagcaattagcagattatattggagtttctaaagcatctgtttctaaatgggaatctgcattaagttatcctgatatcttacttcttcctgagcttgcgacttactttaatatttcggttgatgaattattaggatattccccgcagcttacaaaagaagatattaaaaagacttataaggaactttcgaatgaattcgctataaaaccatttgatgaagtaataaataaatgtgagaagttaataaaaaaatactattcctgctttccttttttgctttcaatgattcagttattaataaattattctatattagcaaaaactgaggatataaaaaaagaaatttttcagaaatgtatattattaagcaagagaataaaagaagaatcagataatatttctgaaataaagagttcaaatacaatggaagcattggcacaaatgttattaggaaatagtgaagaagttattcgattattggataataaattaataccgtatagtggtgaggatgtaatgctaattaatgcatacaagatgcagggagaaatagataaagcaaatgaggtcaatcaaatactagtatttaataatgtaataaacatgttaagacttttaaacaactatctttcaataaatattatggagcgagttttgtttgaaaaaatttattctcaaggtattcagatcattgagtcttttaatcttaatgagattttgacaaatgatgttttaggaattcatattgttgcagcacaaggttatttaattcacaaagataaggaaaaggccatatgtgctctggagcagtatgtaaatattgtctgcaaaataaagtttccattgaaatttaaaggaaatgaatattttactaaggttgataaatggcttgaggataatagctatattggaacgagcactcctgtagatgagacaacaataaagaaaaattttgcctctgcaattactgaaaatccggcatttgtatcattaagagaagatgaaaagtacaaatttcttgttaaaaaactgaagagaaagttggatgaataaaatgaatgcaataaatatagagaatcttaacaagtcttatgatggaaagactaatgctttgaatgatataaacttgagtataccaaaaggccagatatttggatttcttggacctaatggttcaggaaaaactacaacagttagaattcttaatggaattctttcagcaacatctggtcatgccgaaattttagggattcctgttttggaaaataatattgaaattcataaattatgtggagttatgactgaaagttcgagttgctatgagaatctcactgcaaaacaaaacttaatattctttggaaaaatgcacggagttaaagaaaatttactcaatgaacgtactgattctatattaaaaagattagagctgctagaggtaaaagataagaaggtgaaatcttttagtacaggaatgagaaagagggtttcattagctatagcattagttcataatccgaaaattttatttcttgatgaaccaacgtctggtttagatccagaaaacgcattaaatgttacaaagcttgtaaaggaacttgcagaagaaaacgaagttacaatatttctttgtacccatcaattaaaatatgctgaagatatatgtactcaatatggttttataaacaatgggaatatccttgggataggcacttttgatgaacttgcttcaaagaaaaatgcaaaacttcaactaaaaattagaggaaagaatgtttctgataaatttggatttatctatgaaggaaatgatatatatagcaaacctatttcaggagaccaagaggtaaatactctaatacaaagcattatgaaagatgatggagaaatttatgaggcaatgcagcagaaatggtctttggaacaactgtatttcaaatatataaaaggtacatctgatgatgtgtctttataaatcaggagcgattagaatatgaagagtaatgaaaaagcacttatatataaagacataaatgagttagtaagttcaaaacgagtaattctccctatgactattgttccaattatcttgacaataatagtgcctcttggaatactcataggtgcaaattttataggaagtgactcaagcactattacaaaaatggctcctcttataaggaaattaccttatgaatatacaacatacactccagctcaattactggtaaaagtggctataaacttcatgtttccatcatactttcttataatacctataatgtgttcagcagttattggggctagtagttttgtaggagaaaaggaacataaaactctagagtctttgctttatactccaacatcaatggagcaattacttagagctaaaattctaggtgtatttattccatcgtatattgtgactttgatctcatttatagcaattggaataatatttaatataggtggctttatatattttggcggacttatctttccagatataaaatggttgataattatactttggctttcacctgcaattaatttgctatcgttaatacttacagttatggtgtcagcaaagtcggaaactttccaggaagcacaacaaataagcgggcttcttgtaattccagttattcttgtattaattggtcagatgacaggagtactattacttagcaattttataatgattgtagcaggaggagttctattaatacttgattatgctctaataaagagaatttcttcaaagttcattccagaaaagttaatttaaaataagaaaatttataagtttagattcaataatgaaagtatttatttaaaatttaatagagtgatatcttggtgaaaaaatactgtgataaaatctgtttttaaacaaatttcttgcagtacttcttcaccattattttattctataggaatttagatcggagtgaaatctatgaataacttttaaaagtataagaaatacataatctaataaggagattttcttgtaaattaatgtgatgttttaaatttgtgttataatatggtaaggtttcaaaatgttatataaagtttggacagacttatgttataatgagtggagttgttaattatgatatttgaagacaaaaaagtaaaattgaaaaatggagaagaatgcatattaagaagtcctgatgtaaaggatgcagagaaattaattgattacttaagaaaggcatcatcagaaacagactatatgcttaggtatacagaagaaattactatgactatagaagatgaagaaaaattcatcaatgacattaatgaaagtaataaggatgtaatgatttcagcatttattgatgataaacttgttggaaattcaagtatatgtattattggaaatatgattaaagtttcacacagagcaaattttggaatagcagttatcaaagaagcttggaatcttggtattggaaaagctttgttaactgaaatcttaaaatatgcaaaaaaagtaggatttgaacaagttgaattagaggtagcaagtgataactataaggcaataaacttatatgaagaatttggttttaaaaagtatgggacaagaagcaactcttttaaattaaaagatggatcatattacacagaatatttaatgatgaaaaatttataggtattcaagatttaatattattcgcttattcttaataaagcgttatttttgttgtgtgtgtattttaagttatataataaaaaaatgaaattgtagtttttgtttagataaaattctgctaggcacagtggtgtaatgttacagaatctggggttaatagaaaaatattagaagctttactaacaaactaaatagaagatgaaatctataatttatttacattcaaattataaagataacttagagatttatttgagattaaatcaatattatttatagtttattgtttaattatattaatgaaaatagattgatatttgcaaaataataaaggaatttgactacttatgtagaattattaatattattaagaagatagtataggtgaatataaatatttgaggaggattataatgggatataaagaacatttaactgaaaatttaacggacgaggaaattttaaaggcattttctattgttttgccatatcttaacgatctatcaagagatgatacagcatttggattaacagatactgaaaaatatatcgaatatgaagatcctaaggaatttcagttgcaacttagagctggctctgaaccattagatgttataaaagattctttaagaagtggaagacttgaaaaaggtgatacaaatgtatctggcaaagaaataaaagttatatcaatacctattagaaattcaaaagggaagattattggaacaattagcgatggaattgatttagatgatactactagattggtaaatagtgtttcggaaatatcagaatcattagatcaagtttctacaagtgttagtgaattagctaattcggcctcaaattttgctctaactggacaaaagactctaaagcaggctcaagatgttatggagacttcaaagaaaacatcagatgctatagaaattattaagagtatcgctgatcaaacaaatttactaggattaaatgcagctattgaatctgcaagagctggtgagcatggaaaaggatttaatgttgtatcaacagaaatcagaaagcttgcaagccaaagtaaagaatcaactagaacaataaatgatattgttattaatatgaatcagtcaataaatactataattggagctgtaaatgaatcagcatcagaaagtgaagaacaagcagcagctattgaagaaataagtgctactattgaaagtataaatgctaatttaaaaagattaaatgaatttattgaaagatttgcataattttaagcaacaataataaataatatagatattaaaatatcgcggtattcatatgaatttgcgatattttttatttaggaattttataatatatagatacctaaatttaaaactgcatttatgtgataacttaccgaaatcataaatattttgattccgaaaagctatgaaaatatcgctgaagcttctaagcaacaggttgtatccactttagcatgctccaactttcctagggaagctcgactcattacattcactgaggaagttcgagaacccaaaataaaattttggactctcacttcacaagctaaaatggaacaacctacagctaagaacctttaacagctcattttcaaatgttttctacacaaatatatttatgatttctagtgaagatacgaacttaaagttttagaaaccttgtaaatatgttcatctaataaataaaattcctaagttgtttatctgtatatacgctgaaataataaatttgcacttgaactctagcaagtcaaatgcttaagtaaacatagaatgtagaaaattaattacaatatatatatggaaggagatagttatgaatttttatatttttactttagctatatgttcaataatatttttaatatatgctcttaacggagtattttacatatttaaaaaaccagaagctataattaataaaaaattatcgaaaacagaaaagatatatgaaattacaaatgttaatgagtacttgagtaatttaggaaaattaaatttatattcagctattatcctctatgcaggcgtcttaatttcactttatgctgataaatatagatatcagatttcaatgtacatatatatcgtaatttactttgcctatttttatttgataagaagtaaaattgtgagaaagatagaaaaatatttaattcgcaaggatactaaagattaaaataaatgcgctactgatcaaaaaaatattcttgaccagtagtaattaagtatttttgaagaataaacattaaatagaaagtgcgcatagttttgcacagatattgtataaaaagttcacacttatttttggaaataaatataagtgtgaactttttcgcttttttatgttttaatttttgaaaaaattttcttaacataaaatcgtcaaagtgtcttaataaggcaaaatttgttttttaacgacattaattgtttaaaagttatttttaattcttagaaatatgaatttggcatatgttttgcttattaaataaagtgtagtaacaaagcaagcttgtttgttaaatattaaacatagggaggcaaaaaaatgataaaaggattatctaaattttttacagctattgttcaaaaatttcttccagacccacttgtttttgcaatgattttaacattgattatgtttatttcaggtattatatttactggccatactccaattgatatgataggattttggggtaagagtttttggaatcttctagcatttggtatgcaaatggcgttaattttagtcactggtaatgcattggctagttcaccacctgttaaacgtattctgcaaaagattgcaggagtgcctaaaacaccagctcaagctattatgcttgttacatttgttgcagcggttgctaatattattaattggggatttggtctaattgttggtgctttacttgcaaaagaagttgccaaaaaggtgcgacatacagattatcgtttattgatcgcgtgtgcctatattggttttatgacttggcatggaggcttatctggttcaattccacttttggcagcaactaaagggaatccaatggaagcgacaatcggattaattccgctaggtgatactatttttgctccgtttaatatctttataactgttgctttaataataatattacctttaatgacaagaatgatgatgcctaaagatgaggatgttgtggagattgacccagcattattagcagcagaggcagcaaatgagactagtactgatactataactgaaaaaacatttgcagtacgcgttgaaaacagcagaattattgcatggctaattggtattcttggggtttgctatatggtttattacttcatgaatggtggttctatggatgtaaacgctgtaaatatgattatgttctttgcaggtatcattcttcatggtagtcctgtatcttatatgcaggctatagttgatggagcaaaaggaacagctggtataatggtacaatttcctttctatgcgggtatacaaggcatgatggatttgtcaggattaggtggaatgattacaagtggctttgttagtatatcaaatactcatacattcccaatttttgcgtttttaagttcaggaataattaacttctttgttccatctggtggtggacattgggttgtacaagggccatttataatgccagctgcgcaagcacttggtgcagatatggggaaagcagctatggcaattgcatatggtgaggcttggatgaatatggcgcaaccattctgggcactaccagctttagctatagcaggtcttaaagttcgtgatattatgggattttgtgtaacaaccttaattgtaggtgctttaatatttggtgttggattagctttattttaacaattgaaagaagtaaaaaagtacgtttaaatctagcccttataacttatttgatacttgcggattttatacgtatttttatcagttaatagtatcagactatagtctgaaatctgcaaggttaaagtttgattatactaacattattatatggaaaattaaatatatggagagaaaggatgataaaaatggatataaagaatatagcagtattaggtaccggaactatgggacatggtatagcattattttctgccaaggctgggttaaatgtagttatgtatggtaggtcagatgcaagtttagaacgaggctttaatagtataaaggctagtttaaatcttttgaaagctgaaggaaagttagaagatagtgggtataaagaaatcctaaataaaataaaaggagttaaaagtattgaagaagctactaaaaatgttgaccttataatagaatcgttggcagaagatttagagcttaaacaagaaatatttaagcaattagatgagctttgtccaccaagtgtaattttagcaactaatacgtcaggattaagtccaacagatatagctaaatatacaaaaaatccagagagaatagcagttgcgcatttttggaatccaccacaattaattcctttagttgaagtagttccaggagaaaaaacatcagaggatacaatagtaaaagttatgaaatgggttgattttataggaaaaaaatctgttcgtatggaaaaggaatgtttggggtttataggaaatcgcctacaattagcgttgcttagagaagctttatatatagtagaaaaaggctgggcaaagcctgaggaagtagataaagccatggagtatggtcatggaagaaggcttcctgttactggaccattatgtagtgcagatttaggaggtttagatatattcaataatatttcttcatacttatttaaagatttatgcagttatactgagccatctaagttaatgcagtatatggttgaatcagggaactcaggaaagaagagtaaacaaggattctataattggtcaccagaatttatagaaagtaaagaaaaagagcgtgcggaagtgcttttatatttcttagatagagatgctaaaaaataagctgaagtaattaaggctattgaataaataaagtaagataaagtgggagggattaattatgaagtcaaaagtaatctctatagaacaatcggttgatttaataaaaaatggagctactgttgcagtaggtggatttgttggatgtgcccatccagaacaaattacattagaaatagaaaaacaatatttaaaaaggcatgttcctaacaatttaacattagtttttgcagctggtcaaggtgatggtaaagatagaggattaaatcaccttggttatgaggggttagttcacagaataatagggggacattgggcattgacaccaaagcttcaaaaactagctttagaaaataaagtagaagcatataatttacctcaaggagttatatcacatttgtatagagacattgcagctggaaagccgggaacaattactcatgttggattgaaaacatttatagatcctagaattgaaggtggtaaacttaatgaaattacaaaagaggatattgtaaaagtagttaatattgaagagaaggaatatttgctatataaagcgtttccgatagatgttgtacttttaagggctacttatgcagatgaagacggaaatgcaacaatggaaaaagaggctttaacacttgatgcaacagcaatggctcaagctgctaaaaattcaggggggatagtaatactacaagttgaaaaggttgtaactaaaggttcacttgatccaagaaaagttaaaatcccaggaatatatgttgatgctatagttgttgcatcaacagaaaaccaaatgcaaacttttagtgaaaactttaatccagcatattgtggagatactaaggtaccagtggattcaatagaaccattaccacttaatgaaaggaaggtaatagcaagaagatgtgctaaggaactagtaccaaatgctgttactaatttaggtattggcataccagaaggaatagctatagttgctaatgaagaaggtattgcagatcaaatgactttaactgtagagccaggtggagtaggtggcgtaccagcaggtggactaagttttggagcttcaacaaatccggtttgcatactggaccaatccagccaatttgatttttatgatggaggcggtcttgatgtagctttcttgggattagcacaatgtgacaaatcgggtaatataaatgttagtaagtttggacctaagattgcaggttgtggtgggtttattaatataactcaaaatgctaagaagttaatatattgtggcacatttacagctggtggtttaaaagtaaaaattggagaaggtaaattaataatagaaaatgaaggtaaggctaagaaatttgtggatgctgtcgagcaaattacttttagtggtgaatatgcatcaagtattggacaaactgtcctttatgttacagaaagagccgtatttaagttaactaaagaggggttacttttagaagaaatagctccaggaataaatttagaaaaggatattctagataatatggattttaagccaataatatctcctgaattaaagcttatggatgaaaatatgtttaaatagttgatttaataagttcttaattgcaattcgaagaatataccttgtccataaataccctgctaagtagatttcaacacaaacgcttacttagtggggtaatctaattattatgccgcaaggatttgcacttgcttgacacgaaaatgtagaaatatcataattataaatgagatatatgtataaaatattaatatttatgggggtatcctgatgaggcttcttagtatgcgttataagcttataattattcttgcacttgcggtggtagtaccgcttattggaagtggctatatactaatttatagtgcggaaaaagctatgaattcagagaaggaaagcaagctctatggaatagcaagaactttagatgctagtatggaaggtgattttgaatccttattatctatagaagctaagagtgcttcgcatgacgaaaaggtacgactacttaatcaaagactatcaggagttacggaaaaaattgtttcgggaaatcccggagtaggagctgggtattattctaaagatctcgattgtattattacatatggaccaggttctgaatatgacactacggttggacaatcaataagtcaagaacatttgggccgggaagtaatggaaaaggggatacctttgactgcaagtggtaagatggttagaggaaatattctaaatgccatggttccgatcattcgaaataataatgtaatcggatacgtatgggctaatgaaatgactgaaagcatagagcgtcaaataaatgagatggaaattgtgatgtacgaagggttggctattgctttagttgttgggctaagtataagtatgactttagcaaatagagtttctaattccgttaatggtattattaaaggactatctagtttgggcaatgatttaagtcaacgattgccagaaattaatggtgaatttggaaagattgcttctgccattaatggaatggctcaaagtctaatgaatacacgttcacatacagaaattattatggagagtatggtagatggaattattacaattgataatgatgaaaagataacagagataaacgctgctgcttggtctattatgggattaaataaagatgtgattggagttaattataaagatctattctccgggaatgctaaagttcttgacatagtgctagaaactttacgtgtcggtaaaaaaattatgggatatgaagcagaatttactcgttcggacggtgcaattattccaattagtgtcagcacatctatgctatgtaataataataatgtattgggtgtagttttagttttcaaagatttatcagagcataaggcttttgaggattatgtaaggagattagatcgtcttgccgcagttggagagcttgctgccggtgtagctcatgaaatacgtaatcctctatcagctatttcagggagtgtgcaaattttggtggatgaattgccaaaggataattcgacacggatttttggaaacgttgtattgaaagaggttgatcgtcttaacggcgttattgaagatctcttgtattttgctaaaccttcaaaacactatgtgacatcaatcaatatcaacgaacttgtggaaaattctctttttttacttttaccgagtataaaaaaggagattgttgttttagaaacacattttgatcaatcaattgaagctatttcagttgatgctcagcttattaaacaagttttagttaacctattactaaatgcgacacaagctatgcctcaagaaaacggaaaaattacagttacaacacaaagggtgattaaagggattgagattatcatagaagacaatggaaaagggattgatcaggaaagtttacctaggatttttgatcctttttttactacaaaggatacaggtacgggactaggacttgctgttagtaacaaaatcatagaaattcaccaaggatacattcgagccgaaagtatagttggtattggaagtacatttacaatatacttgccttatgaaagtggaattaaggaagtatagtgtaaatttaaatatagaaaaatatattaaatacaatttaagacttgtaatcttaaaaatagataaaattatgttgcataacagagcacgttaatattaatagtatgacaagctaatgctattaatattgcactgatggtaaagtagctcaaaataaatagagttcacaaaaaataatctcactctttaatgtcgctttttggtatagggatttcaactgtaatataaaattttaaaagtatcatttgaaatacaaaaaatgtctgaagtatttatgcattaagaaaagtaatttattacgttatattaattataaaaagatgggatgattttatgaaaagtattaagactttactcacggttgttagtataattattatttgtttatctatgaccgtactggaggttacaagttatatagaaacgaaacagatggttgaaacagaagtgaagacaagcatgacttctaccactcaatcaacagctaaagaaattggattgtggcttgatattagaaagtcggagatggaaagtattgcaagttgcccagtttttgtgaatgggagtaggcaggatataatagattatatgtcttctgaaacaagtcgtcttcctctatatagtgcattttggctttcagatgctaatggagattggtattcggctacaggtacaacagggagcataagcgaaagaccttattataaagaattactagctacaggaaaaacagtgatatcagatcctttacttggtaaggcagatggaaaaatggctgtagttgttgctgttccgataaaggttaatggtactattaaagctatctggggtggtaatgtaaaacttgatgaattagtacaatacatatcttctataaaagtaaaacaaaatggttatgcttcacttaatttaacagatggaacagtaattgcaaatcctaataaagatttaattcttaaatataatccattaaaagatgagaaaatcgaaccaaaactaaaagaaatatatgaaaatatgttcaaaggtgaaactaatgttgaatattatggctttaataagcaatatatatcatataagcctgtttcaggaattaattggacagttagtctgatagtgtctaaaagtgaatttactggaccacttacacaacaaatttataaatcagctttaactttaataatcactttagtaatagtaataattttatttctatttatgttaaataaaattctaaaaccattaaaggctatagaagatatggcgttatgtatctcagatggtgatcttagtgttgcaaaggtgagagttaattcaaaaaatgaatttggcagactcgctaaaacttttgaaaatatgataataaatttgagaggattaattgaacaagtttcaatatcatctgataatgtagcaactgcctcaaagctgttaactgaaagttctgagcaaacttcggatgcatcaaatcatatagcaacaactattatgaatatatcagaaggtgctaataaacaaatggaagttgtaaatgaaacttcttctgaaattaaagagatggataaaaaaataaagaatatggcagagaacacagatagcatgatagaaacagtaggagaaactgcaaatgctgcacaattaggaagtaaagctgttagtgaagtaattgtccagatggctaagattgaaaaagctgttaacagctcagcaaatgtagttgaaatattaggtgaaagctcaaaggaaataggacagatagtagatacaatatctactatagctaaacaaacaaatcttttggcactaaatgcagcaatagaagcagcatgcgcaggagaagcaggaaaaggatttgccgtagtggcagaagaagtacgaaaactttctgaggagtctagtatagcatcaatgcggatagcaaaacttattggcgatattcaaagagaaactgacgatgttataattgtaatgaaagaaggaactcaagaagtaaaaaatggaactgatgttgtaaattcaacaggtaaggcatttagtcaaatatcacaggcagttgagtgtgtagcagcccaagtaagaagtgtatctgagacggtaggacaaatatcatcaaacagtaataagattgttacttcaatccataagatagaaaaaattgggggtgacactgcagagaaaacacaaacagtaactgcaacaacggaagaacaatctgcatcaatgtatgaaattgctggatcaagccagaacttactaaaactatctgaagacttgcatgaagctataagtaaatttaaattatagatacttttcttttaaaaatgaaaagttttttgtgaaaagtttattattatattcaactaaattccatatttgatttaaatatggaatttggttgaatattgatatatactgtaaaatgttgtataactaaagtagattaataattatgtttataaaaagaaaggctgattacaatatgacagaaagtgttcgtgttttagtagctgatgatgagctaagcttgagaatggtacttcaaacagcattaaataaggctggatatgaagtagatactgttaaaaatggaaaagaggcactttgtatggcgcaggaaaatcactatgatgtcgctatccttgatatccgtatgccagaagtggatgggttgcaggcattttatgaaattcataaaattaagcctagcttgccaattattcttatgactgcatttggaagttcggaaactgcagttaatgctatgaaacacggtgcttatgactatatattaaagccttttaaccttgatgaagttaaaattattgtaagtagagctattcgcatgcaacaattgactaaagaagttgtataccttacgcaggaagtacaagaaatgggaatgacagcaatgaccccaggtaaaattgttggggaaagctctaaaatccaagaagtatataaaataattggacgagtagcgaattcaaaagctacggtattgctaacaggcgaaagtgggacaggtaaaggaatggttgctaaggctattcactatgcgagtgacaggagagaaaagccattcattcaagtgaattgtggttcgattccagaaggtttattagagagtgagatatttggacatgagaagggagcatttacaagtgcattttttcaaaaaccagggaaatttgaactggctgaaggagggacactttttttagatgagattgcggagatgagtccaaatcttcaggtaaaacttcttagggtgttgcaagaaaaagagtttgaacgtgttggtggtacaaaaacatttcatacaaatgtacgtattattgcagcaacaaaccgtgatctgaataaagagatatctgaaaagtcttttcggaaggatctatattatcgacttaatgttgtttcaatatgtttacctccactttgcgaaaggggagaagatattgttttactagctgattactttttaaaacgtttttctgtagaagtaggacggaatggtatgtttttcgctccagaggttttggatatttttcgtaactattcttggccaggaaatatcagggaattagaaaatgcagtagaacacgctattattatgagcaacacccgtgttattttgccggaaaatcttccacttagcataaaagtagaagatgtagaagcggatggtaccattattctgggagatgattctttcaaacctttgcgagaagtattgctagaagttgaaaagcgtcatatatccgaagctatagaacgaacaggtggaaaccgcacacaggctgcaaagctccttcagatttcacggagagcccttctgtataaaattaatgagaataatatcgattaaatcattatatgtaaacatggattgagttcgcgttaataaataattcttttttggattttaagggccatgcctcgcctacattatgaatcccacgaaaatctaaaattgaactgccccctgtcaagtagacagatgaaaaaacaaaaaattatgaaaccaaggtctgatttcgatattcaattggagtcagaccttttaagtttttctgtagtctttttgtatt

SEQ ID NO: 29 - DNA, 64271 bp, Clostridium beijerinckii
aaaaagggtatagatgtaattatcacttacaataatcaaaaagaaaaagcagatgaagttgtaaaagaaattgaagcaaatggtggtaaagctgctgctattcagcttgatgtaagtaatatatcttcatttgattcctttgcatctaagttatcagatgttttaaaggataaatggaatagagagcactttgattttttaattaataatgctggaatttcaagccatactcctattttagaagttacagaagaagagtttgataaaatagttaatgtacactttaaaggagttttctttttaacacagaaactaattccgcttattgctgacaaaggtggaattgtaaacacttcaacaggattgacccgttttacagccccaggttcgggactttatgctgctgcgaaaggttcagtagaagtttttactagatatttagcgatagaattaggagctagaggcataagagcgaatacgatagctcctggacctgttaacactgagtttagtggagacacttatattaaaaatccaagtttgaaagatacgattggttcttatgctgcactcggaagaattggagaagcttctgatattggaggtgttgtcgctagtctatgcgcagatgaaatgggatgggttaccggtcaacgtattgaagcatctggcggtatgttagtataattaaaagatattactcttaatcaacaagatcttataagctttcgttgattaagagtgcatatatggagcttttttaagataagaaatttatatttacttttataaaataataaaatattaatatattttatttagtgctatattcgttcaatatcaagttcactcattcttccttcacaaaactcccgggggcttttatgagcgaagcgaatttgctaatgaactaatcagtgttacggctgaaaaagggtttaataacgttattgatgcatttcacgttgaagccataacattgaccattaaagctgacgaggagaagtaccataatactgtttaaaggccttatagaaattgctgctattgctgtatccgagcatatcagcaattttttcaatggaaagatctgtatgattcaataatagcttcgctcttcgcatacgtgattcagctagcagagcagaaaaggtcttccctgtcttttccggcaaaagacgggaaatatagacggggtgatatccgaaatgggatgcaatgtcattcaatgttacagaatcagagtgtgattcgatatattccataatccggtcaattaatgtcgtgccagtaggtagacgctgacgcttgtactcataggaaagatacattgcaagggacatgaccataggttttaaaattttctgtgagtcctctgttttatgagcatattcaagaatcatgacattcagcagctgccagattggcgaagaagctggaatttccagatgaacgaactcttctgcatatttgtttttctgtggttccagaaaaaaattaagcatggagctatctgctgagagcgcactcaggtattcccggaaaaaggtttctttacgaatcagtactcctagaataatacattcgtgatcagaatcacgcttaacagcatagccgctatagggctgaccgatatagcagtctccttcttttaccgtgatccgattgttatagttggcgcttaatgcatcataatctccgtggtaagcaaaatgaatgaaaaaaaagtcctggcggtgaaaacgctcctcaattttttcccctttaaatgcacacaccataacttcctcggatttctctcccaaccaatgcgaaatcagttcgttatttcctgaggacggatccgggctaaagtcccaattgaggtgcggaaagtcctgaccgagtttttctaatgcgtgatcgatttcggtatcgcaattccaagacataacaacgttcctttcttcagatttctgagcaattctttcaagcattgcaacgtttttagtaaatcagatatttttatatctaattgtaggttaaaatacgccataattcaagttaatatttagcgctgatttggaaggtgaaaatctatatgattgagtagtagcaagaaagttcaaattgaaaggaatagaacttatgtataattttgacttttatatgccaacaaaagtattatttggagcaggaaaatttcaggagccgcatacagaagtgcttccaggaaagaaagcactaatcgtgacatccggaaaagattttatcagagcattggatgaactgatcgaagcagtcgtatgtaaacatctccgaatgagtgatgcaggaatcaaggaagaagagctcgcaaagtatccgaagagaatacacgaggtgctcggcggtgacattaccgcagacccgttaccgcttacggatgaagattatcttgaaatctataagaaatcatatcgttaagagcataatgcatcgaataactgtgatttattacataatttaaggaggataaatatgtctagaaaaaatatcggagcaaagccatacatcacaccgatgccggttttgatgatttcatcttatgatgaggctgaaaagccgaccgcaatgttagcagtatggggcggaatcacgaatgagacagaaattactattaccgtagcatcccagagaaacacgttaaagggaattcttgccagaggttcctttgttgtaagtatggcggatgtggaaaatgaagttgcctgtgattaccttggtataacaacaggaaataaagtggaagataagtttgagaagtccggattcaatacaacaaagtctgaattcgtagatgcaccgattatcgatgagcttccttttgccgttgagtgcagagtgaagagctatgatgaggaaacttggagactggtaggcgaaatcgtcaatgtaagtctggatgaacggattcttggagaagatggcaagatatcttttgaaaaattccatccgatcactttcgattggatgaataagtcatatctgtccgttggtgaaaaggtcggtgatgcttaccgcgatggacttcagttgagagagaagaactaagaggaggctgtttattatgatgaaaaatttaggttcaaacgctttttcgtatgggtatccagcgccggttttaatggttggcacttataatgatgatggaacagtcaatgtgatgaatttgcatgagtgtacaaggacgaatgcaggtgatcttgcattatgtattggtccacgtagtaagacgcatgaaaacattaaaaagagacgcgcatttactgttgcactggttaataagaatttgataaaggaagtggattattttggaattgtaagcggccagagagttcctgataaatttgaaaaaacaggattgaaggctgtaaagagtgaacgcgtcaatgcccctatcatcgaaggcagtccactagtcatcgaatgcgaactcatagaggttgtaagagcaaataatttcactactgtacttgccaggattgtcaatgtagcggtagatgagttagtgttagataaaaccggcataattgatgccaagaaaacaggaatgttattttttgattcgttcagcaacagctatttttcattaggtgagaaagccggagatgcatgggtcgaaggaaaaaaatatctgtaaattcttgttttgcatgagatttgcatttatatgagattaatacgagatgttaaagatgaacgataaaattatgtcggtcgtttttgccggacatgggagccctatggtggcattagataacaatgaaattacagaaggtatgcaatctaggcttcatggctatgacagggttcgttttcggattataatacacggaacatgagtcgatgttagatataacaaaaaatcgatgccaggaaaatcagtttgtagggatataatagatattgttttgatatgtttcctaaacgagggaatctagaaacatcaacgctgtcatgtcgagccacgtggagacggtaattttgatgacgaatagtggctctaaggtcaagtgagacgggtcaatcacaatatgtagtggttttaaagtgaaaaatgagaaaaaatcgggactgaaaaatgtgtttttcagtcccgattttttttgccctgtttatagatgacatccgagattttcattggtttctaattaatgcctcaatggaataagacggtataaaattctattgtgcgaatatttatctaacttgttggggcacttcatttcttgagaataacttttttactcaaaatatgaattccaatccagcatagcaataataacacctgtgccagaacaacaagccatagtacctgcatgtatccacctataatgcaaaatatggtattaaccagtggaaaacccaggaatgtaaacatgataggaaaatcttttttgtaatccatagaactaatgaccttacgatcccagaacttggttaaggttaacactaaaattcccactgaaattatagtaagtgcaatcaacattacccattgcatattagaagttcttgggaaaaatggtgccatataattaaagaaattggataaaggtgaaaccaaacaaactacagaaagaatggaagccaaaaacggatatatgtagccaattagtttactatagcctttctttttatgccaccattcaccgattaaaataaatgcagtccagtatccggctatatagatccatcctgtaaaattcatgacaggttccccatatatgacaggttcaccagggatcgggaaataactccaccggccaatgattccttccgaagtttgaaaaatctgttttactgcgactggatccagtgaaaagtcaaaaatcatagcactaagtccagtaatgaagggtttagtccataccggtatattgatcgtcttcaaaacacgtaaagttgagtaaacgataagaaactcgataataggaacagttaatggtatattgaatatcattaggatactgtgcccataggcgtaaaaacctttatttcccataagtcccatagataccgcaacattttcaaagactgcggcgtagaaaaagacaaaacataggaattgcattaatacaatctttggacgttcttcgttttcaattatatagaaaaccattaatgcggcgatgattagaactaaaatatcttgaataatccatacaggtactatagttatatttcccattgtattacctccatttaaaattataatttatttgaacgttcaaatatgttgtatgttaaatatattataattatacagtgctacttaatcaacaggcagttcgataacattacgttcgatatcttacaaatcagataagtgttgttcgttcactgaattatttaaggaaggtaaataagagcaactcaatcatcatttaaggttaaggcaagaaaatatttttgggatttaaaattatagaaaatctatgtagtaaatgtggaattattactgagattatagctaatacttagaatgaagaagattaagaagtatagggattctatacgaaaacttaacttatacatgaataagttaatagttgaagtagaaaccctatggatggttgtgaagatttcaaaagattttttaaaggattaacagatagaccaaagaagggaggaagtttgtcaaaactagcaacattataaagcttgaaaagcagattagattacttcaatgaaagtagtatattcttttagaattacaaaatagaacacattgaacagggaattaaacaagttttataaagttttacaaggttttggcaacggtattatggcatacgaaaaagcagaccgtcgggtgaaatatacaaaaatgattataaaaaacagtttactggaacttatgaaagagcgtcctatcagcaaagttacagtgacagatatatgcaaaaaagcagatataaatcgaaatactttttattcacattatgcgaatcagtttgaacttctttcaaatattgaaggtgagttatatgaagaaatcagacaggttgcggaacgtactttgaaccttgaaacttatgaaaaactatcatatgaaatttgcaagtatataaaggcaaatagcaatatatgtggagtattattttcagagaacggggataaagaattattgaaacgtattatttatatcagccacgaattaaatattgagaaatggaagaaggaagaaaaatatattgatcaaaaactatttgataattggtacacatttaccgcatatggcactatagccgtaatagaaaagtgggtcaatagtggtatgaaggaaagtccaagtaaaattgctgcttttattaataaagcgacagaagcagtatcgaaagatttttattgatactccctagaactatctgtatcaatagctactccaagtttagctgatatatatgttgcaattcacaattacagataaaattcttgtaatatttctagaattatgatgaaggattatttttgcaatatatacattatattatttaacttgttaattgatgatgataaccgataaattgtacagtaacgaaagaacaaaagggcgtttgcttggatctataagctttatacatatttatccaataaatttccgtttattccaatattttgacgttttattccatttctatttacattgttataagaatgtgcatattataggttatagaaacaaaatatgtaaattaatttgataaggcttaaagctgtgaaaaggcagacagtaattaatatagaaagtcaatttgatttttctgatctattatctatattaattttctaagtaatatgcctatatactatgaggttcataaagaaatttatagaattttaatcattgttattatgtttgttttattatgcataataatcatgaaatcattattaaaaataaagggatgatcgaaaatgtctctaactgaaaaaatagcaactaaaatcggtagtaatgcaaaattatttttgaatgttaatgaagaacaagagcagataatcgtatatggagcaataaatttgtttcaaatgctatttgctatcttatgggtcataattgcggggttgctttttggagtgttttatgaagctttaatattttctattactgccagtattcttagaaaatattcagggggtgtacatgcatcctcgccaagtcgctgtgttataataggaacattttcagcagcattagctggaattttaattaataatatattttacaccataaatagtattactgtagcagtaataagcggtgctattataatatttgcatttataacagtttttagaaatgcacctgtagatagtattaagaagcctattaaaaatattgaaactagaagacaatttaagaggaaatctatttttactatatttatttttttattcataataataattttattcatactcaacgaaaagttttcagaattgtattacataaaattaatagaaagtattggagttggagtcttatggcagactattactcttactaagaatggaataaactttttaaacaaagttgacttttgcttaaaatacataattgagggaatgggaacaaccttgacaccaaaggcaaagtaactttaaagataggataaataaaacaatcattttatagcagaaatatgattgttaaaatatacatgaaaataagcatgtggaagatgacaatgcaaaaaggagaaaatgtacaaataatttaaaatagtgattaatatagaaaatactttaacttttaaatatataaaatattaaagaaaagagaggaatgtaatgtttagacttacttgcgtagatttcttttttagacttattccagaatcacttattttgatgtgggggatacacatattttctagaaaaactattaatatgtttagatacatacttttaagtttaatattagctatatcgtgttttattataagatttttgcctatatactatggagtgcatacagatatttgtataatgctaactataattattgttatgtttattatggatataccgttaataaaaagtatgcaaggagcttttttattatattttatgctttcattaagtgaaactattagtatgttattactaagtaatttaaatacaaatacagatatttctgtcttacagccaataacaagatgtctatatggcattccaagtttaattatatttataatatcagttataattttaaaatttgtactaaaaaataaaaaagccagtccaatttttctttaatatagatatagaatgtagaggagatgcaaataatgaataatattttaagaaatttcttacttaagcttacattaaatatttgtacgagaatggcgcttagagtttcggcttcagcatgtaattggggattatatcaacctgaagaaccaaaatgtttaagagatgttaaaaatcattaaaatcaatattagaagtaaaaattgttataaacttaattgacaatttttacttttaataattatctattgaaaggaatacggacgtatgggaaattatataaatagacataatgaccacttagaaacaatggtaggggttattaaaatagcaattatagtatttagtagtataataatacatatgaatttaccaaagtattggtcaagcttatatatacatgaaaatactcaatgtaatatatatatgatggttttttcttcgttttctactggcataaatttcataatatgttcaatgattaccattgggtattcaatattacaaaaggtaggtttattaaaaaaatcatggttaatagataatattatttttacatttattatatccatacctatatatttatccagggcatatcaaagtgaatgcaaatatttatttctgttattaataatatattcaattattcaatatggttccaaacgagggatagtaacatcacttttttcttctggtattattcttgtagcagatttattgtatgctcccttagagaatggagttaatatatactttcaaaaagatttaataatgtgtggtgtatttatttttgttgcgtggattttggggtattatgttaatattgaagctgaaaataataaaaaaaaagatgaaactcttaatacattaagcaatgaaaaaaaagagatggaatctctattattaaataataaaatttgttatgatatgttatttgaaaattcattaaactcaattattgtacatacaaatggagaagttatatatgctaatgcaagtgcaactaaattattaggtttaaagggcgagaacttttataatcattatttatcggaagttagcaaagatattaaaaaaaaatactcaagaattagccataataagcttgtaaagattacaagtgaggagagcatattaaattgtgatggtgaattcattccggtgattaatacatcatctttttttacttataaaggaaaaccatcagttttgacatttttaagagatataacatctgaaaagaaagttgaatcgctacaagaagatatagaaaaaaatctaaagctacttaatgagtcaagagaatttaacaatcttataatgaacttttttactaatatgtctcatgagcttaagacacctgttaatgtaatttattcagcagttcaaactgtaaatatttattttggcaattataatttggaaaacatagaaaaatgtaaattatactttaaaacaatgaaacaaaattgtttaagactgattagaataataaataattttttagatgtaactaagctaaattctgattctggatttattaggataaaaaagagaaatggtaatattgtaaatattattgaagagattactcaatctgtggcatcttatgtcaatgataaagatataacacttatatttgatacaaacgttgaggaaaagatcatgggatttgaccatgatatgatggaacgtataatgcttaatttaatatcgaatgctcttaaatatagtcattctaagggaaatatatatgttgagtttatagataaacaaacaagtgttatcgttaaagtaagggatgaaggggatggcattccaaaggacaaacttaattttatatttgaacgttttggtaaagtagataacactctttcaagaaaatgtgagggaactggaataggattatatcttgttaaatcttttgttgaaatgcatggtgggaaaataagtgtttcaagtgttgaaggacaaggtagtgaatttataatagaattaccagtagaattgattaaaaatgaagaagaagaagataaaattctatttaaaactaatatagaaaaaatacaaatagaattttcagatatatactctctacagagttaaaaatatagatagtactttaaattggatatgagctgtggggataaaggtaaattgtaatttggaggctaataaactaaaggatacttataaatattgaaatagaataaatttaaaattaacaagaggggaaattaaatgaaaaatgtaataactattcaacatacacaatctattcatcatactaatgggatggttggttcttggactgattgggatttatcagaggtgggaatacaacaagcgaataatattggaaaaaacttatcaaatcagttatcagataaaaagtatgtattgtattcttcagatttattaagagctaagcacacagcagaaattgtaggaaggcatttgggagttgcaccaatttttgttgctgaattgagagaaagaaaccttggaaaatgtgttggaaagtctgtacaatggctgcgagataatatagaagtacaagaaaaatctattgatgataagatgttttctgatgcagaaagcagaagagatgaatggaatagattattaccattttttaatgagctaatgaccaataaatatgagaatgtaattatagtttctcatggagatttacttagtgtatttaatacaatgtggttaggtatggatattgaaatgcttaacaaaagtgaaatatttggattagctggtggagttagttttatgcaagaaaccgctgacgggaaacgattaattaagcgaattagcgatatgtcttatataaagtaatatggaagtttttctttaattataagaattttacgaagcttgaaagttcgacaaattcaaatttatcgagatgcctataaagagttttcagaaagaaagtttacgtattttataaattaagaatagtatcgaatgaatgaagaacggatgagtataaatatgaattagaaatgtgcgagcattattatatagatgaggatgaaggtcaggaagttagaagcttatgttttaaaactggtaagggatataacgcttcaaatggagttatagctgatttaaaaaatactatattaaaatataatttagaatagggaatgttaattattaaaaataattgacaagtaaatgcgttgtaactataatggttacaaggaggtaatatttatgatgcagattagcagtagatttactgtagcaattcatattcttgctgccttagaaattagcaatgatgtttgtacatctgaagtgattgcaggtagcatacagaataacccagttgttgtaaggcggattattggtatgctaaaaaaggctgaactggttgatgtcaatagtggaggtggcggtgcctatcttctaaagccagttgaagatattactctttttgatgtatataaagcagttgatgtagttgaagacgaaaagctctttcagatacatgaaaatactaatcaggaatgtattataggtgcaaatattcaagatgtattaatgttaatgttacccaaagctcaatcggcgatggaagaggtattaaaaagttatacaatggcagatattgttgcaggtatattggaaaaaaagttgaattgaaagattcaattttttttagaactgttgtaactggaattgttacagttacaatggcgattgtgttaatgtaagatattcaagcataaataaatgaaattcatgtgtagcaagcaagtagaaatttatcggattgctatatctaaaattatttagatagtaaatcagcatagtgaaataaaagaaaaaataaatgtaagaggaaggaaaactaacatgagaacattatttgataaaacagttattaataggatggaaattaaaaatcgctttattcgttcagcgacacaagaaattatggcagaagaggatggtcacttaaatgataggctgtatgaactgtatgaaaatcttgctaagggaggtgttggtttaattattacaagtggtgcttatattacagcagattctaaatccatgcctggacaaattggtttctacaacgataattttatagaggaataccaaaagcttacagatacaattcatggccatgaaagtaaagtattgcttcaggtgaactatgctactaaaaacggtcaaaatctaaaaacagatgatgtttctttggaagatatagaagcaatcatttctgcctttggagatgcagcagctagagctgagaaagctggtttcgacggagtagagattcacgctgcacatggattccttctgagccaatttttaagtagtagaacaaatatgagaaccgatcaatatggaggaactcttgaaaataatgcaaggataattattgaaatatataatgccataagaagtagaacaagtaaagatttcgttgtgtttttaaaagttaatagtttcgatgaaattgatagcgaaaaagcttttgagagttgccaatatatctgtagtcaactttctgattctggaatcgatgggatagaaataagtggtgagggtgaagcttcagattataaggaatctatatacagggattatgcagctaaaatttctgcattaaataataatatcccgataattttggtgtgcaaaaacagaacacctgacactatggcgcagatactaaattcaacaggggtagaatattttgctttatcaagaccattaattcgccaaccggatttagtaaatctttggatgaaggatttaaatgaagtaccaaaatgtatatcatgttcaaaatgtatgcaaccaaatggaacatcatgcatttttaacaaagattgatttataataaacatttgttaaagataaataaatgtttatgattcaattgttacaatatctgtatttgtaaatacattagagtaaataattaagtaaaactaaaatttaagaagagatgaaaaatggattttttagaattagcaaaaaaaagatactcagctcgtaagtatgacgggaaaaaagttgaagatgataagttgggaaaaatattggaagctgcaagagttgcaccttctggaagtaacaaacaacctgttaaattacttatattaaaagatgaagagggattagaaaaagtttcaaaggcggcacgaatctacggggcaccacttattatagttgcatgcggtgatcacaatattgctggagttataccttttaacaacaaaagtgtagttgatattgacacaagcattgcaactgatcatatgatgatggaagcaacctctcttggattagacagtgtttggatttgtagtttcgacccagaagttatcagacgtgaatttaatttgcctcataatattgaaccaattaatgttctggcaataggttatgcagttggagagccagcttctccaaatcgtcatgataaaacccgcaaatctttagatgatctgcttttgtaggagtaggatattctatagataatattaataagtataaacaatcaatagtacaaataaagtttaaaggcaataaacattaaaaattaatgaagtgccctccaaatgttagacatatgatacactcatatttaatattcggagagcacttcataattttaatttccctcccaatctttaaatagagaacccgaatctatgattcggtgtgaatcagttaagcaggcatccaaatctgtgatttgatgatgatcgattactctgtgagtatccagcgaacgaatgtgagtcgagtttccttataactatatttctccaaaatttaatattttctgaaagcttatcatatgagtcaaaaagaattatctacaataaaataattagtcaggctaaagagaagtaaaaataaatgagataagatatatatcaattaataaaatatgtaccactagtgaaatatatatagtaaaatgtaataaattatgtaaaataccataattagtgggggaaatatatctatgaacaataatgaattggcacattatgctgaaaaacttagggaaggggatattagtgcatttgaaattatttataatgaaactaataaacaagtatataacttactttacagttacaccaaaaatgaacatacaagttttgatttaatgcaggaaacatacttgactgtaaatagcaaaataggaactataaaagatccatatgctattaaaagttggataaataggatagcaattaataaagcgaacagatactttgaaaagaataagaaagaaattttattgtcagaagaaggaaaagacttgtttgaaactcaatttgaggaagatgaagaattcttaccgcaagaaattttagatagcaaagaaaagcaaaaaataataaaagatataattgataatttgcccatagaacaaaaaacagcagtgtatttatactattttgatgaattatcattatcagaagtagcagaagatatggaatgttcagaaggaacagttaaaagcagattaaattatgcacgaaagaagattaaagcagaagtagatacctgggagaaaaaagggactaaattatatggaacaggagtaccagtattattattacttctccaaaatcagctaggaattgaacaaatttctttagataaagctaatatactactgaaagatatagttaatggtataagtggaagttctgtaattggaactgtacatcaaatttctaatgcaagtttatcaagcaaaatcagtgggacagcaaaagtgactaaaaaagtttttggaattaaatcagctatagcaggggttagtgcaacagttgcaatagcaggtgtaatatatgcaaatacaaaacctgaaccaatagataaaagggaacatttttatattacatatagcgaattaaaaatggaggatggggttagttcagtagatattcttgatggtgacatagcaatagcaaataatcttcctgactatagctgtgtagaaataataagaacagattatgatgaaactgaaggcgaagatattaaagcaaatgttggaaatagacaagaagatattaaaataactgatgtgaatggaaaacaaggcaatataaaattagaaaagatggatgaatgtctttcaatacatactgaatctaaagaaggagataaatttattgcatcaaaagtttttacagacggaactattgctaaagttagcggatatgatgaaaatattgttggaattattaatgaaccagataaaaagcaaatagaaattaatccattgaaggaaggaaatacaacagtagagataatagataatagtggattaaaaggggaattaaatctagaaattacgaccataggcaataatggaaaactttatgtacaccgtcgtattaaaaaatgcaaataaaatattaaaataataaaaccaaatagtaagttcaagtatctaaataatgaaaacaaaaatataaaaacaattatcaagggggaaataatcaatgggaaaagtaaaattaacaaaaataatagcaagttcattaatagcagtttcagtattagcattaaatccaataggagcaagtgcagagtggaggaaagataatactggttggtggtattcagaaggagatgattcttgggctataggttggagaaatatagatggaaaatactataattttgattatagtggctatatgcaatctaatactatagttgatggtaacacattagatgctagtggagcagtaattaaaacaggtgtaggaacattatcaagggaagattttaattttgaaggaactgatacgactaattcattaaaaggatataaaaatataattgattggttttatgctaatgattacgtaaaaggctggggatgttatttaagtcaaaaagattctgagtatgggaaagataaaagtcaaacaagcaaaggaattaaaattggtagttcattaagtgaagtattggctgcttatggaaatacagaaattaaaaatgtaacaagcggtgatatgctttatatgtatggggattggaagtcaaatcctgagaaaaaatgtgtaacatattcatattatgaaggaataacaagatttaatattagattctattttgatgcttcagataaattagttgttatagcatatacagtaaatgaaagtacttttccacagggaattgatcaggctcagcaattaactaatcaatatagagctaaaataaaaactctatctaagtaaatttagatacactaattaatgtaagtatttttttggtaatttagtgatagcattttttatagagtttaaagctaagtaagatttactcaatactttttagcgttgagtaaattcgtaacagggggagaaataataatgattaaaaatgatttaataaaaacaatatctttaacaattatagcaatgtctttaacaatatctaattcgatttatgctaatgcagaagataacataaatgttgaacaaatgaaatctgaaatagcaaaaacaactgatataactacaaatgaacttaaatttcaaggggaaacaacagtaaaaaaagaattttattacgaagataattattatactagtgctaatcttgcagatgaaaaattatattattttagttatagtgaaacacctcatatttccttttattatggattaacttcaaaatatgtttatgaagaatctcgaggtactggaggcggagatttaactttatcaaaagatggaaatgtatatagttattttgaattttatggagatagctacaatacattacatggatggattggatggaatggctggtataaagcaagtgataataagtggaaatattttaaagatggagtacttcaaacaggttggatttatgataatggtaaatggtattattgctatagtaatggagaaatggcacatgatacaacaatagagggatatacattaggttctagtggtgcttggatttaataataagtataagaattaagagaataagttatgaaaaattaagattaactgagtgatataagaagtgagtaaatgtaaagtattgtatgagtaaaggggaaataattaatgaaaagattaaaattaacaaaaataatagcaggttcattaattgcgctttcagtattggcattaaatccaataggagcaagtgcgcagtggaaacaagattctaaaggctggtgggattcagaaggaagcagttggtctaagggctggaaggatataaacggtaaatggtattattttgattatgatactgggtatatgaagcatgatgaaattgtagaaggttattatgtggattctaatggagtttatgtaaataatccatctgaagaaataaaagaatatgcaaaaataattaaaagtgatgattggtacgatagaataactaacggcatgaaatggcagagagggtttactgcaaatagtatgatagaagtaaatgcaccactaaggggcatagttatggattttaataatgatggtactaaagaaatgatagtaacaaatgaatctcaaaattcaatttccgtagtaacttataacaaaggaaatattaatgtactaaagagtattgatgttacctatgctgaatactctggatatagtaaatctgaaaatgtattttttgtttatggctactttcagggaagtaatgagattaaaggatataaagtagacaataatgagttaaaagaagtgtatttttactacgattctaccaaagatcatactggtggcccacataaaggttattttataagtgaagaggattatacaaataacaaaagtgtttctaaagatgaatattataatgcacttgaaaaattatatgaaaagttagatagtgaaggtcaaaataaagtcggaccacttttagaagatttaggtaagtagtgatttaggacaatctataaagtttagagtattaaagaagtgataaaaaggggaataatttatatgaaaaaaatgattgcaagtgcattaatagtagcttcagtattagcattaaatccaataggtgcaagtgcgcagtggaaaagcgattctaaaggttggtggtatacagaaggtaattcatatgctaaaaattgttggagcttaatagatggaaaatggtattattttgattatgatggttatatgctgcatgacataattattgatggatactatttaaattcaaatggagcatatattaatgagccttcagaagaaataaagaaatatgagagcttattaagtgataaagattggattaaaaaaactacaaatacaacttcaatatataaccccataattttggatataaatcaagatggtacttcagagatgttatttaactcagagtgtggtttgggattagctggggaatcattatttgtagttacatatgataatggaaatgttaatgtagaacaaatagaaaattctcatggtgattattatggatatagtagttcagagaaagtattttttatttgtggtggaaatcaaggaaataattatgccagaggatataaattagaaaataataaatgcaaagaagtatattcatgttgggataatgcaggtagatttataaatggagatgcaacttattatgtaaatggacaggaagtttctaaagatgaatatgattcttcattaaaaaggtttggaaaaatagataaaggggaaggcgcagagggaatagtgacagccaatatggatgagtttgaataataattagctgcatcataaaggaaaaaggtgcaagctgcaacaaggcattagactattccttaatttgggtgccagattggcgcataaggcttcacttatattggataaatcacttaagtatagtgatattaaagaaataaatgatgaacttgaactcaatccaaaagaataatttaataggatataatcaaacaagtttaaagtcaataaacattcaaaatcaatgaagtgccccccaaatgttagaaatatgatatactcatatttaatatttggagggcacttcataatgtttattgcctttttttaagctacgttatgagaatcatcattaggactatcagtatcaatagctactccaagtttagctgatattatagtatttaacctattaattgatgaggataagttatcaatttgtctttctaagcgtattagcaaatatgctgctacagctatagcaaagccattgttaaccataagattaattaaatcagttacctgcatatatatccacctccttttaatggatatatgaatgtacataaacaattttaaaatagttaatgaaattattatatatacgttgcaaaaataattcttcatcataattctaaaaatattacaagctcaaaacatttagtcaatattcttatatggtaaagaatatatattctccaccatatttattcttcagaatactagaatatatattctgatattctaatattctgaagaatatgctggaataatgcgggtttgaaggctgttggcttaaaaaagttcgatttttatgtggtttaagataggaaaatacgtcttaaatattaggggagaaaaattttaatcgcggaataaaattatagagtgtgtttgttaaatgattaggagtgaaataagaattgaattaaaaaagagagaagacttttgtaaaaaatagatggatctgtaatatttattatagcctttggattgatagcaatggttattttttcaataaacgtaggttacgtattgtgattacattacatttgatggggagggcttgggataatgaaaacagttttgaaatttgattaacatgtatattattaaaacagtaaattataattgaggaaaatataggcaaaataataaaaaattgtagtataataatgatatgatattctagtactattctgcgaaaaacataggtacttttttttctctaagatagggtaattatatccatcaaatctagaaaaggcaacattggtagctttaagttttatgtcatataagcttagatcaagtaattaagaaaaatctatgaggtgatgttatgaatacaaagaattatgttttggatgcaattgaatatttagaaaaacacttgtttgagggagtttcattagaacaacttgcgaagcagtttaatttttctaaatttcactatgcgagattattcaaagcagtgttgggagagaatattggggattatcaaatgaagcgtaggcttacaattgcagcgatgagcttattagagacaagagatagtatattgaatatagctataatgtgtggatatagttctcaggaaagttttacccgtatgtttaaggcatattttggtattacaccaaaggattatcgtgacaataagattgaatatttaaatttatataaatattcaattacacaggaagacatcgagagggtgatgtcatatggaacagcaacagaatatcaaataatacataaaaattcttttgagataacaggattattgtatcatggggataataaaaaacatgatgttgcacgtatttttaatcaaactgctcaaaaagtgcaattggataaaatatataatcaaattgatggggtttacggattggatttttgtaaaaatgaagaagtgaggagttatgagttcgattttatcgctggaattgatagtcgatattttagtcagattgacaggaaagatgctgaattagtacataaatatataccggagaatgattatgcagtatattccttaacaaatataatcgaaaagatacagattcagatacagagaaactggtttagcttacttaatgatgaattgtatgtcccatgcgataattacgcatatgagttttatcccaatggttttgtacctaatcaaaaaaatattgatgcatatctttttattccgataacagcaagataggtcaaaaaatcttttacgcggattgttataataaagaaaagtaagaggaggtaataatatgactgaacttgaaaattttattctggaaggtagtatcaaaaaattactctttaagttttctattcctgctataagtgtatttttagctaatgtattatataacattattgatgcaatttttataggtaatcagcctaatggtagcttaggaattgcagctttaactatagtctttcctattcagcaaataatactggcgctttctcaaatgattggagttggaattgcttctataacttctagaagtcttggagcgggagataaactaagagcagaaaaggctgtgggtactgcattaacatcatctgttttattaggaattttaattatggttataggactggttttcataagacctatgttatatatctttggttccttggaaaatatactaccttatgctgtaacattctttagaattactttatattgcagtgtttttttcgtttttagtattgttgctaatagcatcatacaatcagaaggacatgctaatattgctatgataagtatgataatagggcctgtaattaatattccgttagattatatattggttacaagacttcaatatggtataaaaggagctgccattgctacagacatttcgcaaataatatgtttcatatttttactagtatacatctgttttaatagcaaaattttaggggtaaaagttaaaaatttaacaattaatataaaattattaaaggaagcgatttccttaggattatctatgtttatgactcaactagcttatggaattctagccatagtattaaataattcattaaaaatttatggaggatctgacttatatgtttctgcaattggtatatataatcgtgtattcgggtttattaccattactatgtatggaattagacaagctcttcagcctattataggatttaattatggtgctaaaaaattcgatagagtaaaacaaagcttaaagcttgcaattttagcatcagttataatttcattggtatttttagttataattattggttttacaaacaaaatagcgggtgcttttacatctgataatgaattaatagtattgacggttcctattttaagattactgatacttatgagtcctttagtaggtgttcaagtaattgcttcaagcttttttcagtatattggcaaacctaagcctgcattatttttatcaataatgaaaccagttttatttgtaataccattaatgttaatcatcccaatatttcttaaagtcactggtatttttgtatctgttccattagctgattttcttgctgcaacgatatctttaatttttatatatcgtgagataaaaaagatgaataaattaaacttaattgaaggagaaaataaaaattcacatttcaagctttgttgatattatggtattaagtgtattgttgaaggtggtaagccattaatttgttttctattgagtaccgccttcatttacaatgtgattatggtaataatctatagaaatatcaactatggtgctgacacatatgctaatgtctggatgaatactttttaatttcatttacagctttagcaattagaaattctacttttcaggatgacttaaaatgttctttgttagagaatgggatactagataaatgtcagggatgtagccttagatatatttgtgatggaattgatgaagtggttgaaagctatgtggaggaaactactgaggttataaataattttagttttgaataaagtgtatatttaatctttaaaattatgggaatataatataaatcacattgtaataataacagctccaaggataaaaaaattaaccttggagctgttagacgtttagctttaataataaaatgaaatattattgtgaatttttcttagaatgtttttctttcttacaatagcagtagaatagcacatattttttatatgggcataatccagaactgtataatttttaaagaatacaaaatctataagttctttctcatctttagttagattttttagagctagtcttaattcttcataatcacacatctcacataatgaagtttcaggagaaatttcttgcgatgggatgtccttttcaaaattatcatgtaagcttagagcattattaccttcagtagagcttctggttttaattctcttaatcaaatcatttatattattttttatggcattggtagcataagcaacgaatctatgcttatctaagttatacatagagatagatttaaaaagcgattgataacattcctgaacaatatcatatgagttatacccatcaataaaagttctctttgagatattataaattaatggtctaaattcttcagctaatttttcttttgctccttcatcattatctttgcacctagtaactaaagtttcgatataattaaaatccatataaacctccttcatacataagatctataaaatcaatgaattattttacatatattgtgtttaatgttaaattaatctctacatatagtatatatggttaaattatctagaacctatatggaaattgaaaattatttaaaagaccagcagaagatccgctatattttggaggaaataatgtaccatggataacagtagcggaggtaactaaagatgaagataagtttcttgatgacgtctctacgtatttaactgaataaggaaaatatattaggaaataaagaataaaaaatcgctttagtgtttttattagtctcgtgattacttcttttaataatatataaaattggatataataaaaatagtatatagcaagaggaaattggtgaggagaaaaggggtaataaaatgagaaaaaatatacagattggagcatctgattttaaagaattaatagaaggaaataatttttttgtagataagagtttattaataaaagaatttatagaaaatggagcaaaaattatcttaacaccaagaccaagaaggtttggaaaaaccttgaatttaagtatgttaagatatttttttgatataagaaccaaagatgataccaaagatttatttaaaaacttaaaaatagaaaatgaaaaagagataatgaagcttcaagggcagtatccagttatttttattacttttaaaaatcaaaaacatatttcatttgaagactttcaagatggaattaaggtgctattatctaacttatataaagaacatgagtatttgttatatagtaataagttatcagaatttgataaaaatgattttaaagaaataatttcaagaaaagcttcaataggtgttttatatgagggcataagcaatcttatgggatatatgaataagcattatggcaaaaaggtaatgctatttatagatgaatatgatgtgccaattcaagaaggatatttgcgtggttactacgataatatgattgtatcaataagaaatttattaacttcagcacttaaagataatccatatgttgaaaaatcactaataacaggaatccttagagttgcaaaagaaagtattttttcaggacttaataatttagaggtaaatactattttaagatataattttaatgataaatttggttttacagaaaatgaagtttttgatttagctaattattatgaggcagtggaaaagattgaaagtattaagaaatggtataatggatatgtttttgctggagaagtagtttataatccatggtcagtattgaattatttaaaaaatattaaagaaggctttatgccgtattggattaatagtagcaacaatgatttgattaaaaaattattaattaaaggcgataaaaacatgaaacttgaactagaagatcttattgaaggaaaatctataaataaggtgattgatgacagtatagtaatgtcagaagttgaagattctaatgataatatttggagttttttgcttttaagcgggtatttaaaagctgtaaagacagaaaatataagaggtagattaaaatgtgaacttaaaattcctaatgaagaagttcatatattttatgaaaatttaattaaaaagtggtttaatgaaactatgactaatgaaaaatatgaactgatgttaaatatgcttataaatggtgaaatagaaatattttcgggaatatttaagcagtttgtaataaataatttaagttactttgatgtatcaggaactgaaccagaacgggtttatcatgcttttgtacttggaatgctgatatcactttcggataaatatgaagttaaatctaataaagaaagtggatatggacgatacgatgttatgctaattccaaaggacatttctaaaataggaattgtcattgaatttaagaaaatagatgattttttaaagacaacaatagaagatggaagcaaggcagccttaaagcaaatagaagacatgaaatattcacaggagcttgaaagccgtggagtaaaaaatataataaagcttgcaattgtattcaaaggaaaagaaattgagattactcaggcacctgaaaatggaaatcctagattaatatagaagcaatgagaacagatgagatgaatttaataaaatcttatctgttttttgtcttaagaataataaatacaagtaaattatgtaaaagataagctgtataattttagtataaagtgagattttaggtgtacaaaattatggaggagggaaaaataaatgttacccaaagaaaagaatttagaagaatccattgaagattatttagtatcaataggatatgaatacaaaatctataagttctttctcatctttagttaaattttttagagctagtcttaattcttcataatcacacatctcacataatgaagtttcaggagagatttcttgtgatgggatgtccttttcaaaattatcatgtaaacttagagctttattatcttcagtagagcttctggttttaattctcttaattaaatcatttatattatttttaatggcattggtagcataagcaacaaatctatgcttgtctaagttatacatagatatagatttaaaaagtgattgatagcactcctgaataatatcatatgagttatatccatcaatgaaagttctctttgagatattataaattaatggtctaaattcttcagctaatttttcttttgctccttcatcattatctttgcacctagtaactaaagtttcgatataattaaaatccatataaacctccttcatacataagatctataaatctaatgaattattttacatatattgtgtttaatgttaaattaatctctacatatagtatatatggtcaaaagctataaaagcaatttggagaagaaaaattattataaaggaagagctaaaaattgataatggtaatgggtatagctgtgatgagttctattaaagaacaaatcaagctaatgaaatgacaaaacaaaagatataaagctttatgtggaaagtcatattaacatagggggagatgtgacctagaagcgataggattttagaaattagaagtagttaatcaatatggtgcgaaagtatgtgatgaattatcaagtggtttgaatttacctaacaggagggacaagaagtcttagtgttcttagtaagaatatagtgcaagcaatattgctggagttaagagtgtagcagaaaaaatatctaaatagattaaatataaagaagtactctgattaaaatatttattctaatttggtttagtagctaatataactaatagtgttagtaattcattaaggtgttagaatgactttaaaatcattatataccttttttaaagcatactttaattatgttacatctggaaatcgtgcttatgcaagagcaatttcagaagctatggcagttattagagatacattagcacagaaaactttgaatccaatacaaatatatttgcacaagccattttcttttaaacttgctaaagatatgcttcaaaaagcagtttcacttgcaatgtcacaataccaagacccttttaatgaaatccaatattttaagattacagtaactatagataaaagttttattactactaatcataagggaataaatataccaatagaaggcggatgggataataaaaataataagcttattattattacatttagtcaaccaagtaacatgatagaggaagttagagtaatcaaaggattgattaaagaatttacgatagtaggtactttaccagcaaatattaaaacagtagcttattgggatctaagtaagggaaagataacagagatagactatcaacctttgcagccagttgacaaacagagtttgattaatgcggctaataggatttgatataataattaagttactatagctgcatctttatttcaaataaagatgcatcttttgcactctaatttcaagagtaataataagaaagaaaatataagtatctagtttggtgaattatttttttattggagtaaatttgaatatatcaatattaatggtaattattgatacaaatataggtaatataatcaaatattgtagtataataaggatagattatctgcttgaaaaagatagtctatccttattatggtttatgaagaaaatgtagaaggaacgattataagacgtacaattatgtctataatgggtagtttgcatagcaaataattttgttaagatttacttattagttttaagcaatattatattactgtataaaatggtaaaataatgtgataacttattaaaaattaggaggtatatataatgtttaaacgtttgataataaaagaatggaggcaattttctgatatagatattacctttcatccacatctaactgttcttacaggtgcaaatggagcaggaaagacaactatattaaacttgttggctgatcattttggttggggctctcagtttgtaagttcatatacaaaggatgaagagactggaactttgaaatatagcaatagtatacatagattaggggaaagaataaagaaattttttataaaaaagtcggttgagccagagtctattgaaaagtatcaaataggagagattcaatataaaaatgatgcaatcgctagtttgattttgccagattcagtaaatcaaacatattcagtaagttttaggaatagacaaagcatccagggactttacattaattctcatcgtcctacttttccatatcgtgcggtgaaatcaattcctacacaagttatgaatcgtggggaaatttataaaaaatactttgaatttacaaaaacatttgtatttgatacgttcagaaattccaacgaagtatcatctacagggttgattaaagagacaattgcatcacttgcaatgttcggatatggtaaccgagctgtatcttcaaatttagaagcaaaaaagttatttgaggattatgaagagattttaagaatagttttgccacctaagttaggatttaaaaaaatacaagtagaaattccggaggttattttgtgcactcaatccggtaattttccgatagatgcggtttcaggaggcatttcttcaattattgatattacatggcagctttttatgtatgctgcccctacacaagaatttgtggctgtaatagatgaaccagaaaatcatcttcatcctgaactacaaaaatcttttttacataatttgattaaagcatttccaaatgttcagtttattgtggcaactcataatccgtttatgattagtgcagaaaaggattcaaatgtttatgttttagactataacgagaaaaataaggtttgttctatgatgttggattatataaatcgtgcgggtacatctaacgctattctaagagatgtattaggtattggttcatcaatgccgttctgggccgaagatatgctaacagaaattgttgaaaaatatagtacttttgaattgacaaaagaaaatttagataatcttagaaatgaattgaataaaatcggattggatggatatatccctgaaactatagctaaagttgcggagggaaaaaagaatgattaaattatcaaaacttcctaaaccgaaaatattagttgaccatgccaagcaatggacaaaagaatactgtgattgtttatctagaggaataaagcctagccctgaaattgcaagcagatacaataacccaataataaaatctactttagaaagagaaactaatgggaagtgtgcatactgcgaaagtaagattaagcataattcttatggagacattgaacatattcttcctaaaaatgttgaagccagaccagatctttatgttgagtggacaaacctcacgcttgcgtgtgagcaatgtaatagaactggaaaacgtacatattacaatccggctaaacctttaattaatccctatgaagacgatccagatgaacattttcaagtgttgggtcctatgatttgctataaacctggagatgagagggcatttattacagaaaataaattaaatttgaatcgttctgaactgattacgcgtcgtagcgaacgtattagttcggttgaaaaacttttgtttagttgggagcaagctacagaagatacaataagagatattatatctgatcaattgttacaagaatgtatgccagataaggaatttagttttgttataaaatactttcttattgctcgaggatttccaatagattcggcatcataaagtatcgcactgataagcaattagtattgctaaatagttaaattcatattatccatatgctgattaggataataatgtataatttagtttagagagtgttctgataactagaagttatcattgtaaaaattaattatttatttggagaagaggcatgattaaaaaagtaaaggaaaatttagaaaacaattatttgttattgataactattgtatttttagttccaggaatagcaatttatttattgaatttgttattaaagctaggttgcaatataggatcttggatataccaatatgtagatttgtcgttagtcattattgatactacagcaagtattaaaacaggtgattatatatcctattactttacaattatggcgatagaagttacagctatactatcttgggctctgttgcaggctagcaaggaaagtaataggttatctgaagcaataaaagctaaagaagataatagggataatgaaaaagtaaaagagagtgcaatgattatatactatgatttgctattaaagattggaattcttagaaatctgtatgtaacattaattctaagtaaagaaataaaaaaaataaatactattgaaattaataatgattggataaaaaatctctctgaattaagaaatgttttatcaaaaagagagatagatgtactttttgagctttatgggaattttgcattattgcagaaagcgcaagtttgttcagatgttgaaactgttaaagatataactaaaagcatatcaggaaaattatttattgatgttttacttaaatatatgtggatggattttgaaggaaagattgagagtcttttgcataataaatattatataatttttaggaaaattgaagggaaaattaatgaggaagaaaaatattattcagatgaattaaatcagctaaaaatgaagcaagtcaatggtaagtataagatacatggtgaatatattaatggtgttttaaaaaatggaaaagacacttactatgatgaaaatgggaatctaatatactctcttatttataaagattataaagtaattaaaggaaattattcaaattatatagatgataggtttgaaaatatctttgatatcgaatttgatgaaaatggaatggaagatactggccgtataataatattctatgattctaatatggttaaatatgatggaaatattaaagttagaaaatatgaaggatatggaattttgtatcaagacaatgagtatttatcagtaatatttgatggtatttgggaacaaggtaaaaagaaggaaggggtatttagggacaatagtaaaaatgcttcaattgaatattttaatggaacttattataatgataaaccatatacaggtgaaattaagttaggtaatctaaaatcatttaatgatgtatatgagtataaaggaaccataaaagaaggaaagatggagaatggaattggatatacaaagaatgtttctttgattgattggagttatatagaaaggcataatgataatattcaatgtcaacgatatcttatgagtagagaagaaaacgaatgtgcttatgaatatgaacaggatgatattcctgatgaagtgaaacaggagatggcagaagaaagtgaaaggtatgaagttcaaagaactaaagaaaatttacaggatgaataccttgaggttgtggagcttatcgaaacaaagtggactagaggaaaccctgaaaggttcgaagatgatgatttaaataaaaaatatttggggtatggaactaaagaaaaaataagaaaaattcataaattatgaaattaaattaaacttaacaagtatgcttttggtcatcctagtaattagatagtgaaaattttaattagtatgtatataaataaggtttatacgattaagtaacgaataatatattttgggggattataattatgacaagaatattacacacaataaattatgatgaaaataaatatgatgacgcttatgatatatttattgcatatgatgaaaataatgaacttccatttagaaagtataaatcaggaggacttggtagaataaatgcaaaaaagggggataccgtatatctgtatattggtgaaccaattagaaaaataatgtataaatgtataattactgatgataataaggataagaatgaaacaataaatgacgaagaatattttaaatcgaaaaatcataagcaaaataaaaatgatactagcaaaacatgttatattctgaaaaagttacaattcattgatacagagaatttaaattttactcatattaaaaagagtataggtgataagggagagaatttaacaagttttaggaatgattatacagacaagcatgaacaacatttgaaggaaatgtttaattatatagaaaatatatttaaagatgattgcaatactaatttgcaatctataaattatgctgatctacagattattaatgatgaatttaatagtatagatgatgaatttgataataaaaaaaataactcccatgatatactacaaaagtataaggacagattagtaaaacaaagaataggacaaggaaaatggagagattatcttatcaaaaataatggttgtaaatgtgcattgtgtgatataagtatgaaagaactattaattgcaagtcatataaaagaatatagtaaatgcgaaaaaaatactacagaacatttagatttaaaaaatggattgttgttatgtgcaaatcatgataagttatttgataaacacctgatttcatttaatatggatggaacgattaagatatctgataaagtacttaaatcacaatatgagatacttagaatagataattgtgataatatatctattgaatcgtttgatgagaaatatatgtcatatcatagaaatattcttaatgaaaataatattggataattattctttagtgatattaattagaaaagtatatttaaagaaaacttcccattattcatatataatagaaaccaaaaaatataatactagcagataaatacaagatttaaataattaaattttaataaaaaattatgatgtagaaatggtgtgaaataataaaaacatcaacgttttacacattctaaaccttgatgttttcttacaggatgatccatagaagaatcgaacgtctggttttagtaaaagcagctagatgagtagaccaaggtatttgtggaatcccgactagaaaaagtaaattggaaagttgactgatgcgctaaaaatgtcagttattcaaaaggcaattgatgattttggagataattgggtgtctgtctttagcaaaacatatatcccaaatttacaaaagcatattaacataataaaaccataaatttatctaatttaaataaaggtaataaacatctaattttaatgtttattaccttttttaggtgttatctaaattattttctcctagtacattaagatataattattaataactttggtatataattataaaggaatttagacatatgagaaaacaattaactatgttgcaaaatatagataaacaaactataagctatacttaatctttgaaatatatctcaactagaaatgagtgatatacttttgtaaccacaagggtcataatatggaatgtttcattggtaattttgatggatgttattgcttgactataagttgttccaaatgtgctagttcaaaaagtgatgctccaaattttacatttggtaagcagaactttctctgtgagcgcttgttctttgaggctagcatcttgggtgcaacttctgatcttagaatcatccatcataattccttagaaactggaacaacagcataatccttatttcggcgagttatacgcacaagtatagattagagttggagttttgtttttgattgtaacttaagagaataggagcaatatttaatgaatataagtgatttaattatatataataaaacaatgcctaaaagagaagcagcttatgttgattacccaagtaatttatcagaggaattatgtgagtatttgtctcaaaatgggattgataagctgtatagtcatcaagcagaaatgtttgaaaaggcaatggataggaacaatattgtaataacaacttctacagcaagtggaaaaactcttagctttttgctgcctgttattcaagaaattctatcaaatcctttggctagagcaatttttatatatcctacaaaggcccttgcaagtgatcagtatcgtgcaattttgccttacttagaatactttggggctaacaggatttcagcaggagtttatgatggggatacgcctgtaaatgaacgaagcaggattagaaaaaatgccaatattattttaactaatcctgaaatgataaatgctgcgtttttaccgaatcacagtaagtttggttttgattttatcttttctaatttaaaatatatcgtaattgatgaacttcatacctatagaggtgcttttggttcacatcttgcaaatgtatttagaaggcttggcagggtgtgcagatattataattcctcgcctcagtatttatgcagttcagcaactatagcaaatccagttgaacttgcagaagagatctgtggacataaatttcttgaggtttgcatagatggttcaccagctccaaagaaaaattataagcttgtgcaaccgccaaagattatgggccatgataaaaaatattatgggcaggtgcaatcaacttcagttgctgctgatttaatacctgatttagtggaaaatgataatagctttattgcttttgccaaatcaaggagaaatgttgaggttgtattaaaggaagcaagagataaattagagacggaaaacttttttggagctactttaaaagacaagatatctggatataggggaggatatactccacttgagcgtaaagaaattgaaaataaaatgattactggagttttgcgaggtttagtatcaacaaatgctttagagattggaatagatattggtaaaattgatacaacagtaattgtaggatacccaggaactagagcgtctttttggcagcagagtggaagagcaggtagaaacggaaaagaaagtaccaattatttaatccttgataatctgccttttgatcagtacatagcaattaatccagactggctttttgaaagtggaagtgaaaatgcagttatagacaagaataaccttttaatagaacttgcacatatacgtgcagcagcagctgaaataccattaactttagatgatatttcaattttcccagatttaggtgaaacaattcctgttttaatcagagcaagtgaattaactaatcaaagtggaaagtttgcatggtgtggtaattcatttccagcaggagattttagcttaagaaatattgataaagcaaggtacaaacttataaataaagataacaataaagaaattacagaaatggatgaaatgcaggcttttcgtgaaattcataatggagcaatttatatgcatgatggagttcaatatcaggtcgtaaagcttgacttagaaagtagaactgcttttgctattccctttaatggaaattattatacaatgccaggaggcacaacaaatataaggataattcaaggcagcaaagatatggaatatgaacgtactaaagtgacttttggagatgtaaatgttgatgaaatagtttatatgtataaaaagctgcaatttcacaatcatcaaaatttaggttttgaacagttagaaaaaccattatcaaaggattatgatacagaaagcacttggataaagattcctgacaatgttgttacggtatatagaaggctccttcaggaaagtcaaaatggaaactttataagaaataatcattttgaaggtgtatgttacgcaattaaaaatgcagcaatgatggcaaccatgacagaacaggaagacataggtgttgtaatgtctaacaatgcaatagaaataagtcaaaattatgatagcgaagtttatatgtttatttatgataaatacgtaggtggacttggttattctgagaaagtatttgacttaactgcaaagattattgaaaatgcaatcaagatggtaggcggatgtacatgtgataatggctgcgctgcatgtattggagattatcaattaaataaagctatggttctatgggggcttaagaatttattagaggagatagaggcaccaaaggatattaagttagcacaatatgctccagcaacctttattaagaaagcatttaagtttaatgaattacaggaaaaatggaaagaattctgtgagtatatgcaggagaatggagatgcatttgcaaaatttttaagtacaatccctaaggtggaaatagataatcgtactttaattttagttttaaataatgcattttatagagaatgggtaatggaagaaagtaataaaaagagcatattaaatattatttctttccatacagatgctccaatgggaattgaattaagtgtcagacttgaagagatagatgaagatagaaagaatgtaaaaagtaaattacaaagaagatatgaagatcttacagaataggagaataacatgcattatgaaaaagagctagaaagactaaatgaatatcaaagagaagcagtacttgatgaaagtgatgcatgtgttgtaaatgcaaatgttggaagtggaaaaacaacagttttgatttcaaaaatcgtgtatcttcattatgcaaaaaatattagttataaagatatgattgtattaacttttactaataaagctgcaaatgaaattaaagaaagattaatggcttctgatgagagtataaaatcagatgaattagagggctttggaacctttcatagtgtggcccttcatttacttaaagaagtattgccaattgaaaaaataagatatgaaaaagattttttagtaatagagccagatgaggaattagatattgccttgcagataatccaagaagaaaagctcaaaattaaatataagaaccgtttaaaaaagagacttgagcaagctatggttattgaaaaggaagaagaaaagatttcgccttatgatgatgatatttttaagcttgtagagctgctaaaggaagagaagataaaacaaaataagatgtctttttcagatatattgcaaaatgcaaatttattattaggtgagcataaaatagaacctaagtggattattattgatgaggttcaagacagcgataaaatacagcttgattttattgataagttaaaaggtgaaaatactaaattatttgcagttggtgatccaaatcaggttatttacagctggcgtggaagttctttaaacgtggtttacacattaaagcataagtataatgcaaaggagctttctcttccaataaattaccgttcaagtaatgctattttagaagcagcaagatgctttcagcaaaatggaagtcgcttaatgggcgctagagaaactgaaaataaaattatagttaaaaatcattataatccttttaatgaagcgtgttatttggcagataagatcaaggaaatacataaatcaggtgtgccttataaggagattgcaattttttatagactgcaaaaccagtctcaggtctttgaagatgtgtttttaaaaaatgatattccttttgaagtatctatgaagaaaaccataagtgacagtccagtgttaaattggatgattaaactatttcgtttttgcgtaaatcctaatgatttttcctctgcaatttatgttcttagcaataaagaatatggagagaaaatgacagaaaagactgcaagaaagatagttaaagagcagaacataattaaatcagaactactagaaaagatgcatgaatttttaaataaatgttctgaaattaagatggcagaagagatttataattattttgaatttgataagtatataaagccaacttcagctacatatatagatgataaagaagctataaatgcgttgcttgatataatcatagaatatgtgaaagaaaaacaaatgatatttttagatggacttagagagtttataaattcatcagctttatatggagtaaatattttaaagaaggatataaatagcgatatagattctgttaagcttatgaccttacatgcctctaaaggtttagagttttcttatgtgtttattacaggagttaattatgggttaattccacttcatacaagagatatggaggaagaagaggaacaaagattattttttgttggaatcactagagcaaaagattatctagaactttcttattatacaaatccagattatcaaaaagcagcccctggagaaagtagatatattcatatgattccagagaaattaatccaaaatgataaggttaaaaataataatgtaaatcttcaagaacttaaaaaacaaattcaagaggcaaagactaagggaaagaaagaggaaatttcagttactgaagcagtagaattaccagtagttgaagaaataaatgaaacatcaattaaaaaggtaagccacaagaagtacggaacaggaaaagtcctaaaagaagatgatatgatgattgaagtagaatttgagaattatggagtgaaagaatttataaaagcctttagcgaactagaatttttgtagatatttttcttatataggtaatgtgcaaaagataattagtaaataaaaacaacattttaaagataataaactaattaatgaagtaatttgaacaaatgaagatataggaggaacaaaaatgattatatatatatttagttttataattttattatgcgttggtgttacagcgtttataaaattgaacccagctttcggtggaaagcctacaaaagaacaaatagaattttataagaatttcgataattatgttaatggaaaatttgttaatgaaactccaacgggtttgggcatgagtgcttcagatattttatcaatgcttaaagattcgattacaggcgctgaaaatcgaaagcctcatggtgaaattcctgtggaatcaattgattgggaaaagatcaaaagtgaaaaagatagtttgacttggcttggtcactcatcctttttacttagcatcgataataaaaaactgctgctagacccaattttaagtaccattgcatcaccagtttcatttgcgggaagtaaaaaatataaatatagtgaaaatattttggatattattgataaaattccacctattgatgcaatctttatatcacatgaccattatgatcatttagattataaatcgattgtaaaactaagcagtaaagtatcacatttcttcgttcctctaggggtaagttctcatttaatgcgatggggtatttctaaggaaaaaattacagagcttaattggtgggatgaaatgaattatcaaggtttaacaattgcattaacaccatcaagacatttttcaaaaagaggaatatttggctcagatgcaactctatggggaggatatgcaattatcggaaaaaacataaatttatattatagtggtgatggaggatatgattcacattttaagaaaataggagaaaaatatggtccctttgatattactttgattgagggagcccaatatgacagacgttggttttgggcgcatatgaaaccagaagaagccgttcatgctcacttagatgtaaagggtaggaatatgatgttaatgcattggagtgcatttaccttagcctatcatggttggaaagaaccaatagaacgagccttaaaggaggccaaaaagtcagagattagtttaatagcccctaaaatcggcaaaacagtgctattagattcaaatataaatgttccgttttcttcatggtgggatttttaactaagaagatgatatgatgattgaagttgaattggaaagttttatttatcagaaatgatagtaagttagttcaaaaatggtgagtgttattcagtattaagtagaactattactaataaaattcagtaaatatttaaaaaaattttcttaaattaataacaaattatgtgaattagcatactataatattataaatcagttggttaagaatttataataaataacaaaggagaaaagaaaatgggatacaaagattatgaaaagtatttagaatcttacgaagaagaggaagttgattctgctaaaaaatgtggttgtgaagatgaagaaaaaaataaaaaagattgctataaaagaaattaccctacaggagctgcattagaagaagcttatcgtgcaggtcgtaaagatggatataaagagggatactgtgaaggatatgacaaaggatcaaaggatggatgtaagcaaataaaagaaaaaattgctggatgtatagataaaattgaatgttgttaattaataaattagtgatttatagataattcaaataaatgaagattatataaaaatagaatatctcttggaaaataatattaaaagcagtggtaggagcaatccggctactgctttttgttgttttagtttatctaatattagagaaactaattataaaagtaatgatagacataggacttatttcgattattaaatttaatgagacacggaaaaaatagctaatatactaactagtatattataataattagtatattatgattttaaagaaaatgttcatattaaagaagaatgattatatatgaataaataaagcacttttaaatagaataaataagttaaatggttgaataacactaaacagcataagcactcttttatcgataacttaaattaacctatagataaagatgggttaaaaaatactaatagagaaggtagaatagaaattatgaagaattcttaagcattaaaaattatgttgtgaggtagattatcagtatgataatataatccgtctttatacaaattctgtgccctttatttttttatatactcctcataaggaaaaggaactatgatttctccatcaacaacattatagttagtattttctatagggcttaaattgttaaccaaattcattccaacattatagaatacttctgctaaaactttagggtcttgaataacagtaccagccataaagcccttatcaattaaagattttgcttctggaagtccatcaattccaacgatagctatatttttggatttttcgcccttattatagccatatttttgaagtgcctcaactgcccctattgccatagcatcattatttgaaattattgcctcaatcctaccatcatatctaagaaataaggattcgatagaatctttagataagctcttaagccaattagcatttaccaatgctaattgttctgtgtttatccctgaattactaattgttgaaatagcatattttgttctgtcgattgtgactggatctttagcttgaccatgcaatagaacatattgtaaagtgttatcattatttttatctagtgaacttttattagaattccatagattaacgagaattttgccttgaacagtcccagctaaatcagaatttgccagtataaaagcagctttatcataatatttagaaactttagacactactttcggatctatatctaaaaaaactattggaagattttttgatctaacattaaaaataatatcttcaacgaagttttcacttgtatcagctaagtttgccaaaattaaatcgaaattatctttagaaatggaattaaattatatctttcatttcaaaggcatctttcatatttagtatggcattaaaaataaataacattccttaagaaaactaataaacaagataattaaatttataaattaggagtcattatagctgttgattttttatactaattgcgatcatttcatttcgacaatttgcattatacaatgatatattttatggctaaaaacataggaatttaaagaaaatagataattatatgggaaaagtaaagggaaaattttctttacaaaagaacgcagtttcaatataatatattaaagagaacgtatgtttgtacaactagtagattttatttaagaaatggaaaaaatatttgagcttaagtatgatatagaagggtgtaagtggatactatttaaaatataatgaagttcattttttgctaataaatattgtgataaaaggaatgataattatggtaataaaagacaaagaattagatataaatttaataaattcagtagagaaatacttaaaattaaattatagtgagctatatgataagaatgacttaggcgcagtatttgatgaagctaagaaagatgatgaacttaagttaaaaatatttaattcaataagaagatttataatgaattaactttttgatagttcctagatatcagataaaatgaatgtggaggaatagaaaatgaagaatacagtatatctttatgtatttgatacaatggcagactgggaaataggttatttaatcgctgaaatcaattcgggaaggtactacaaaaagggattaatgccgctaaaagtagtgactgtaggaattaccaaggcccctattactacaatgggaggccttacaatattgccagaaattgaacttgaggagtgtaatactcatgatactgctgctttgattctacctggtgggaatacatggacagaagcaattcatgctccaattatacgaatggctgaaaaatatttagagaaaggcattgttgtaggggcaatttgtggtgctacaataggacttgctatgtggggagtactagatacactaggtcatacaagcaatgacctagggtatcttaaaatggtctgtccaaactatgatggagaaatgtactataagcaggaatgtgtagtaactgatggaagtttgattactgcttctggaatagctcctcttgaatttgctttgcatatattgaaaattctagatgtattctctccgcaaaccctagattcttggtacaatctttataaaacccaagagtcaaaatatttctttgagcttatgaactcaattcaataaaaggttgcttaaagtgggtaagatagctacttttcactgcaacaattgggaatatggagttaagaaaaagtacttattgtcataaaataagtactttttttaagtgaaaattatccattaatttattaattcatttgatatttcaggactgttttttactttttattcattagaattaatccaactatacttaagcatattcctagagcattcataggggatagtttggttttataaacgaaaataccaactacaattaatattattgttgaaattatacttacaaaaagaggagcaacggctatattccatccacttctatagatatataaatatcctatttccaggcctaatgcagatatccctaatacataacttgcccaatttaattgttttagagagcttataatattgcggtctatgggcaaaatgattaatgctaatatagagaatattattgcggtaacatatgtgactatcattgatataaatggatttgttgattgattgatagatttttgactgatattatatattacagttgctaaaactgtgattatcatagatatatagtacatataataatacatcctttcttatatgttttgaaatagtaatcattagaataaaagcttctaaatcttttattctaatgattatagatattgcaattacttcataatggtgttttttatttgtaagattactaatttttcatctccattatttgtgaaaccatggctttcttcatgtggagataacattacatcattctctttaattgaaaaatcctcgccatttatagttattattcctttgccgctaattacatagaatatttcatctaaatctgaatgtttgtgaggagtcattgtttcaccaggttcgtagaataaaatacctgagtccattgtgccctctgtaaacagtgctttccttttgattttttctgtaatatcgttaatgttcaaaattttcatagttatacgtctccttaatttataatatttatttaagctaattattaaaattctattttatggtaaagacacatttgattttttcataatagatttcctcccatgctttgttgacttatggtattataatataatcactattaactttttacaagaaggcactattttgtatggtacgaactaaatagtaagtatcaatttatatatgataggagtgaatgctgatgacatgtggtaagttatgtccaattgaagagactgttaaacttattggacacaagtggaaagttcttattttaagaaatttacatgatgatggaacgcaaagatttaaccaacttgagaatggaattaatgggataagtcaaaaaatgttaacacagcagcttcgacaaatggaagctgatggattaattattagaaaggtatatcctgaagtgccacctagggttgaatactcactttcagagctagggaagagcttaaagccagttttggattctatgaacatctggggagaaaattatataaatactaataaacacctttatgaagattaaattagagtatatacatttttgcaagataagatggaaggacaattctacaaacttaccatataacaatgatatggtaagttttgctttatatatataatatgggtatattagcaggtgatccttttattcagaaattgaatttgcgatttttttaatgagctatgacaagatattacacagtatgtagatttgacatggtatattgaaaagcgctttttaaaaatagaataaatatgatagaaactacttattatcctatttgcataattatataattattccaattttttatttttaatggtaaaatatatacattaataagaaaaaaaggggatttttaatgaaaaataaaatgcttataaagactttatcattgtttttaacaacaacaatattacaactatcgggtatttcagctaaattatttaatggtagtggtattgtggaagtaaatgcagctacaaaaagctatgctgaaaaagaaaaacacattatgtcatcagtagagattcaagggaatctgattgaaggacagacgttaacagctatagttagggatgcaagtggacgagacataactaaatattgtgttattggttgggagtgtcttgaatatccaacaagtgcttcacaatcaatttatggtggtcctagttctaaagataaaaacaagcaaaatcagtatactctagaaaaagaggatgtaggaaaatatattaaagtaatagcggaaggagactatgtagatccaaatgctcctgctggtgatttccgggttgcaactaaagaatcttcaattactacaaaagttgaaactaatccttcaatacattggcaaaaagaaattgacgcttccgaggattttacagctacggattggtattatttaaatgatgatggttcaaaaatttcaggttggaaacaaataggcggagattggtattatttttcacctaaaaatatgaaaatgcaaaaaggctggaaatatataaatgggaaatggtattatttaaataaacttgatcatggtgaaggtaaaatgttaaccgattgttggattgaagatgtaacaacccataagggacaaaaaaacacatttaaattttattacatttctagtgatggcacaatggctactaatacaacaattaatggacattatttagatgctagtggtgctaccacagataagattgataaattattggttcaaaattattaaatatagtattattttaaattagttctatttttaaaaatcgtattattcaagaaattgaatttgcgatttttttactgcataattctagtatagaacgtatgaagaggagtatattaagatgattagaagggaatgtataccaatataatggagttgcaaaaacaatcacatctgctttttctattttaggagcgagagcgttaaagtcatcatcaaatgagcaaggagttcctttactgaagcaagtgtcacaggcaatacatccttttatatttttctttccaacttcatatttgactacttcatgatctgattgtattgctcctttaataaatgcttcagataatagataactattaccaccaactcttccactacaaattaacattaaatagcataaacttttttttataaagacataataaaattatacaacagatgggaagaaggatttaaatggaagcatttaagagaatattaagtatagccttacttgcaattatattggttataatgcttggaaataattcatatatgactacgaatgccagcacaaactatcgtcaaggctctactgttagagtgggcttatttacaagagaccttaatgatgattacatgatactccttcgcaaaaattttgaagatattcaaaagaataatcctggagaagttgaattctctttttataatgctaattataatcaatcaacacaaaatacagatattgaaaatgcacttcataacggcattgatcttatattactagatatggttaatctacttgaaatacgagatatgattaacaaaatctctaaatataacatcccaatagtattctttaatagagtaccattttcaatggaagcaattaaatcgtataaaaaggctttttatgtaggaacagattcagtacaaggcggtactgtacaagggaaaatgattgttgatgcttggaacaagcataaagaattgattgataaaaataaagatgatgtattacaatatgtattgctcgttggcgaaaaacttaataaaacctccatcgatagatcaaaatactccgtttcaactattaatcaagcttttataaaaaccgaacaacttgcatctcctattttgaattggaacacaacatttgctaaagattctgttgatgcattattcttaagatatggtaacaaaatagaagcaataatttcaaatgatgactctatggcaatcggtgctgttcaagcgttgcaaaaatatggttacaataccggaaataaatctaagtcaatcatagttgtcggtctagatggagtatctgaagctaaagaactggtttcaaaaggcttcatgttgggtactgcttcacaagaaacaactgatatgactaatacaatatataccgtaggaatgaatttagttaaagatagaaatcctcttgaaggggtatcctataaatcagatgaaacaggagtggcagttttacttccatatgaatcatataccgggccaatgtttcaataataattaatttccaataatcataaatttgttttcttccttttggtattctaatgaaataactacataagtaaaagtttttgcattacttaagactagattctttagtagtattgtacacacagatttctaaagataaattacaattcaatatcaaatttaatttagattggataacaaatcttataaaagatgggattatagaaaaatatatttttactaaaggtgaaattgaaataggtatacattattttaacttagacatttacttaggttttattcttgacttgaagttaactttaggtgatataatatcaagtaaataggttaatataaccaatatatttatggaattgcgagaaaggcgatgataatatggtaaatgttacgctaggaagaactgggatagtagtaaatagaaatggatttggtgctctccctgttcagcgtgtctctaacgaagaagcagtaaaattgttgaggaaagcttacgataatggtattaatttttttgactcagcaagaagttacactgacagcgagtataaaattggtcttgctttaagtgatgttagggataaaataattattgcaacgaaaacaccatcaactactgttgaaggtttttggagtgatttagaaaagagtcttgctatgctcaaaacagattatatagatatttatcagttccataacccaagtttctgtcctaaacctaatgatgggacaggtctatatgaggctatgctagaagcaaaaaaacaaggaaagattcgtttcataggaattacaaatcatagattaccagtggccatagaagctgttgaatcaggtctttatgatacattacagttcccatttagctatcttgctgataaaaaggatgaggatctagtaaatttatgtaaagagaaaaatgttggctatatctgcatgaaggcattatcaggtgggcttataacaagaagtgatgcagcttacgcatacctttctcaatttgataatactttacctatctggggagttcaaagagaaaatgaattagatgaatttatctcatatatagacaatccccctacaatgacagaggagattaaagaatttattgaaaatgagagaaaagagcttgtaggtgagttttgtcgtggctgtggatattgcatgccatgtccagcaggcatagaaattaataattgtgcaagaatgtccttacttcttcgtagatctccaactgaggggcttctttcaggggaaggccaagctaagatgaaaaagattgaagattgtatagagtgtggtaactgtaaggctcattgtccttatggccttgatactccaaatcttttgaaaagaaactatgaagattataaaacatttctaaagaatataggttaagtaataaaagatataaataaacaacttaaacctagacttatgcaataattcaccgaaagtagaaacattgttatttcacaggactatgaaaatttcgctgaaagtgctaaattgcagcttgcaccactaatgcttgctcccaatttcattgtgacaagcattagtggaacaacctataattaagaacttttaacagctcattttcaatgcctgctgcataaaaatgtttctgctttctagtgtggtatttattgcaaattataaatgaaatttttaagtgtttatttatatttttaatagaagtttgaaaacttcctctaaattctatgagtagcgttaacataataattaaatatatttatggtgaaagtagagtacatttcttatttcaagaaatgtactctatttatttttcttttatagattttctacatagttctttagcatatctataaacactagcgttccttttgaggggattatacctttttgcattacatatgaaaatggacgagtgtaagtttgtttggtttttaaggtggaaatttcattattttttaaggaattctcaattacaagtgaagaaataaaagttattcctaaattgtttttaacagcttcttttacagaataattacttccaaaaacaatgatatttttagcgttaatattattatttgataagaaaagattcaaatattgacgagtaccagatcctatctccctactaatccaagtctgattttgcagatcctcggctgaaaaatagttattaactaagtagtgattgtacggaacagcaacttccatcttgtcagtataaaatttttcgatcgtaaagtgggaaggaggaacagtaccttcaactagagcaatgtcaacttgaagattcttgactttttcacatatgttatgtgtgttttcaattgtcacttctaattctaattcaggataggcctttgcaaattttcctaaaaaggctggtagtaagtattctcctatagtaaaactggcccctatatgcagctgaccttttacaacatccccataacctaacagatcatttttagtatcatttagtagcttaatcatttgttttgaacgctcatagagtaaatacccagattgagttatgtttatatttttctgttttatagaacgttgaattaaagttgtattaaaatactcctcgagatgcttaatatgtaaacttacactaggttgggatagattaatagattcagcagctttagtgaagtttttatattcaacaactgctataaaagtttttaattcatcaagcatggaatcatcctttcttaatcattaatattcttaatcattattatagaatatatatattttacttatgattatacacctaatatactaaaaatagaaaaagaagtacttcatattcagataaatattttagaaggtgatatgaatgagtttaaatataattagagataagaaattatcaagaggaatggataaggttttagaagttttaccaggagttataatatgtacaataatcgcatttatcgcaaagtatttaagtaattatgtacctagcataggggcggcatctttagcaatcttcattgggatggcagcaggaaatacattttgcaatagaaaaatatatcaaaagggatcaaaattcgcagaaagtgaactattgtcatattctatagttctgttaggcggaacattgggaattcaaactatattaaaattaggtttttcaggaatatcatttatagtatttcaaatgagtattactatagcacttgtaattttaattgggaaaaagcttaaattttcagagaactttagttttttaatggcaagtggaaatgcagtttgtggatcttcagctatagcagctactgcaccagtaataggagcaggggatagtgaaaaaggcatagcaataactatagtaaatgttacaggaacagtattgatgcttgttcttccatttatagctaaagtgatattttcattagagacaataaaaacctccgctttaataggaggaatacttcaatctgtaggacaagttgttggtagtgcaagtctagtaaatgaacaagttaaggatttatctacaatatttaaaatagtaagaataatatttttagttgttgttgtattaatattaggaaaaatgaaaaataaagctggtagagtagaaagcggaaaattaaattcaaaaataaaaataccttggtatgtattggcctttttccttatgtgcttagcatttactgctggagtttttccaatgaatatttctaatatatttaaattaataagtagcaactttgaagtaattgctcttgctggaatagggatgagagtgaattttagacaacttataagaataggaaagaaagctgcactttatgccttagcaattgccttaatccaaatagtttcagcaatttcacttatcacagtatttttgtaaaatgctattctttaatatagagttgaaatatagtattataaaaattataggtgggattgcccacctgtgatacccaatataagaacattgtttatcagtttttggctaattcataaattaatacttcatattaatgcttatctgtctcaactattctgttcatatcttcaaataatatcttttcatctattggacctattatcgtcttcacccttgcagaagctacagcacctctaaaacttcctattgaataagtttttattctactataatattgattccctgcttctatagctctttccttcaattcaggatcattaggagctttacttaattctaaaagaagtttatagtaaatctttttataaggattagattcccacatcgtaaaaactacttgaaatataacaactgaaatagttgcaatacatgctattaatacctgtattcccatatatattctccatcctataaatacgtaataattaaatattgtttattagattacagtttttaataacacttattataacataatttgcaaaatataacgcatattgtacatataatggatctctattttttaaatcctttattttaatacatgaatgtttttcgttactttgggccatttagtataattttgcttatatattttattgcagcaacattaaacaaattcgcccatttctttaaatcgctatggataatattaatatgctcaaaataaatttcttgatttttaacacgattcaagcgcttattctatagtatataatatagtgtagttgaaatattatttctccttattaaataaatttcacgacaaacttagaatgatttattaattttaataaatcattcttattttaattcctaaagcatatggtttgagagattaaaatacaataattacaaaacaaatgctattttataattattcataatatagataactcaactaagacttgaacttatgcatataactcgccgaaatgaatcacatccatcaaaattaccaatgaaacattccacaaaagtatattacccatttctagttaggatatatttcacagtataaatctaacttgtaattggcttatctatatagataaacaacttagggatttaacctatcattataaatacgtttacaaagtttataaaaatttaagtttatatcttcactagaaatcataaatatatttgtggagaaaacatttgaaaatgagctgttaaaggctcttagctgtaggttgttccattttagcttgtcacactaaaagtgggagcatgctaaagtggatacaacctgccgcttagaactttcagcgatattttcatagtttttcggaatcaaaatatttatgatttcggtaagttactacataaattttgggtatctataattaacctattgttttttaggatgaaacttaattgaacttgtttttatcggtaaataatgcttattagaagcaataggaaattcagaatctttataaagagtttcctgtataagatgaaattgattttctggcgaaattggatacgttttagcagcaaagtttccagaagttgagtactttatttcaactaatatatcactagatatttcgtaaatatctctttctagaaattctaaaatcatatcctcattgtttaaatcaagattaaattttgaaatagtttcaattggcaataaagtaaacgtataagctatagcttgaccttcagatttataccatctatctattaatactacagcagcagttttctttacaagaatttgattaaaatagtcagtagatggctctattcttaattgaattttaacttcatcaatgacatcatttatgcacttgtatacggggtgtcccattgtttctaaaccaagatcttttttaggcttagattttactataaaatttcccttacctcttatattatttactaatccatcatcttgtagtagtgcaagtgcctgtcttagcgtagttctactaacaccaattaatttagatagttcaggttcagagggtaatctacttccttctggaaaagtaccttcatttatcattttaaaaagttgattatatacacttacatatcttaattcttttggcttttcaactatatcaaattcatcattcataaaaatatcacctttctacagatataaccctgtctagacaagtatacatattgaattacaaattttcaactgaaatatttgttttatacttaattataacgttaattaaacaatattggcaatcaaattattatggttattttgtgcacagcctgtccttctaaaagcttgtaccaacaggcttttggtatagtttttaaattgaatgaattttcggaatttatcatgaataaaatgcttgacatgaaataacagacatgctattctttgagtacaaacaataatacaacttaatagacaagtattaaggatgtccaacattttttaacgtaatgttgaaaccgtattctgaaagcgaatcgtgaaataaatggaggtattataatgaattattcacaaggttctgggaaacaatatcatatagatgtgagagaaggagatgtaggtaaatacgtaatattaccaggggatccaaagagatgtaaaaagattgctgcatactttgatgatccgaaattaattgctgataatagagagtatgttacttacactggatttttagatggtgtaaaagtaagtgttacttcaacaggaattggtggaccatcagctgctatagcattagaagaactagtaaattgcggagcagatactttcgtaagagttggtacatgtggcggaatggatataaatgttaaaggtggagatgtagttattgctactggtgcaattagagcagaaggtactagtaaagaatatgcgccaattgaatttccagctattgcaaacttcgatgttgcaagtctacttgtgcaagcatctaaagatttaaataaaaattatcatgttggagtagttcaatgtaaagattcattttatggtcaacattctccagaaactaaaccagtaagttatgaccttttaaataagtgggatgcatggatgaaatgcggatgtcttgcttctgaaatggaatcagcagctttatttgtagtaggaagctatttaaaagtaagagtaggttcagtgtttttagttgttgcaaatcaagaacgtgaaaaggcaggacttgaaaatctacaagtacatgatacagaaacagctatagaagttgcaattgaaggaattagaaaattaataaaagctgacaaagagagagaaactaaataagaaagtgtttgatcttttggaaaggaatataaaatgaaagagtatgaagatattttagaaagagcttttagagctatggaaaatgcatattctccttattcaaagtataaggttggttcttgtgttgttactaaagataataaatactttataggagcaaacattgaaaatgcatcttatggtttaacaaattgtgcagagagaaatgcaatctttcaagcatattcaaatggatatcgtaaagaggatgtaaaagcaattgccattgtaagtgatggaaatacgctagcaactccttgtggtgcatgcaggcaagttttagttgaattattagaaaaacatactccaatagttttatctaataaaaagactgaaaaaattactgatatcgaagaattattaccaatgtcctttacagaggaagatctaaaataataaaattttaatttgggaataagtattaaatataaaatgaaatataaacttatattagttttgaaaggatggagttatgaagaaatataatagaattttcacaatagtaatagattcacttggaattggagaaatgagtgattcaaaagagtatggtgatgttggtgtagatacacttgggcatatatcagagtcggtagatgaatttaagattccaaacttacaaaagttagggctagctaatttacatccaatcaaacatgttgaagcagttgaaaaacctttagctcattttatgaagatgagagaagcaagtgttggaaaagatacaatgactggccactgggaaatgatggggctaaaaatagaaacaccattccaaacatttactgatacaggttttccacaagagctattagatgaacttgaaaaaagaacaggtcataaaatagttggaaataaaagtgctagtggaacagaaatattagatgaacttggtgaacatcaaataaaaacaggagatatgatcgtttatacttcagctgattctgttttacaaatatgtggtcatgaagaaacttttgggttagatgaactttatcgttgctgtgaaattgcaagagaattaactcttaaagatgaatggaaagttggaagagttattgcaagaccatatttaggaatgaaaaaaggtgaattcaaacgtacaagtaatagacatgattatgctttaaaaccatatggagctactgcattgaatgcattaaaagataatggatttgcttcaatatcagttggaaaaataaacgatatatttgatggtgaaggtataacagaatcaaataaatcaaaaagttctgttcatggaatggaacaaactttagaaataatggataaagaatttaaaggatcgtgctttgttaacttagtagactttgatgctttatggggacacagaagaaatccagttggttatgctgaagaattagaaaagtttgatgttaatttaggaaaagtattagataaattaaaagaagatgatttattaatcattacagcagaccatggtaatgatccaacttataaaggatcagatcatacacgtgaacatgttcctttcttagcttattctccatctatgactgaaagtggtttaatggaaacaagcgatagttttgcagcaattggtgctacaatagcagaaaactttggagtaaagatgcctgagaatacaattggtgaatcagtactaagcaagttagtatagtattacaggaaggatatttaactaatgatgagtacagttaatacgctaaaggaaaaatcacttaaagttcttcttataaatattttaatagcgttagttggagtttcccttgttggatttggaattgcatttaattcagctgcaatgcttggaaatgatgcagttgcaattctatatgatggagttcgcagtgcaagtggtcttccacaaagcgaacttggaatgacaacaaatgtggtaaattacgcaataataatattatcgttattaattaacagaaagtatataaatataggaacatttatatatactattccaatgggaaccttcgttgggataggttcaaagttttatgaatatatgaatttgcctaatgttttagagtggagaatattaagttctgtatgtggatccttaatgctgtttacaggattaggaatctttatagcaataaatattggattagatccttttacaagtttagctatgatattaaaagacaaaatgaaatctcaatatagaacagcaaagataatttgtgatgttacatcgcttataattggttttatactaggaggaaaagcaggggctgtaacggttattgcagccctaataggagggccttgtatacaatttgcatcagagctatttaaaaagtcagttctaatgaagattaaaataggtgaaaagaacattttacaatattaaaaacaagattttggaggacagaaatatgacaaatgtaccaactccccataatggggcaaagctaggagaaatagcaaaaacagtattaatgccaggagaccctttaagagctaaatttattgcagaaaattttcttgaagatgttactcaatttaatacagtaagaaatatgcttggatatactggaacttataaaggaaaacgtgtctcagttatgggaggcggcatgggaatgccatctataggtatttatagctatgaattatttaatttctatggtgtagataatattattagaattggaacagcaggaagtatatctgagaaattgcacttacgtgatgttgtaatcggtttaggtgcatctactaattctaattacgcacaccaatatagtctgccaggaacttttgctcctattgcaagttttgatttagttagcagtgcagttgaagcagcaaaagaaaacaatataaatgttgttgtaggaaatatactatcttctgatactttttatagtgctgataaaacagcaacagaaaagtggaagagtatgggagtcctagcaatagaaatggaagcagctgcactttatatgaatgctgcagaagcaggaaagaatgcgttatgtttacttacaatttcagactcagtattaacaggagaatcactttcagcagaagatagacaattaagttttacagaaatgatgaaaattgctcttgaaatagcaaaataataaagtttataggaggaaatatcatgaaaaaagtaattgcattattaatgacaacaatgattatgggaactatggctggttgcggatcaagtggaaacaagacaactgataaaggaactacaggtgataataaggaatttaaagttgcaatggtaactgatacaggtggtgtaaatgaccaatctttcaatcaatcttcatgggaaggattgcaaaattttgaaaagaataatgctggaggtaaagtaagctatcttgaatccaagcaagaatcagattatgctacaaatctagataaagctgttgatgctggtaataaagtagtttggggtattggttttgcaatgtcagatgcaataacaaaggcagcaaaagcaaatccagatgttagttatgctatagttgataattcatatggagatgatactccagctaatgttacaggagttatgtttaatgcacaagaaccttcatttatggtaggctatgcagctgctaaaacaacaaaaacaggtaaagttggatttgttggaggaataaaaagtggaattatagatcaattccaatatggataccaagctggtgttcaatatgcatcaaaagaattaggtaaagatattactgtagatgttcaatatgctgaaagtttctctgatgcatcaaaaggtaaagcaattgcaaacaagatgttctcatcaggatgcgatatcgtattccatgcagcaggtggagttggtgtaggtgtaattgaagcagctaaagaagcaaataaatttgcaataggtgttgaccgtgatcaagcatatttagctcctgataatgtattaacatcagcattaaaacttgcaagtgttgcagttgaaaatgtttctaaagaagctatgactggaaataaaattggtggtaaaacttatacttatggattaaaagaaaatgctgtaggaattccgactgaaaacaaaaatatggatccagcagtatataaagcaactatggaagttcaagacaagattaaagctggtacaatagttccaccttacaatgaacaaacttacaatgactttttaaaaaaataataatttaaacttaaagtagataataactattaagacagtagtggaggtaggctttgctggtaacttaacggtttgccggcaaagccttatataatagaggaggattaggtatggaaattagcaaacaatatgcagtacaaatgcgtgggattacaaaaacgtttggctcgttctgtgctttagataatatcaaccttgatattaaaaaaggtacaattcatgcactactaggagaaaatggtgcaggcaaaagtacccttatgaatatcctttatggattgtatcaagctgatcaaggtgaaatatatcttaatggtgaaaagataaatattaaaaaccctaatatagcgattgaaaatggaataggaatggttcatcaacactttatgttagttgaaaattttacagtaacacaaaatatagtgttaggtagtgaaattacaaaaaaatgtggaatactagatatgaaaaaagcccgagaagaaatattaaacattgttaaaaagtatggattagatgtagatccagacgcaaaaattgaagatatttcagtaggtatgcaacagcgtattgaaatattaaaagctttatatcgtggagctgatttattaatattggacgagccgacagcggttcttactccacaagaaattcaagatttaataggcatcatgcataaccttattgctgatggaaaaacaataattataattacacacaaattaaaagaaataaaggagtcttctgatgtttgtacaataatacgtagaggaaaatatatagatacagtaaatgttaaggaagtaacaagagaagatcttgcaacaatgatggttggtcatgcagtcaagttaatcgttgacaaagaaactgcaaaaccagatgaggttgtttttgaaatagataatttaactgtaaaagatgaaagaaagttagatgcagttaaagatttatcacttaaagtacgtaaaggtgaaatcgttggtattgcaggaattgacggcaatggacaaaaagaattaattgaagctataacttgtcttgctaaatccgaaaaaggtaccattaaaataaatggagtagagatacaaaatactacagtggaaaacgttatcaaaaataaagtttcaacaatacatgaagacaggcaaaaacgtgggcttgtactagactttagtgttgctgaaaatatggtaatagaaaaatataaaagtgaaccatattgtaagaatggattattggttaaagataaaattatggctcatactaaggagcttataaatcagtatgatataaggcctgataactgtgaatcatcacctatcagagggctatcaggaggaaatcagcaaaaagttataattgcaagagaagtatataatgatccggacttattaattgcagtgcagccaactcgtggacttgatgtaggagcaattgaatatgttcataaaacattaataagagaaagagataaaggaaaagctgttcttttaatttcattagaacttgatgaagttatgaatgtttcagatactatagctgtaatttcggaaggaactattgtaggtgcttttaaacaaggtgaagttgatgaaaatacaataggcttgctaatggcgggaggtaaacatagtgaagatagtagtaaaaattcttaaaaaaccagttacttcaacattcattgcaatattctgtggatttattgttgcatcaatagtactaggtgttgctggttataatcctatagatgcttttagtgcactttttggagggattttttcaaaacctaaatatatatctaatacaattattaaggctacgcctattattttaactggtttaagtgttgcatttgcttttaaaacaggattatttaatattggagcggaaggtcaatatatagtaggtacaattgcatcaacaatagttggaatcaaattaaatttgccagcagtattagaaattcctttagtaattttagctggtgtagctgctggagcagtgtttggtggtattgtgggaattcttaaggcgaaattcggaatacatgaagttataaccagcataatgctgaattggattgcattatatttatctaatttcgttgtatcaacagatgtatttcatcaaccagattcaacaagtacttatatgattaatgaatctggatttactactatacttggcaattggaagacatctgatgctggaatggaattcctttctcatcacaaatggttatcagaagttttgttaaaaacagatgttaatattggaattattgttgctattataatggctgtagttatatcagttttattatataaatcagcaaagggttatgaattacgtgcagttggattaaataaagatgcagcagaatttgctggaataaatgttaatcgtaatatagttcaatcaatggtaattgcaggtgcattatcaggtcttgctggagcattagctatcacaggcacagcacctcataagctatcaactatggctgcttttgaaaataacggatttaatggattatcagttgcattaattgcaggaagttcacctattggatgtatatttggaggattgttatatggtggattactatatggaggtcaatctgtacaatctgctataggtgcaccatcagaaataataaatataatgataggtactattgtatttttcgtagcattaactaagattgtacctgctttagctgacagacttttaaagagaggtgaaaagaatgttaaatagtattgcactattaataggtattacactaatgtattcagcaccgttaatatttggagcattaggtggagttgtttctgagcgttctggagttgtaaatatcggaattgaaggtatgatgactataggtgcatttactggtgcggcggtaggatattattctggaaatgcatggcttggatttttagctgcaggaattgcaggtggaataatggctttattacatgcagttgcatctataacattcaatgctgatcagacaatatcaggtattgctataaatttattaggtgcaggtttctcgttatttacatgtaggttattatttgaaggagctactatgactaaaccagtagctactaaattacctaaagtatttggagtagatattacagtttttatagcacttataattacagtagtaatttggtttattttatataaaactaaatggggattacgtattcgtgcagtaggagagcatccagcagctgcagatactcttggaataagtgtaactgcaactcgttacgtgtgtgttatgatttctggaatacttgcagggtttggcggagcatctatgacgcttgcaataatagcacaattcactccaacagcaattagcggtcaaggctttattgcactagcagcagttatttttggtaaatggactccgcatggtgcatacggagcttgcttattatttggatttgctcaagcattaacagtagtattaggtggtggaacctttgctattccttcgcaaatacttgcaatgctaccatacattctaacaattgtagtattgattctttttgttggaaaatcagttgcaccaaaagctgatggagttccatacgaaaaaggtactcgttaatggaaaaaagaaacatttttatttcacaggactgcaaaaatttcgctgaaagttctaaatttcaggttgcaccactaatgtttgctacagatttcctagggaaactcgactcattacattcgctgaggaagttcgacaacctaaaatgaaatttaggactctcacttcacaagcgttaatggaagaaccattagcggaaactcgactcacatacgtttgctgagtaagtgataagtgaatcacgtgtcacctgtaatttgtcactagtatcaacttgttatttaatcaatctaaaccatgaactgcatgttataattctaataatattacaagaattttattcgtaattgtgaattacgaaatgtgtattgtgcattatgaattatgcattgtaaattgtgaattgtaaaatatatagttataaaataaatttaaggagtaatgaaatatgaatattgctaaatatatggatcatacgatattaaaaccagaggcggcagaagaagatgtaaaaaggctttgcagagaagcaaaagagtatagctttgcatctgtttgtgtaaatggatgttatgcaaaattagtaagtactgaacttgtaggaagtgaagtaaaaacttgtgttgtagtaggatttccacttggagctatgacaaaggaagccaaagcatttgaaacatctcaagctattgaaaatggtgcgagtgaaatagatatggttataaatgttggagcattaaaagataaaaattatagtttacttaaagatgatatagaagcagttgtaaatgcagctaaaggaaaagcattagttaaagttattattgaaacatgtttattaactgatgaagaaaaagttaaggcttgtgaaatagctaaagaagctaaagctgattttgttaaaacatcaacaggattttctactggtggagcaactaaggaagatattgctttaatgagaaagactgttggaccagatttaggcgtaaaggcatcaggtggagttagagacttcaaagctgctatggatatgataaatgtaggagcaagtagaataggatcaagcaacagtattgcaattgttaatgagagtaaataaattttaggctataagctaaagaaaagataaaatgataaattgtgataaatagctagatagaaccatgaggcaaaaaataattcatggttctattatttatattactctgaaaatgaaagaagatttagtaaggaaaataatttgatttttttgcagagaattatgctattttaaactaatgtagtgagataaaactatatcaggattaatgtgaattaaaatgaagagattataatttttagatttatttatataatctgtaacattattgataaatctctgttacagaactgtaacaataatttcctataattaaaccgaacaagagatatgcattaaaaaaagatgtggaggagcaataacagaagataaggaaactggtgttatagaagctttcacttcttcaaaataaaaaacacgctaacaaaatttggagataggattaatataaattctataaatgagtaaaattttaataggttagttatgcaaatgaataactagcctatttaatttcattgtaaaaaataaaacattacataactacactctatgatgcacactttgtataaaaaggaaatgtataggtatatgtggttaaaaactaaatatttataatctaaattagtagtatgataataaaaaaaatatatatatgttgtaaaaataattcttcataataattctaaaaatattacaagaattttagccataattgtgaaatg

SEQ ID NO: 30 - DNA, 58201 bp, Clostridium beijerinckii
attaataataatatggagaaaatttaagtaaatgcgatatattttgagataaggagtaatattcgctgaaaaatgggatataatattagaagcaatgtttgaattatatggatataaaggatattataattatgttagcactcgacaatgatgagtgctaacagaaaataaatgaaatgataatatatattttaaggagggttttttcatgaacattaaaccacttggtgaaagagtagtaattaaaaaattagaggcagaagaaaagactaagagtggaatagtcttaactggtactgcaaaggaaagaccacaagaagcagaagtggttgcagtaggacctggagctgttgtagacggaaatagagtggctatggaagtaaaagttggagataaagtattatattcaaaatatgctggaacagaagtaaaggttgatggcgaagaatatactatattaaagcaagatgatattctagcaatagttgaatagttaaagtgttcataactcgatatttaaatataaaaaagaaattcaattagaaacgataataaataacatatataaggagcgtgtaatataaatggctaagatgttaaaattcggagaagatgcaagaagatctatgcaaataggtgtggataaattagcagatacagttaaagtgactttaggacctaagggaagaaatgttgttttagataaaaaatttggtgcaccattaattacaaatgacggtgtttcaattgcaagagaaatagaattagaagatccatatgaaaacatgggtgctcaattagttaaagaagttgcaacaaagactaatgatgtagcaggagatggaactacaactgcaacattacttgctcaagcaataattagagaaggtctaaagaatgttacagctggagctaatccaattctaattagaacaggtattaaaatggctgtagataaagctgttgaagaaatccaaaagatttctaagcaagtagatggaaaagaagatatagctagagttgctgcaatctcagctgctgatgaagaagttggtaagttaatagcagatgctatggagaaggttggtaacgaaggtgttattactatagaagaatctaaatcaatgggaacagaattagatgttgtagaaggtatgcaattcgatagaggatacgtatcaccttacatggctacagatactgaaaaaatggaagctgttttagaaaatccatatatattaataactgataagaaaatttctaacatacaagaaatattaccagtgcttgaacaaatagttcaatctggtaaaaagttattaattattgctgaagacattgaaggagaagcaatggctacattagtagttaataaattaagaggaacatttacttgcgtagctgttaaggcaccaggatttggagatagaagaaaagaaatgttacaagatattgcaacattaactggtggaacagtaatagctgaagaattaggcagagaattaaaggatgttactatcgatatgctaggtacagctgatagtgttaaagtaagtaaagaaaacactgttatagttaatggtaaaggtgattctaatgcaataaaagaaagaattaaccaaattaaagctcaaatagaagaaacttcttcagaatttgataaagaaaaattacaagaaagattggctaaattagctggaggtgttgcagtaattaaagttggtgcagcaactgaaacagaattaaaagaaaagaaacttagaatagaagacgcattagctgcaactaaggctgctgttgaagaaggaatagtagcaggtggtggaactgcttatgttaatgtaataaacgaagttgcaaaattaacttcagatgttgctgatacacaaattggtatcaatataatagttaaatcattagaagaaccagtaagacaaatagctactaatgcaggtgtagaaggttcagtaataattgaaaaagttaagaatagtgaaccaggaataggatatgatgcattacatggagaatatatcaatatgataaaaggtggaatagtagacccaactaaggttactagatctgcgcttcaaaacgcagcttcagttgcttcaacattcttaacaacagaagcagcagttgctgatattccagcaaaggaaacaccaatgccaggtgctccaggaatgggaatggacggaatgtactaaaatatataaattaaagaattataaatatttaatttaataaatagagaaagtgcttataagtactttctctattttgctttttagtattaaaaaaataaagtgcttaatagccattaacatatctatgcaattttaaaaagtattttatattatatgtttaacgtttaagcttatgaaaatcatagcaatgcaactttatacaaaatttatatactagaagtcaatagtataaattattagagaatattttccatttattgtataaaagatttcctattagacataatttaaataaaaacattaataggagatggataatgaataatgatttctttatacattaaatgtaaatttagattcaaagatagtatgtcaaagaaaagattctgtaagaagagaaagagagaagcttttactttaattgaaatgattgcagtaattgcaattattggtattttagctgttgctattttacctaaagtaaatggctatataaatgaagcgaaaaaagttaaagttgtagatcagtgcagaaaagtaataatggccgttgaatcatataatttgaaaaatgattcgcctctaagtgaaagcactagtgtaagttcggctataagcaacaaagggattagtaagtatttagatggagttgaatttggtaatttaaatactagtagcacaagtttaaaaaattgttatgatgtagtaaatggtgcagaatttgatttcacagaaaatacagatattttaaatccgacgacgattgataatggatctaccaaagatgatgtaaaaaaatagaaaagatatcgataacaaaaaatttaacttacattattgaagtaaatttgcaattttagcttcaaatttattgactttagattgtacatacattataataattttaatttaaaatatagcacatttgaaaacttatatataccttgaatatggcaaggagtatctaccgggagccgtaaatttccgactataagtgatattagtataggctaaatctatagatttattagcatattaacatcacttttgaggttaatgtgctttttttgtacaaaaaaatagtacaagcaatgcaagcaaaaaatcataaaatactgaaaatgaaataaataattcaaaaaataggaggaactataatgggaaaaataattaagactgcatatacttttgatgatgtattattggtacctaataaatcggatatattaccaagagaagtgagcacaaaaacaaaaataacaaagactatagaattaaatattcctttaatgagtgcaggaatggatactgtaactgagtcgaagatggcaattgctgttgcaagagaaggcggaatcggaataatacataaaaatatgactattgaagagcaagcaaaagaagtagatagagttaagagacaagaaaatggagtaattacagatcctatatttttatctcaagatcatcttattcaggatgcagagaacttaatggcacaatacagaatatcaggagttccaataacaactcaagatggaaaattaattggaataattacaaacagagatataatatttgaaacaaattaccaaagaaaaatttcagaagtgatgacaaaagataatttaataactgcttcagaaaatactactgtagaggaagcaaaagaaatattaaaaaagcataaagtagaaaagttacctttagttgatagtgaaggccgtctgaagggattaattacaatgaaagatattgaaaaagttagaaagtttccaaatgctgcaaaggataagaagggtagattattatgtggagcagcagtaggtgtaactggaaacatgatggaaagagttgatgcattagttaaagcacaagttgatgttataactcttgatacagcacatggacattcaaaaggagttttagatgctgtttcacaaataaagaaagtatatcctgatcttcaagttatagctgggaatgttgctacagcggaagcaacagaggatctaataaaggctggagcagattgtgttaaggttggtattggaccgggatcaatctgtactacgagagtagtagctggggttggagtccctcaattaactgcagttatggattgtgcagaagtaggtaagaagtatggagttcctataattgctgatggtggacttaagtattcaggggatatagtgaaagcactagcagcaggagcttctgcagcaatgatgggatcattatttgcaggatgtgaagaagcaccaggagaaatggaaatatatcaaggaagaagctataaagtttatagaggaatgggatctttagctgctatggaatgtggatctaaagatagatatttccaagaaggaaataagaaattagtaccagaaggtgttgaaggtagagtagcttataaaggctttgtctcagatactatattccaattattgggtggaattaaatcaggaatgggatatttaggagcaaagaattttgaaattttatatgaaacagctaattttgtggttcagacagcttcaggtcaaagagaaagccatccacatgatattaacattactaaggaagcacctaattatagtgtaggacaatagtaaaatgcacagttcacaatcataaaatataccacttatgtgaactgtgcattatttgattaatttataattatagagattatttaaattagtatttataattttcggtgaaaattgtctcaatttattgataaaaagatttatttagttgataatagaatttataagaagagtttaggaggagaacatgaaaagagatttagttttagttgttgattttggtggacagtataaccaactaatagcaagaagagtaagagaatgtggcgtttattgcgagattattccatatgactatactatagaaaagataaaagctaaaaatccaaaaggtataatatttacaggcggtcctaacagtgtttatggagaagatactccaactgtagaaaaagaagtatttgaattaggcgtgccagtacttggaatatgctatggtgatcaactaatggcacatttgctaggtggaaaagttgcgacagcaccagtaagagaatatggaaaaacaaatgtaaaattagataaatcatctaaattatttgaaggaattgaaactgatggtatagcttggatgagtcatactgattatattgaagaagctccaaaaggatttaaggtaatagcaactacagaagtttgtcctgttgcagctatggaaaatgaagaaaaaagactttatggagttcaattccatgcagaagttgaacacactcaatttgggcaaaaaatgctagaaaactttatacacaatatttgtgggttagaaaacagctggtctatgggatcttttgcagaagaaaaaataaaagaaataaaagaattagttggagataagaaagtgttatgtgctttatctggtggagttgactcttcagtagcagcaatgattgtacataaggctattggtcacaacctaacttgtatatttgttgaccatggtttactaagaaaagatgaaggcgatactgttgaaagagtatttaagaaggaatttgatatgaacattaagagagttaatgtttcagatagattccttggaaaacttgcaggagtatcagatccagaaactaagagaaagataatcggcgaagaatttataagagtttttgaagaagaagctaaaaaacttggtcaaattgattatcttgttcaaggaacaatttatccagatatcgtagaaagtggaactaagacatcagcaactataaaatctcatcataatgttggtggacttccagaagatatgcaatttgaacttatagaaccattaagagaattatttaaagatgaagttagagcagtaggagaagagcttggaattcctcacaaattagtttggagacagcctttcccaggaccaggtcttgctattagagttttaggtgagattacagaagaaaaacttgaaatagttagagaagcggatgcaatattcagagaagaaattgcaaatgcaaatcttgatgaatctatttggcaatactttgcatgtttacctaatatccgttctgttggagttatgggagatgaaagaacatattctcatacaatagctttaagagcagttacatcaagtgatgcaatgacttctgaatgggcaaggattccatacgaaattttagatttagtaagcagaagaattgtaaatgaagttaagggagtaaacagaattgtttatgacataacttcaaaaccaccagctactatagagtgggaataggattgaggcttattaaataaggtggatagacacttaaagaaaatataataaaaaatttagtggcttagatattatctaaaaaaggtaacatttaagctacttttttgttgattttttgaagatgtgataaatgagaaaaggagtaaaaaacggtaggaaagaaatttacaatgacaatactactaacgttagattttctgaataatctttttaaagcagtaaatacatattttctctaactgatagcaaataaaacataacagcataatatattattagataggtattaaattttatagtcaaataaataataatttgatactagtaatactttaactaagcgctttagcaatgattaaacgaaaattaatgctgattacgaaggagaggaaataatggaaaacagaaataatagaaattgcagacgttgtaattgtgaagaagaacgtggagagatggatagtagaaattgtaatccttgtggcaatggaactcttggagctaacgtaaataatgactgtttagctgatgcgttggaagatgcatataatgatggctataaagatggatatcgtgatgggtatgaggatggaaatacagcaggagaaacagcaggagagacagctggatacaagcaaggatattgcgctgggtatgaaaaagcaaaacaagaggtcttagattatattagaagaaatagatgttgtagatgctgttaagcagaactaaattatataataagtagttatataaaaaaggtgtttataaatgattgaaaaatcattgttaaacaccttttttatttaatataaatatggttatagtgataatttaaatagtccatattagataagagttaattaaaaaagttacttttaatactaattgaatacaattgtgcaaacattttctctatagaggaaaaagacggcattaatcgttatcattttataaagtataattacattaaagaaagggggcatcgaaaacgcttgaaaaaatcaacctttgaatataagatagtcataagattatactatgagtataatttttaaagacttctaaaatcaaagaacaacaagttaaagtaagattaatagcaataattttattttaatttaaatgaattaataagtattgattcttttcaaggaggcaaaaatgaagtatttttatactgaaaaccgttcgacaagaattctaaaattaattgaacgaagacattccatttctgttgacgccattgctgaaaaatttgaggttagctcaaaaaccgttaaaaatgatgtaaaagagttgaatagtttattaaaaggatctgcgctaattgataataagcaaggaatatataaaatttatattattgataatagcaaatttgaggagattaagactaatatatataaccaaaaagaatttcttaattcacctcaaagaagaatggcatttattttatataagcttatgaatagtgaagagccatatttaactgatgacctagcgtgtgagatgaatgtcggaagaaccacagtaataagtgatttaaagaaaatgagagagatacttaataactacgatttaaaaattatagggaaaacaaataatggactagccttaaaaggtacagaattaaatataaggtttcttgtacttgagaacctttatgaaatgatttatggagaatacgaattagatgaagatgttattgatttagtaaaagagataacggatcaatatcagttcgatacaacgacatttgaatctttcatacattccctagttgtaactttagatcgccttttaaatggacatacaatcaatacattaagcgagaaatatggtgaattattaagaagttgggaatttacattggtaaatactatatcagatgcagttgaaaaaaggcttactataagtattccaattaaagaaagaattttcctagcattgcctattataggaatgaatactccgactaacatagaagggatttcaccgcatgttgaaattacagaagaagtatcaaatttagtaaatcatatattagagcgcattaaatatgacatgggtttaaatattacgctagatgatatcttgaaagattttgtataccatatggccttcttggtaaatcgtttaaagtatggggtccatattcataatcctatagtagatgagatcaggaaaaaatataaagtagcgtacaaaatggcagagttagcgcgagatgttattgagaaaagtcttgatgtaaaaatgacgcaagatgaagttggatttatagcagcatactttggagtttttatttcagaacagcaaatagaaaaaagtaaaatatacaaagtagcagttatatgcggaactggaagagttacagctaggttggttgctagtcaattaaaaggtatttttgatgcgaacacagttatagatttgtattcagatagcacagttactagcgaaatactagataagtacaatttggttctatctactgtccaagctaactttaagacaacagccactgtaatatatttagagaaaatatttgatgaagaagcgctgaagaaaagaataaaaagtattaagtatatagataaattagacatgccatccatgcagggaatggattctatattactaagtattttagatgaagataccttctttattttggataatcaattgagttatttagaaaatgttgatcatatgattgataatctatactcaaaaggttatgtagacgatggatttaaggaaagaataagaaaaagagaagaaaaatctacgatggtttttaatgaatctatagcatttcctcatactatcaattatgaaaatgatgaaatagtagtcagtctaggaataatttcagaaaaggctggagaaaacaatcaaagaaaactagtattcttggtaggacttccagaacaaactaaggatgatacactcttagttaaaatttatgatgaaattatagctattgccaatgataagaataccattgaagctctttcaaaggtaaaaagttataaagaattaattctacattttacaaaagaaaacgatatatttgatttataagtaggaggtttatgatgaatttttggtttttgattatatgctttggaattgcatttatactccaatatatactaacatttgctcaaatgaaaagtttcacggcttactatagtaaattgcgaagaagaggaagagttgccattggtaaagtaaaaggtggtttccgtgctggatgtattgcaatgtttgctatcgatcaaaatggaattatacttgaaggcggttatatgcaaggaataacagtacttgcaagggttaagaaactaaacggatttgaaggaaaagatgttggtagattaactcaagcagattgtaagaacttagctaaaccattaaccaaagcagtactagaagcctcttccaattataacgttattatgggcggtggcgaagttgtagaacctcaaagtccattacaaagattaggtaatatttttacagctaaaaaattaaaagctcacaattagaaaggagatattaatatggacgcaattgtttattttgcaaaaggatttatgtatttatttgaagttggtggaaatacatttgttagttgggtaacaggaattatcccaaaggtattattacttttagtttttatgaattcaataattgcttttattggacaagataaagttgatagatttgcaaagtttgcatctagaaatgttatattagcttatggagttttaccattcctatcagcctttatgttaggtaatccaatggcattatcaatgggaaaatttcttcctgaaagaatgaaaccaagctactatgcatcagcatcgtatcattgtcatacaaacagcggtatttttcctcacattaacgtaggtgaaatattcatttacctaggtattgcaaatggtattacaactcttggccttgatccaacagctttaggacttcgttatttattagtaggtttagtaatgaatttctttgcaggatgggtaactgattttactacaaagattgttatgagacaacaaggtattgaattaagtaatcaacttaaggcaaattagtttaggagggtattcatatggaaaaatataatgcaattaaaattgtaaaaggtagtggaggctttggcggtccacttacagtaaaacctgaagaaggaaaagatacattattatatattacaggtggtggagctgaacctgaaattgtagaaaagattgttaacttaacaggatgtaaagcggtaaatggatttaaaacatctgtaccagaggaacaaattttcttagttattattgattgtggtggaacacttcgctgtggaatatacccacaaaagagaattccgacaataaatgttatgccagtaggtaaaagtgggcctttagcaaaattcattacagaagacatctatgtatctgcagttggtttaaatcaaatttctttagctgattcaagtgcagaacctataaagagcacaaaagcgcctgaagaaggaaaaagagaatttaaatatagtgcggataagaaagtatcacaaagtttggctgaaaacagtaaatcaagcattgttcaaaaaattggtatgggagcaggtaaagttgtaaatacactataccaagcaggccgtgatgcagttcaatcgatgattacaacaatattaccattcatggcatttgttgcgatgttaataggaattatacaaggttcgggatttggtaattggttcgctaaaatattagtaccattagcaggaaacggaattggacttatgattcttggattcatatgctctattcctctattatcagcattacttggaccaggtgcagttatagcacaaatcgtaggtactttaattggtgttgaaataggtaaagggactattcctccaagcttagcattaccagcattattcgctattaatacacaatgtgcatgtgactttattccagtaggtttaggtctagctgaagcagaaccagaaacagtagaggttggtgttccatctgtattgtattcacgtttcatgattggtgtacctagagtagcagttgcatgggttgcaagtataggattgtatcaataaactataaaatttatttaattgcgattgagtggttcttatgaattgctcaattgcaccaaggaaaatacattgctgatttagatgcaaggagtggaataaaaggagggttatccatagtgaaattaattattgatgatgtaaatattgaaaaaataaaagatgttttcagcatattcccaattgatggtgtaactagtaatccgagtattttgtataagtatggaaaacagccgtatgaaatattaagagaaatacgtgaatttattggagaaaactcggaattacatgtacaggtgatttctgaaagttcagaaggtatgcttaaagaagcacataaaattattaaagagctaggtaaaaatacttatgtaaagatacctgtaactagagaggggttaaaggttataaaaattcttagaaaagaagaaattaatgttactgctaccgctatatatactcaaatgcaagcatatctagctggaaaagcaggtgctcaatatgctgctccatatgtaaaccgaattgataatttgggagcaaatggtgttcaagtggcaaaagacattcacgatatttttgagaaaaacaatttaaaaacagaagtattagcagctagttttaagaattcacaacaagtattagaattatgcaagtatggaattggagcggctacaatttcacctgatgtaatcgaaggtttaattaaaaacgcttgcgtggatgtagctgtagagaactttaaaaaagattttgaaatattatgtggtcaaggtaataccatgttaaattgccgataatctaagtagcttagaataaataataattttacaaagaaatatatttgaagggatgaaagcatctatgagtagtaagataatctatgaaaataaagtaaaagccttaggagatttagcagaaacattcttagaagaaggaatgataatattttttggagataatgcaccagatacactagcagattactgttactctattaatataaaggaagttaaagaaacaattaaacctggacaagtatttatgattgatggaatggcttttgaaataacagctgttggagatgtggctgagaagaatctagtgagtttaggacatataactgttgcgtttaatggttctaaagtacctactttatcagggacaatttgtgtggagaaaaaagaaattcctaaactcaaaataggaagtgaaatatttatattagcataattatatctaaaatttatatgaaatcgaaatgataataaaatggcattaaataatgaagttaaataatcaggaggaatttttatgaaaaatacatggcttaatttagaaggaaaaacagcaattgtaacagggggagcatctggtattggtaaggcagttgcacaagagtttttaaataatggtgcaaatgtagttgtttgtgatatgaatccaaacaaacctgaatttgatgatcataatggacatatggaatatatagttactaatgttgcagatagagatagcgtagaaaaaatgattgagaaggctaaagagattactggaactattgatataattgtaaataatgcaggtattaatattcctagattactagttgataaaaaagaaccaaaaggaaaatttgagttagatgaaaatgtttgggataaagttatgaatgtaaatgtaaaaggtgtatttctatgtgctcaagtagctgcaagagagatggcaagtcaaggaaaaggggttattataaatatgtcttctgaaagcggattggaaggatctgaggggcaaagtgtttatgcagcaagtaagaatgcagtaaattctttaactcgctcatgggcaaaggagctggggaaattaggtataagagttatcggagttgcgccagggattttagaagctacaggactcagaactttagaatatgagacagcgttagcttatactagaggaattactgtagaagaattaagagcaggatatagtaaaacttcaacaactccattaggaagatcaggaaagctttcagaagttgcagatttagtttgctatttagctagtgatagagcaagttatattcatggagttacttacaatattgctgggggaaaaacaagaggttaaataaaaacgatattagtacagaataagtttaattatctggccaattagcatagaacaaagttaaaaaattaacaaagttatctagattttaataattgaaaaatatataatttacattttatgaagagaaaacttagttttctcttttaaaattttaaaaatgattgatatttaataaacaatatgttatggcaagcattaaaaataagttgatatcaataaggataagatgaatattaattcatacaattagaaaaaatagaaccgagtaaagattaaataagattaatttcaggttattatttgatatattatttgtaaaaaagttaaaagcaaagatgagatattgagaatttatgatataattgaataataaaattatttttagttatatatggaggtaggatagaagaatgaataaaggtatatcactagacttatcaaaagtttctccttatttagaagaagcagaacttgaaaatatggaaagcatggttaaagctgttcatgaagatttacacaataaaacaggcgcaggtaatgattttttaggttgggtagaccttcctgtaaattatgataaagaagaatttgcaagaattaaaaaggcagcagaaaagattaaatcagactctgatgttttaatagttattggaataggtggatcatatcttggagctagagcagctattgaaatgttgacaaataatttccataatgtattaggaagtgataagagaaaagttccacaaatattttttgctggaaataatataagttcaacatatatggcagaacttctacaagtaattgaaggaaaagatgtaagtttaaatgtaatttcaaaatcaggtacaactacagaaccagcaattgcatttagaattttaaaatcatatttagaaaagaaatatggtgtagaagaagcaagaaagagaatatatgcaacaactgataaagctagaggtgctttaaagacattagctgattcagaaggatatgaaacttttgtagttccagatgatgttggaggaagatttacagtattaacagcggttggattattgcctatagctgcggctggaatcgatattgatgaaatgatgaaaggtgctgcagatgcaagaacagcttattcagtaccatcaattaaagaaaatgacgcttataaatatgcagcagctagaaatgctttatataataaaggagcatcaattgaagtattagtaaattacgaaccatcacttcattatttcaacgaatggtggaaacaattatacggagaatcagaaggtaaagatcataaaggattattcccagcagcagtagatttttcaacagatcttcactcaatgggtcaatatatccaagatggaagaagaataatgtttgaaacagttgtaaatattgaaaaaccaaaatatgaaataaatatagaagaagctgataatgacttagatggattaaatttcttagctggaaagaccatggatttcgttaataagaaagcatttgaaggaacactattagctcacaatgacggtggagttcctaatatggtattaagtgtaccagaaatttcagcatattattttggatacatggtttatttctttgaaaaggcttgtggaataagtggatatcttttagcaataaatccatttaatcaaccaggtgttgaagcttataaaaagaatatgtttgctttactaggaaagccaggatatgaagatatgaaggctgaactagaaaagagactttagtttaattatgaagattattattgatggagatgcctgtccaggcatctccattattgaaaaagcggcaaaagaacacaatattccagtgataatttattgtgatattcatcattttatacagagcaattattctgtagttaaagttgttgatagtggatttcaaagtgtagatatgtatgtaatgaatgaaactaaagaaggtgacataattgtgtctcaggactatggtgtggctgcgatatgtctatctaagaaagcgaaagtaataaaccctaagggatatatatatgatgagaaaaacatagatagattattggaagaaagacatatatcgcagaaaataagaaggagtggaggaaagacctctaaccccaaaaaaagaactgacgaagataatattagactggaaaaaaacttattaaaacttataactagttgataattttagaagcttagataagagcttctatttttatgcggtaaaaaattataaatttatattttggatattattttaagtgtgactggagggttttgttaaaaacaatcttactaatatatgagtttatataagcatttatgatataatcaaataaaaaataaactgaagttatttacaaaaaatggtataaatgtataatataataataagggtcattttgagaattggtatgagaggagtatgaatttatggaggaacttcagttaaagtatgttgagatagcttttgataagcaaacaccgcaaaaaattggcacggagataaatatatctggtaaaatagatggggaaatagaaaacttagaatataaatttattgttggcaaaggtggggtttggaatactatacaagaattttcagaaaaaaattattgcatatggaagcctaaaagagaaggggagtatatggttatggtacaagccagagagagggatggaaaaaaacctttagactatttagccaaagaggactattctatagtgacagaggaagtgagtaatactgtggataaagagactagtattcaatatgttactaatgatgaagaaattaaaagcgcttgcaatgataaagaaagtaatttgctagcgtctgaaaaagaagatcctattttatgcaatattgaatttaaagaggcaatgaatagtatagaagacaatgtggtgtttcttgaagttaaagaaatttctagagcagaaaaagaagttgtaatatcaaatagctatgctggtgaagaaatatcatcttctaatgataccaaagaagttgaagatatagtagataatactcaatataatgaagaggttttaaataaaatattaattgaaaacaatgctcaaatagaaccaagttttataaaagatatccgtatagataaagaggaaataaaagttggagaaaaatgttgtgttgaggtaaagacagatgatgagaatgtatatttatatagatattatataaaaaagaataatgaatgggatataattaaggattatgataaaagtaatattttaaaatatacagcaaacgagtctggaaataaagaatttttaattcagtgtaaaagaatggattccactgaaacctttgaagaccatagaattatcacactaaaagtaagagaaattgataaagtagaaataaccaattttaaatgtttaaataactcattaatagctggagaaaagcttggttttatagtagaaacaaatattgaagaatctgttagtaatgaagatatcgtattactatataaattttataaaatatataaagatggaaaatcaatttgtatacaagattattcaaccaaaaataatgtgtattataaggaaacagaagcgggtagctacagaattttatgtcttgtaaaaagtatattttcaaataaagaatatgatgatagagctattttggtatacggtgttaaaccatataaaacgattaagattaataattttgtagctgattcgaattctcctaatataagtggaagtagtataaagtttgcttcagaaatagaaggtggaaacaaagttatatatagatatcaggttaatggacccattaaagaggacacaggctttatagaaaagagtgaatttgtatggaaaccatctgaagctggagaatatgacattatactttatgttaaggatattacttataaaggtgaatatgaggatttaaaaagaattacatttaatatagagaaaaagagtgaaaagccagtaaagattttagatattgtagttgataaagaaaagaagattattgttggggagccagttggtataacggtgaatgctgaaggtggagtaaagctccaatatgcattcacaattagaaaggatggaagaaggttagagggagtagattataataaatctaactggataaattttattcctaaccaggcaggagagtatgaagtagaaataagacttaaggataagtactcagataaatcttatgatgcccaaacagttatatatttgaaggcactagaatatctaccgggtgaaatagattatataatattaccttataaggaaacacatttgattggggaagctgtggagtttgaatgcattgttcaaaatacacagaatactctattgaaatatgaaactaaaattaatggacattctattgagaaaacagagttctcaaaaaataaaaagttgagatttatacctaaaactgctggtaaatacactatagaagtttatgctaagaatgttagatgtactagtgagtatgattctaagaagcagataaacttgtatgtaagtgaggcgtcccctgtaatagaaactaatataatagcaaatacactagaaggccatgtaaatgaggagcttacatttgaagctataagcagaggagggaaaaatgtttgctatgaattttatttaatggagaataatgagtggagaaaggtgcaagcatatagtagaaagcattattatagttttatgccgtttactcaagggaaatataaaattttagctttagccaaaagttattataaaaaagttagttatgaggattatgctgaagtaacattttatgttaaaggtttaaaaggataactcgaaaataaacataggataaattttagagaaaggttgtttaagtatggcgatagacggtttagataaaatgtcaaatgagcaattattagcaatgaatatgctaagcaatggacaagtaacaaatgattcagattctgattctagcaatagtacgagtggtgaaaaagatttagcatttcagctagttatgaaaaatcttttggaatcatcaaaaaaatctaaagaaaatggtaatgctgaatcaaatgggaatacaaaggaagtaaaaagtgaaacaaccaacagtgagaaagtaaattcaaaagagaatataaatttaaataatgcagctagagtaggacaaacatatgtaacaggacaaaacttagaggaaataccaatggttttaactaataattatataggttttacaagaaattctgaatctgcattatctaataaaagtggagttgatattaagaaaatatattcggctgtagatgatgcagctaaaaaatatggagtagatcctaatctaatattagctgtaattaagcaggagtctgattttgatcctaattcaacatctggtgtcggagctgctggattaatgcagataatgccagaaaatttttcacatttagggataactgatggatatgatgttgagcaaaatgttagcggtggaactaagttacttaaagaatatttagataaatacaatggaagttcagagttggctcttatggcatacaatggagggcctggaactatgcaaagaagaggcgtatcatcagcttctgacttatataaaatgccacaagaaactcagaactatgttccgaaggtaatggggtactatagaaatggaatctaggatgttttacattctagattttttaaggaataaaataattataatcatataaaaactgcatcaaaaaaaccatcagtaacatttagatgacttttttcatgcagtttctttgctgtttgttaatattgttaacaatatgtacatttttaagttaaatttattttgttatcgtattcaaatgttaggtaaatgttttcaaaagaccataataaaaaacgcaacccttggggctaggttgcgctttagcaataagcaataagcaataaataaaaagggggctatatattccttttatttatccttgcaagaatattatagggtattattattaataatgcaagtgatttaataaaaaatgtgaatatttttgaaagaaatgaattattttattgcaaaattatttaatattcgttaatagctctttaaaaggcttaattcttcatctgttaattctctatattcgccttcttctaaatctggatctaataataacccaccgaactcttctcgtttaagataagttacctttttcccaaccgcttcaaacattctttttacttggtggaatttaccttcttgaattgtaagtcttatttcggatccatcgttattgctcgataatatctcaagcttagcttctaaacatttgtacccatcatctaaggtaattccatccttaaaagcttttatatctttttcatcaacgcttttatctatttcagcataatatactttatcgacatgccatttaggtgaaatcaatctatggtttaattcaccatcattggttaataacaataatccaacagtatctttatctaatctaccaataggaaatgggtcaaaaacctgatgttctaggtttaataaatcaataacggtttcatctctattatcatgggtagctgatataactccatctggtttattcatcattagatatatgtatttacgatatagtacctcttcgccattaatttttataacagatttttcaggatcaacaagcatggcactatcttttactattagaccatcaacttctataattccttttttggcaaaagatttaacatcttttctgcttccgtatcctaaattagaaattattttatctaatctttccaaattattcactccaatcgtttgtttgctttaatttatacattgatttattgtaccataataataaatatcttaacacatggatatataacttgtaatttatctacttcatttttatttttaataaaattagtaggatttatacaaattataatatttataaaagaaaaccatacataaatgaaattatttcatatgcatggttttctttcaatggatttatatccactgtacaatagaatttaatggctgccttgttttttcatgtggttctttagtgcggtatccaaagctagccataactgaaacaccaaagtgttcagtatctaaaataccttcattcttaagaatttcttcaactttttcaatattaaatccttcaattgggcatgaatcaatttgtaagaaagctgcaacagttagcatgtttgctagagcaatgtaagtttgtttacttgcccagtcaaaaattgtacggtcactttcaagtaaattgaaatcattcttctcaaagctttcaaaagccgattttctttgattggctacatcttcaggaagattttgaacttcagacataattttagttatatattcagaattataaattgtatcaacttttttacgagcaagaagaattacaaagtgactagctccattaaagctattctgagctccccaagatacaggaaataaattttctttaagagatttattttgaatgacaaggaacttccaaggttcaaaaccgaatgaacttggagaaaggcgcccagcttctaatatagtattaaaatcttcttcagatactgtttttgtggggtcgaattgcttacaagcatgacgaaattgaaatgcatctataatttctttatttttgttattcatttaaaaatcacctcttatctaagtataagttaagtctaacacacttggatacttcattgaagtacgcacaaatttgatatataatataaatgaacttacctaagtatctattttatactaaaggagcgaaaagtatgcatgaacaagttatatatccagattgtcctaaccatccatgcccagtagagacaacactaaatataattagtggtaagtggaaggggattattttatatcgtttattaggtggcaagaaacgatttaatgaattaaagaaattgattccaaatgttacacacagaacattaacacttcaattgcgtgaacttgaaagagataaaatattaaaacgtacagtttatgcggaagttcctccaagagtcgaatatgagttgacggttcttggccagtctatgtcaccgataattaaatctatgtatgattgggggctgaattatcaatcggaattaaggtcttgaaaaaagaaattagatatttaattagcgttttaatgagaataaaaatttaaatctataataaaataaaaaaagcattgacaaaaaaatataaggattctataattaattcgtacccgaacgaacgaggtggtaaaaatgaaaaacaaatgtatcgttggaagaatgagtataattgttgaagcatccaacaaatttttgacaaaaaaaataaaggatgagcgactacctatattgcaaaatcacgcagcactatttgatatattacctgaagatggttcgaagttgctttttaatgaaatagcaagcacatggaaaatatcaaaatcatctttatctgacattataaataagtatgagagtcaggggttaataaacaagtgcatgtgtagcgaagataagagaagtgtatatataagtttgactcctgaagctgtagttataaagcaaaaacttcaagttatggaaagagaatttctagatataatattaaaagattttggtgaagatgaaaaaaaggtctttgaagataatatagataaagctcttaaaaatataataaaaatgctctaaaggcattttttaaaaatagataattcgtacgcgtacgaaggatataagagaaggagtgtagaatatggaagaattaataatgaaatcactagataaaattagaccaatgctacaaagagacggaggagacgttgaattagtggatgtgagcaacgatggagttgtaagtgtaaaaatgcaaggggcttgtggaaattgtccaggagcaatgatgacaataaaaatgattattgagcaaaaattaaaggaagaggttcctggagttacagaagtcataggagtgtaaaactaaagagttttataagttaatgtaaataaaatgtttttaaagttggcacatacttcgtacgcgaacgaagtatgtgctgaaaagattcgtttcgggtactaaatgaaatataaaaaacatatagaaattataattaagatattaaggtagatactaaaatattagggaggggtaatatgtttaattcaataagaaaaagattaatctttaattttgttttaatagcagcaataataactttaatttgtataactttcttttcataccaaatggtaaatggaatacaaaaccaaatgaaagcagatggaataattttagttaataatataaaagcaaatatagaaagtgtaggagttacaaatacagataaaatacagggaataatagatcaaacatataaatattcagatggagaattatgctacataggtgtaatatcaagtgataaaactcttgttgcaggaacatcgaaggaatcaattggagagaagattgattcaacaggattagatgcagtatttaaaggtgatacaggagcatatatgtacgaatggaaggggactcctgcatataatgtaacagttcctgtcaaagacggagatgatataggatacgctctttcaattggaatttctgttgataacatgcaaaagtctattagaagcactattataaaaagtataatttatgcaatagtagtattgatattagcagctgttgcaggagtatatataggaaagcggattgcgaaacctatagaaattattaaggatgttattgaaaaagcaggaaatggagattttacagcagaatataaaattacaggtaaagacgaaataggaaaattagcagctgcaagtagtaaaactagaaagagcatgagggagcttgttagaaaaacaaaagtaatatcagaaagtttggctaaactatcaaaggatattgaaattggcggcagcactgtagcatcctctagtgaagaaatcgcaacttcagtaactagcgtatctcaagaaggtataaagcaagcagaagcgttagaagatgctgttagcttattagaaagtttttcagtagatttagataatgtggataataaattgacattattagctgatggtggaaaggtaataagagaggatacaaataagggagtagaaactataaataagctagcgaacactatcgatgatatgttaaattcattttcagtatcaagagcaaaggttgaaaatttagatagcactatatctcagattaattccatagttgatgttataaatggagttgcaaaacaaactaatcttttagcattaaatgcatccattgaggcagcaagagcaggggaggctggaaaaggattttcagtagtggcagaagaaatacgaaagcttgcagaagaagtattaaattcatcaaaaagcataactcaattaataaatacagttatgaaagagactcacgatgtttctaatactacagaagtcgtaactaaaatagtagaagaaagtaaaagtgatattaatactgtaacaacctcatttaaaggagttattagcaaggttaataatattcctagtgatattaatatggttcatgtggtacttcaagaaactatgaaaggaagaaataagatcttaaatacagttgaaaatatagcttcaaaatcgcaagaaatatcagccctttcagaagaggttacagccgctacagaagagcaagcagctataacaaatgaattttctatcacagcaaaaaaactagttaatatttcatcggtattagaaaaagacatcttaaactttagaatatagttccttatattggtgaattacaaaagttagagtgattaatatatgatgagtaaaagtattaaattactaagtaatgcgtgagtaacacttgattaaaatatcaagtgttttttattcctaaaaatttataatttttctaagtagatatagactaacctagaatataagtttgaatatatgcaattaaaataatattttagttaggttaatgatttaaacataagcacatatggtataatatttaaggattgggaaaggaggaataagtaaatggatttaaaatcattacttaataaagaacaatatgaaggggcaactacaattgatgggcaggtacttattttagctggagctggttcaggtaaaacaagagttttgacacatagaatggcacatatgattgaagatttagatattgcaccttacagtatattagctattacttttacaaataaggcagcaaaggaaatgaaggatagagttaaggcacttattggtgaaagagcagaaaatatgtggatatccactttccattcaacttgtgttaggatactaagaagagagatagataagataggctacaagagcagttttactatatacgatagctcagatcaaaagacattagttaaagagtgcatgaaaacacttaatattaatgataaagatataacagaacaagagataatgggaaagataggaaaagccaaagatagaatgcaaagtgttagaagctttatgttagaaaatgaagctaactttagggaaaagaaaattgcagatgtttatgaaatgtaccaaaagagattaaaagaaaacaacgcgttggattttgatgatttaattttcaaaacagttgagcttttcaaaaataatcctgaagtattggagttttatcaaaataaatttaaatatatcatggttgatgagtatcaggatactaatggtgctcagtatgagttggttaagttacttgcttcaaaatataagaacatatgtgttgttggagatgacgatcagtgtatttatcagtggagaggtgcggatattcaaaatatattagattttgaaaaagattatccaggagctaaagtaattaagctagaacaaaattatagatcaaaaggaaatatactaagtgcagctaatgtagtaattgttaataatgcaaatagaaaaagtaaagtattaaggacagaacaagagccaggaaataaaattaaaatatatagggcctatgctgatagtgatgaaggagactttgttagtaaacaaatcttagatataaagaataaagaagataaaaattacaatgactttgctatactatacagaacaaatgctcagtcgagaatttttgaagaaagttttagaaggaagggagtcccttataaaatagtaggaggcacaagattctatgacagaaaagagataaaagatgtattagcatatttaaaagttattgttaatcctcaagatgatattagcattagaagaataataaatgtacctaagaggagcattggtgatgcaactgttgcaaaggttcaagaatttgcaagcagctttgagtttgatttatgggacgcattagctgaagtaaggagcattccgacattaacgtcaagaaatgtttcaacaattgaaccttttgttgcgctcatggaaaatttcatggaactcagtgagacagtccctgtttcagtacttattgaatcaatattaaaagatactggatatctaaaacaattacaggaatcaaatgaaattgaagacaagagtagaattgaaaatttaaaagagcttgtttcagatgcagctgattttgaaaagaacaatgaagacaaatcgttatctgcttatttagagagagtttctctagttcaggatacggataagattgaagaggaagatgatgcagtagtattaatgacaatccatagtgcaaaggggttggagttccccgttgtatttatggttggtatggaaaatggtatttttccagggaatgcgtcatttgaaaaagaatcagagatggaagagtcaagaagattatgttatgttggtataactagagcaaaacagacattgtttatgacttcggcagaggttaggagagtatttggtaaaacagtagcatatcctcaatctgactttattaatgaaataaagccagacttaaaagaatatgttggagttaaaaaggaaagtgctaaaagcagggaaaagcttatgcaaagtaattcctacactaatccacacagtttaagaaatagtgttacaggcaatagagcatatactcttaataatggcggtattaataatgtaattgatagaagtactatgaatgaaatggctaaagaatatatatctgttagtgaagcaacccttggaagaaaagtaattcatgaaaagtttggaaaaggaacaattgtggctatccaggattcaggtaacgataagaaattaacggttgcgttcgataaacaaggggttaagtcattattattatcttttgcaaaacttaaaatgatttagtggagatttggaggccaatatggataagattgaaagaataaaagaacttgttgaaaagttaaatagatattcatatgaatattattctttagatagtccatctgtaagcgacaaggactatgatgaaaaatactacgaacttcaagaactagaaagagaaacgggatatgtacttccttattcgcctacattaagagttggggatatagtgctagaaggatttaggaagtatacacataaagcaaggctttggagcttagataaagcgcaaagtttgcaagaaattatagattggcataatagaaatgttaagtttgtagaagaggctcggggtagaggagaaaatctgcctgatctaaagtatgttgttacaaagaaattcgatgggttaacaattaacttaacatataatactgaaggtatacttgaaatagctgcaacaagaggaacaggaagtgtcggtgaagaagttacagcacaggtcaaaacaataaaatcaattccacttaaaattaatagcaatgatattttagaagttcatggagaagctattatgacgcaagaagcgtttaataaatataatgagacttctgatacaccactaaagaacttaagaaatggggctgcaggtgctttaagaaacttaaatgtaaaggaaactgcacgaaggaatctttcggctttcttttatgatgtaggctataaagaaggaactccatttaaaacttatatggaaatgatggagtttataaaacagcaagggctccctgttgatgattatataagggtatgtacttctatagaagaaattgagaaagagataaattatgtaagagatattagatttgatttaaattatgatatagatggattagtaattgcaatagatgatattagaacaagagaattaataggatatacagtaaagttccctaaatgggcgattgcatttaaatttgaagcccaagaagcaacaactaaacttttagatgttgaatggaatgttggaagaagtggtagagttgggccaacagcaatattagagccagtggaacttgcaggcgttactgttaaaagagcgactttaaataatatggatgatattgcgagaaaaggcgttagaataggtgcagaagtcttcgtaagaagaagtaacgatgttataccagagataatggggatagtaccagaatctttagaaggttcagaggaaataacagttccagaagtttgtcccgcttgtggcagtcatttagtgttaaatggggctcattatttttgtgaaaatactttatcttgtaagcctcaattagttaaaactatagttcattatgcttcaagagaagcaatgaatatagctggtttttcagaaagaacagcggaacaattatttgaaaaacttaatattaaatctatttctgatttgtataaactgaaagaagaggatttaataggattagaaaagtttgcagctaagaaagcacaaaatcttctggaagctatcgaaaaaagtaaagattgtgagttatacgcatttatatatgccttaggaattccaaatgtaggagtaaagactgcaaaagatttagttagcagatttaaatctatagaaggcttgaaaaatgcaacatttgaagaactcgttggagttcaggatgtcggagatatagttgctcaaggggttgtggctttctttaaagaggaaaaggtcttacaaacaattgaagaattattagctttaggtgtcagtcctaaatatgaagaaaaagaagtgatagcaagtgcttttgaaggaaagactgttgttgcaactggttcacttaagaattattctagaactgagataaaagataaacttgaaagcttaggagcaaaggttgcgggaagtgttagtaaaaaaacggattatgtaatagcaggagaagctgcagggtcaaaattaaccaaagcagaggaattaggagtaaagatcctttcagaagatgagtttgaagaaatgctaaggaggtagagtatgaaaaaattaataaatttgcttgaatttatatcagcttttataacaagcatcttaataatttgtacttttttgacaacatatcaattttattatgttggccagatttttaattcatacttaccgatacaacttggagtctgtatcactatggcaattttagcaattaggtttcttattaacgagacaggaaaaaagagaatagtatattgtatcttaagctttttaatatcaatttctttaattttctttatgataaatttaattaagtaataaaatattgattaaaatcaacttagcagctgttgatttgcgtcagaagtttttaattaagaaactgactcaaagttatttcaaaacatttgagtcagttttttgattagataaagtaaattgtggaaataattcttaatataaattaaggcaaagggtgtaattatgaaaaaaatttttttctatgcaattatgttaagttttataatattattttgtttaggatttgtgaacaaagaaattaacaatgcatctagtgatgattcacaagaaacgataagttatggtataaatgaaatcccagaagatttagaaaaggttactaatttatctaaacgtcatgaggatattatatgtgcagtaagcaaagggctggtttctaaagatgtggataataaaatagtaccatctttggcaagtgaaattacaaaaagcaaggatggcattcaatatgagtttaaaattagagatgatattttttggagtgacggaagtaaaataactcccaatgatatagctactttttttaaagagctacttaaagaagaagatgaagagaatatacaagcattgcttaatgtttatggagcaaaagaattcagagatgggaaagttgtatatgaaactggagttgcaataaaaggaaatgagaattctgttatcattagattgaataaagcggatgataatttcttaagtgaattgaccaaaccacagtatacactaagaaaatatttaatcatgtggcgtaatatgaaaaatagttatagtacattaatttactctggtgattataagattgattcatttaacaaagatcaggttgtcttaaaaagaaatgagaataataataaaagtggtatagatactattaaaatattaaatgatgatagtgtagaaacatctatggcatcatatgaagtcaaagaaagggatattgtaataaatccaccagaaagtgaacttaataaattatcagagcagaaaaaattaataacacttccagaaacaaaaggaacatatttagtcattaacagtaaaagtaactctattcctcttcaaggaagaagagatatttataatgatgtatgtaaagctacagaatcgtatcaaaattcaaataataaagaatttgaacttgcagagggaagtttttttagggaggataaacaggacctaacaaaattgcaagcaaggaaagttattagcaataaagaaggtgaatggaacaaacctaagatattaacattactatgtgaagatactgatgagaatagaatcttatgtagaacaatcgaagactggtttaaaaataatacaaatataacaataaaatatagtttagtaaaagaagaattcgaagatgaagaattgaaaaaaagatacgatatgattttggttaataataatgccaattcatctgacaaaacagatttttataataactttaaaaaatatctaactgaagaccagaataaattgttggaaaagttattaagcactaagaatagtggagattattcaaacttagaagaaaatctatttgataactacgatattcttccgttggtgttttataatgaaaatatagcaatttctgataagatatcagatctaaaattagatggaaatggtaatataaattttgctacaatccaataggaatagtcttatggctaagattaataattgtctagagcatatgttttcaatacaacgtattataactatccttatatgtaaatcttatattttgatttacatataaggatagttttttgtaatatccatatctatgaatcttaaaactttttcttactgtgtggatgttgtgctttatttttctttagttttttatttttagaagaatgattaattttagtcgtactatcattgtttaatgaagctatattagtattttttttgaaagtattaaaactattaagtacaggttgtttaaagttaacagggtcttctgattttgataagtttaattgtgtctttaagttacttacattactctctggattagatgtagctaatggatttttagagttatcttcttttgtgtcagttattgcagaatcagtatttgcgtcaacagagttatctaaatcagagagtctttctaatcctaatggtgggataaattccataaagtcttcaaccatatctttaagaaggtagataatcataaagaagttgaacatatttttattactatcaaaagaagtccttttagtatttaatgaatcttttttctttgaataacttaagctcttaacaaatacaggagctaaacctgtgcttttaggagtaggtaatactggcattctaaaatatatttcatctaacatatcattagaacgtaggcttaatttcttatatcgttctacctcatctaaggttggagcttcaggccaactcgttaaaagtccgccgtttacgaagaattttctataaagaccagaaataataggtcgtagttctgaaatcctgtcttcttgaaatgaatacataagtaaacataaaagatatagattaatttcaatgcaagagtatttactatctttcttatcagacaattttataaatatatttttatctgtatcatataaactaatcagtttttcagtaatctctttagagaattctttaaaagaaattatttctgtatgtttataagcttccattagacagatagaaaataatgcacaatcatctatagaatcaatatagtaatctttttcttgaaatttagaaatcaaaaagtcacccaagtctaaaattaattctttcgcattttgtgaacacgaatatttataatgaatatttagagcgagaaaaatttgtatacattcactaaacgataaatcatataatacagaattataagttttaaacatatctagaatttcgtttgaaaatgcagcataatctttgctaagttcatcactatcattataatgtgagtatagtaagtaagcagccatcataaaagcttgatctgaaaatttaaatttatcatctttatctattaaagaaaatcccttagaatttccatcagatatattttttttatctacaaataagccttcattatttcgtaagttttcagaatagaattgtaactgctctctagcaaggaatttaaatggtttctcaagagatactatatttctttttccatcactataatgtgaataatattcgcttaattcaagtaaacataaagtcataagagcactagtagaagggcttatttcctttttaaaacttgcctcatcaaaactagggctgcttttactatgaataaataacggtgaagcttttctatataagcataatagtggagaaaaattatttaatatgctaatatcttctataggagatttttttgaagctctagtttgagctaaaattccgcatttagagtttagaaccaaagtctttattgattctttggataagtaaaaaagttgaccactaatttctttttgggaaagactgttcatcctaaaaaatggtcctatatatctcaatgtataacacctctcataaaattctcatcttattcattaatatgaaatttgtaaacaaaaagtacataaaataaaaataaaaggagattttttataatgaaggaaggaaaattagatttcgaggatttgagaaatatcatattaaataataaaacaattaagagaaaggaggtaaaaattagaaatgatgttggagaagattgctctattattgattttggagaatatgaaggaatattttctacagatccgataacaggagcaagtgagaatgttgggaaactagcagtacatattaattgtaatgatatagcatcagcaggtggagagcctataggtattttagttacaatattggcgccaacatcatcaacattacaagagataaacgaaatcatgaaggaaattaatgaagaagcagctaagattaatgtagagattataggaggacatacagaagtaacaagtgcagtaaataagatggttatatccgtaacagtgataggaaagaatttaaaaggtaaatctgtaaaaactgcaggagcgcaattaggagatgacataatagtaactaaaacattagggttagagggcacatatatcttaataaatgaccataaagcaagaatcgagaaaattttatcaaaagaagagatagaatttggaagtaatttaatcaataagctaagtgttcttagagaaggaaaaataggcggagaatttggcgttaattcaatgcatgatataacagaaggaggactacttggaggactttttgaggttgctatggcatcaaataaaggctttaaaatatttaaagagaaaataccaatgttggatataactaaaaaggtttgcgaagaattcaaaatagatccacttaggctcatatcatctgggagtatgcttattactactaaaaatggtggagggcttataaaacttctaaatgaaagtggaattgaggctagtataataggaaagatatgtgagagtggagcattattaatagatgatgatattgaaatagaggttgaagcacctaaaagagatgaattatttaatatatagtaagaatgctaaaagattaatgtgtttcaagtaaattagttggaatcatataaaggttatttaggaatatatagtgttaattaggttacttaaaaatgaaaaagtgataatattattagtgatagaaaagcaaaagaaccagtgggtttaaagcactttatagagtaattatgaaatttgaaatttttattgtaaatgagcaaaaggagatatataatgaaaaaattaatattagctagtaataataagaaaaagattaaagaaatgaaagaaatattaaaagagatagatatagaagttagatcattggaagatgagcgtataaacatagatgtagttgaagatggaaaaacatttgaagagaatgcaaaaaagaaagcaaaggaaatatatgaatatctggtggaaagaaaagatagtaattttattgtattagcagatgattcgggattagaagtaaattacttaaatggggagcctggaatttattctgctagatatgcaggggaacatggaaatgattcaaaaaataatgaaaagcttttaaacaagttaaaaggagttttaaaaagcaatagaggagctaagtttatttgtcaattagctatgttcacagataagggggagtattttaaagttacaggtgaagtagaaggatatattatagaagaactacatggagatgggggatttggatatgatccattatttttctacgagccattagataaaacttttgcagagttaacttcagaggagaaaaatgaaataagtcacagaggaaaggcattaaaggaattaaaaaaggtaattaataaattaatttattagaaagttattccaggtaaataggctctttactatataagagttaaataaataataatgcaggaggagaaattaaattatgttaattgcagttgtaagtgatacacataggatgactaaatatattaatttggctaagaggctaataaaggatgctgatattttgatacatttaggagataacattgatgatgcagaattattggaaaatacttttaaaggaaaagtatatgctgttgcaggtaattgcgattattcaactaagtatccaaaggaatctgttatagaagtgaatggaaaaaagatattttttacacatggtgacctatatggggtaaagagttctatgaataatatctattataggggaagagaattaaatgctgacattgtgttattcggtcatacacatcagcaattagtagagaaagaagatgatatgatattaatgaatccaggaagtatatcattacctaaatttaaagggagatgtataggttttataaacatcgataataatggggaagtagatgcatatttaaaagaaattagggaataatgattaaatatttaaatttattatgaaaaattataaaaaaggtattgacgaaacagatttgatattgtagaataatcattgtcgctgagagatgagtgacaagttgaaaaactagttaagattctcggggtgtggcgcagatgggagcgcgcgtggtttgggaccatgaggtcgcaggttcaatccctgtcaccccgaccatttaaagattaatatttgcgggtatcgtatatcggtaatactccagccttccaagctggaaaggtgggttcgattcccactacccgctccattaaaaattatgatattaatcaaagtggttaaaaaaagccttgacaaagtttgaaggaacatgtaaaataaaaaacgttccgaagaaaaagttcttgacaagattgcttgaatagagtaaaatgaaaaagtctgaaaagcaattaaatatgcgtttttagctcagctggatagagcaacgcccttctaaggcgtgggccaggggttcgaatcccttaaaacgcaccattaaatcggggtgtggcgcagatgggagcgcgcgtggtttgggaccatgaggtcgcaggttcaatccctgtcaccccgaccatttaaaaaataaatatgcgggtatcgtatatcggtaatactccagccttccaagctggaaaggtgggttcgattcccactacccgctccatacaaatttaatatttgtaacataataaaagatatgcgtttttagctcagctggatagagcaacgcccttctaaggcgtgggccaggggttcgaatcccttaaaacgcaccattatggtgaacgtagttcagttggtagagcgccagtttgtggcactggttgtcgtgggttcgagtcccatcgttcaccccatacagggatatcgccaagcggtaaggcaatggactttgactccattattcgtaggttcaaatcctgctatccctgccattattttggttcactagctcagtcggtagagcacatgacttttaatcatggtgtcccgggttcgattcccgggtgagccaccaaattcataaaaatttatgcaggtgtggcggaattggcagacgcactagacttaggatctagcgcctaacggtgtaagagttcgactctcttcatctgcaccaaatgagcggaaatgactcaacggtagagtgccaccttgccaaggtggaggctgcgggttcgaatcccgttttccgctccatttatataagaataaatgaatatgcgggtatcgtatatcggtaatactccagccttccaagctggaaaggtgggttcgattcccactacccgctccaattatgcgtgattagctcagttggtagagcacctgactcttaatcagggtgtccagggttcgaatccctgatgacgcaccaatagtaaacttattatttacttaaaaatttgggataacatgtagttcattccattacagggatatcgccaagcggtaaggcaatggactttgactccattattcgtaggttcaaatcctgctatccctgccattattttggttcactagctcagtcggtagagcacatgacttttaatcatggtgtcccgggttcgattcccgggtgagccaccaaatttataaaaaaacttatgcaggtgtggcggaattggcagacgcactagacttaggatctagcgcctaacggtgtaagagttcgactctcttcatctgcaccaaatgagcggaaatgactcaacggtagagtgccaccttgccaaggtggaggctgcgggttcgaatcccgttttccgctccatttatataaaaataaataaatatgcgggtatcgtatatcggtaatactccagccttccaagctggaaaggtgggttcgattcccactacccgctccaaaaaacaactgatttcagttgtttttatttatataaaaattaatatgcacttgtagttcagttggatagagcgttggacttcgaatccagaagtcgtgggttcgaatcccaccaagtgtaccaaacatgagaaataccaacggtttagagaaatttaaatcgttggtattttgattttacaccactttttacaccgtataaaaatttttacaccttttatctaaaatagtagtatcataaactcatactattctaaaaatagtgtacttagcgtactgaaagatgcaaagcattgctaatactggtatagatgaattaagtgcactaaataattataaaatttagtgtacttttttaaaagaataaaaaaagaaggcttatttagccttcatggatatatataggtcatttaattttgatgtagccataacttttatattttcgagcacatgagtataagtatctaaagtaatagagatatcactatgtcctaataattcttgaactgtttttggagattctccaagttcaaaaagacgtgttgcataagtatgtcgtaaatcatggaatgttctagtttttattattttagaatcgtcacttttattagaattaatagtatcaattattttcttaaatctttttcttacattactgctatccaaatatttaccatcaatagtgcaaaatactaggttattattttcgtataaattagcaagttttaatttatattctgactgctttaatttgtactgcttaagttgttctgataatgcgttaggaatcgatacacgtctattactctttactgttttaggcgtttgtattattacttttgaaggttcacgcccttctctcgatacttcagctacgttctttgcagttttattaacactgacatagcatccttgaaaattgatatcattccatgtaagagcaaataattcaccttgacgcataccagtatttagagcagtgagaaataacatttctaattcatgccccttgatagttgtaataaaccgtcgatgttcatctaaagaaaatggttgaactttgtttgccttattcaatttagtttcttcgctctctttagggagtacaatggctccagtgaaatctctaattaaaatgctattattataagcatatcggatgcatggagctattagtttgtttaatgctaatatacaacttacagttgaacctcttttaattagtgcattataatactcctggatatcggttaaggttatatctttaatcttaattttagataaaggactattttttatatagtttctataaattatttcatacctttccttagtagaaggctttaaagttaaaaactttacatcaaagagccagttagcaaaaaaagtttcaaagacctccttattattaataatgttattctcaagttcatttctaatttttcgtattttttgatcaagttctttgacagttgttgcatatacatctttgggtttatttaagttattatgtctcaatctaaagtaataatattctttaccattgatagttcttttaagataattagtttttgccatatactcaccttttcttaaaatctattttttaatttctattttaattggaaagtcttcacgactatttaactcagttattaactgccaggttgataattcggataaatctcttttgattgttgcaccctcacggtttaatttgttaatgtatgcggaagattgaccatttattaattcatctatagatacttcaagaatttgtgcaatcatatttaatgtttcatagttaggttttcttttgttaagttcataattttgaatagagctagttgcaacacctattgcattagctaattcttcttgagttaatcccttgtcgcgtcttagatctcctatattctttccaaagtccataataatcacctcgaatacattatataacagcacattcaaaatggctatataaaaatacaggaaaattattgacacgttcacaatggcggtgtatattataaataacaatacggtcgaaatggaggtggtaaagtgaatttaaaattatttaggactagaaaaaagtggtctcagtgtgatttatccagtaagtcaggggtatgcacgtctgtaatatctaaaatagagaacggtcatattgacacagtacaagttggcttattaaagaaacttgcattagctttggatattgaagtttcttatttgttataaaaagaagactataaattttaagttagattaaggagaggtatgctaatgaataaaacagaagataaaatagtaatatcaccaaaggaggcaatgccgatcttaggcgttggaagaaatacaatgtatgaagtcttattaaaagataggaactttccggcatttaaaatcgggactaaattttatattaataaagataagctccaagaatgggcagataaacaatgtagataaaaagtgggggaattgatggataaagttatttttaaaactatagagaataaaaatttatttccaatggttcaattgaacaactattctaaaagaccgatagtaaaatggggcaatgaggaaaattggataaaagatgcacaatcactcgaagattttcaaatttcatcaagtaaaagtgtcactggattttctattctaacaggaaagaatagcaatattatggttgtggatttagatagaaaccatggcgaaaactcaattgacggtatagaagtatttgaaaatttaataaaagactttactgaagatgataagcaacaaataaagagtacatttacagttggaacacctaacggtggaaagcatttatattttaaatatcaagaagggctaaaaaataggcctaattatgcaagtggtattgatattagaactgacggaggattgattgtattacctggtagtaaagcaaagataaaaagcggaaaagtcagagaatatacaataataaatgatactaatataaatgaaatgccaaaaggattgtttgataggttcatgcaattggataattcagttaaaattaaaacagttgaatcaataactttaagtactggttatacatataaagaggggactagaaatcaagaactttttaaagaagttattggaatagtaagtaaatcaagtataagagatattacaacaataatgtcaattgcaaaagggctaaacttgcttaaatgtaatccgcctttggatgataatgaagttcaaagtattattggaagtatagcacaaagattgcatccatcttattgtaatgaaaaaggtaatgtaatttgtcattcgttagctaaatacataattcaagaacggccaagctatctaaagggtaatttatggtttatgtatgataatgaagaaggtttttataaatatatggaatttagagaagtgcaaagaatgtattttgattatgcagtaaatgatgaggatatgacgcctgggaaagcaaaaaactttgcagaatcattaatgttaattagtgaagacgcaaaagaaatatatgatgaaaagaattatattaattgtttgaatgggattattcatattaataatggtgagttattagagcataaccatagatataaaacagaagttcagttcaaagctaattttattgaagactatgaaagatggaaagaactatttgataaatcagattttaaaaaatttttatatagtacgttggatgaagatagcttagaaacacttcaagagagttgggggcttatgttatcacctcacgcaaaagaagttcaaaattgttttatatataagggagaaggtagtaatggaaaaagcgttgcatttgatattcaagaagctttaattgatgataacaaacatgtatgtagcattggattgggtgattttggagaaacgtttgcaatatcagtagcagaaggaaagcatgttaatatagttcgtgatgatgaacttagcggaaaaactgttaataaggcttttaagtcaatgtgttgtggagaaccaattacagttaatagaaaaaataaagatttagttagattaggctttaatatgaccatgttttttggacttaacaggatgcctagtgcctcagataaatcaacaggttttttcagaagacctattataattccatttaataattcatttggaactgaacgagaggttataaatggtattagagataaaataaaagaccctcagattgcagataagataattaaaaatgaattagatatagtgtttacttgggcatattacggcttagatagagtgaaaaaaaataattggaaagtaacagtaagtaaattagcagaacaggagatggaagaatatagagaagaagtcgattcggcatacgcattttttaaagcaaagataaaaaaaattcacaataaaaacattagaatccctataggtgaggtctacaagaattataaagattggtgtatattaaatagcataatgccaatgaatccgactcatttaggaaggcaatttaaaagctttggaatcaattcaaaagtaagtaatagtattagatattatctaagcattgaagttgacgatttagaattagtaagaaatacagaaaaatattttaaataaaaaaatagcatttcaaaaacattgaaacactacttatatctgacaatataagtttaccttgtatgaaatgctatgtcaagaaattataactaacggaattaaaatagcaaggggaatacaaaagatgacaataacaataaatagacaaaagaatatgattggatttaaaatatcacataaggtaagaatgaaagaagttgaaaagacactatataactacaaaaattttgggttagaaatagaaagcttagatatacatattaattcaattataaatgacgtaggtatagcgggagtatcatatggagaaagatcaagccctacaaatgcattttcgagtagtgttgagagtgaagtaattaaaagagagaaactattagaaatattgcaaagtaaaaaacaaaggttaattgaattagatcgattaattaaagttgccttaactagtttagaacccgaagaattaaagttagtcgaattaagatatttttcaaagccaaaaaagtcatggattgaaataggaatgacacttgggattgataaatctacatgttgtagattcaatcgaagaatactaaataaactagatcaatttttgatcagtttttcgtcactttcttgcgacttttctgccgcttttataggttgaaaagatggtaatatattaatataaagattatgataataaatctttatgagatcttttaaggaatgtttccttgatctttcacaacatttaacatatggtgttttcctttttcaatcataagcctataggggattttccctataggcttaaatttatatatttattaggagtgtgatagcatgactgaattggcaaagcaaaaaagaaacgcatatatgcgtgagtatagaaagaataataaagaaaaaattaaagaaattcaagaaaaatactgggaacgtaaggctttaggacaagaagaagaatttaaaacagaattaaaggaggatagtacaactatgaaagagttaagaactgaaaaattaacagaaaagctagaaaacatgatagatggggaaacaatatcattttacgttgaagatctagattcagaaatagtcgaagaaatagaaagtaataattagggaggactttataccaatgatgaaagtattagaaacaagagcattaccaccattaatagaaaagagaaatgatttaattgaagaaatggaggctttaaccgataaagcgaaacaagaaaaaagggcgttgaatgtaaatgaaataaatagatttaatgctattaaaggagaaataaaatccattgacgaaacattaaagatcgaggaagagcaaagaagccatattgagtgggtacccggtaagaaaaaagaagggtacactacagatgataaggaattacgagtatttaaagagggcgaaaagatcgatattgaaactagaggtaaggatgttaatttaagcataggtaaattagtcagagccatgagcggaattgaaaagacaggcgaaggggcacaatatcttagagatatgagttcagccacaggatcggttgtaattccacaaaaattagctaatcagatattagataaagcaagggaacaatcagcgatatttggtaagataccagttacagtaatggagaataataatttaacagttgctagaatttcaaaagatgcgtcagcgtcattcgtagccgagggtgatttgatccccgagagttcaacggaattcataggagttaaattagagggtaaaactttagctatgtatgtaccagtaacagagcaattacttgcaagtgctaatatatcagatgtattaatgaatgcttgttcaaaggctattgccgttgcattagataagaatttattatatggtactggaacaggagcggagatcaaaggtattacagcacatgaaaatataaataaagtcgctcatactggtaatgttgattataatatgcttattaagggtataggagcaactaagggggctaatatagtgcctagtgacatagtatataatacaaccgtaggaactgagttatcgatgcttacggatgctaacggtcaatatatagttcctccaagagcaatagataattacacaatatctgaaagtaataacatagcagataatcaagcgctagtttatcatagagaatgtatgttattaggagttaataaggatatacaaatggaatggggttacactcaagatggattccaaagaatgattaaggcattaaggatttatataagatgtgatttaggaatagtaaatgaaaaaggtataagcttagttacttcaacaacttaatattatattaatcggtgtatgggttatctatacacctttttcattttaaattaaaaagagattgggtaagttttcgacgctctaaccaatctcgcacttcaaataggcaaattcctagccgttgcaaaaatggcttagaattattatgttaaatatatcatatgtgagacgtttaaatcaagtattacatagctatttcataattatggtacaatactatatagttacattatgtggtattggaggaaatggtatgagtaagaaatctatgtggaagtggttttttataggtataggaattattttaatgccttttatattagatgagttgtattctacacgtatatatgtgtcacatttaactagttcagaatgggcaagcttcaatggaagttatatcggagcgataatgggaggaataattacacttgttggagtctggataactataggatttactagagaacaggctaaagaagatagacaatttcaactagaccaagcaagaaaagatagagaatttcaaagggaacaagctaatgaagatagaagattatcactagcaccatatttgaaatatactgtttatgaaagagaatcgtcagagaaacataatacagcaatcattcatacagtagacagagatcctaatcagatcatacgtgctacaatagaattgaaaaacattggaatgggaccactgctatatttaagaacgcataatataaaatataataatgtaggattagattatagtttaggatcaattgatattttggaaaagaataataaatggcttatgagaatagttttagaattaagactagatgaaataacaaattcaaatgatgatatgaatacgtctccaagtagaaaagaaggagtattgtcatttacaattgggtataaggatttaattgataatcaatatgaacaagatatagcaatatctatgaatgtgaattatagatatgagtgtgctggaaatgagttgatattaaattgttatagacctacatttagattaagtaaaattggaaatacgaggttaatagaaaaagtttaataatatgtattatttaatttatatcccccctatttttgcttatttcttcataaagatgctgacaccacacagcccccatttagacacacaattttccctaaatgaaattttaagaaaaaggaagtattaaaaaaagcatatgaacgaatattaatatgcttattacgtaaaataaaaccgaaaggtgggtgaacaatgaaaagatttactatcctattcttaatttttttatgtttaacctttagtgtaattagattaatacctgcatttgcagttggaaatatatttacccaaggtatctataaattatctgattttaatttttcaaagactggtatttttactattcaaaatatttctaataccgagggtatgtatctatatattttagatgaaaatcaagttgtaatggaatcaatacgattaagaccaagtacacaaaaactcgatacagtacctatcaagcctaactatatcgttttaataattggtaaaggagaagtatatcttaatccaaaatcatcttaaatagtgattttgtttaacgctttaatttaaaggggatgtatttatgaagaagtttactatcttattcttaatttttttatgcttattctttaatataatcggactaaaatctacatttgcagtttctggcacatttaagcaaggtatttacaacttgtctgattttaatatttcatcaggtaatatttatagtgttagtaatatttcaaagaccgatagtgttcgtgtattcattttcgataaagattatattccaattcaagatataaagttagaccctggttcattaaatgtcgatacaataccgatgacgtctgagtacatatttgtagtaactggtggtggtgaagtaactatcactccaaaatcaccctaaatagtgattttgtttaacttctaatatagtgtattagtaagaataaataactagttaaaatatcgcattattcaaatgaatttgcggtatttttgagaaaatttatactacccaacatttatttataaatttttcactaaatgaaatttaagaaaggagggcggatcatttggtgagaccaagcaaaagcgttgattataaaataatttctaaaattttattttacagattttttgtatatagttgagggcgttgtggtgttgagatgcttaataagattttataggaaatgcggggggaataatgtcagtacaataagtacactaatagtacagaaagaattttgtgtactatggctttgaagtagctatatatctaggtttatttattatagtacattaagtacactaaaaatgaatatttacaggaaataagaaaaaatatattaatgaaaaaaagaagattttatactggaataggttttacaccgttttttacaccgtatagaaggggaaaagataaaagaaaaagtactcaaataaaaaggaaatgacagtataaaaggctttgacaacaatataaaagtatatgggtgtaattctcttatttccagaagtcgtgagttcgaatctcaccaagtgcaccattaataatggtgatgccaacaatttagagtttttctaaattgttggcgttttctatttatagagcataaaaaataaaaatcagggttgggctgtcattacatttttgcctaatttttcgttatatagtaatatattagaagatgatatattgatgagaagtaataataaggttatttagaagaactatgtaaatctttgttatttctattttgctcgataaaatatgtgatggtggaactaaaattctatctagtctgataaagagttattttgaggaaattcagagaaaggactaatagtagacagtaagaatttaggtataatatttgtaagagggaatgaaaaaatatctaatataaacgcgcctatattgtaaaagagtttgttttctgaagtacttactgtaagtcgtgttgaatattaagttgctatatttagagcttgaaggcttaatgttattaatataatgtaggattttcctagttattgagatttttgaaaaagtaatttgagaaatacgcaaactgagtaatgaaggtgtatggaaataatatacaattaactgatagagtaggtggtaggtgataaaatgactaaaagaggagtattaatatttattactttaagtatgattacatttgctttttatgcttataacattaacgtagagtcaagaggatttattaatgagatgattaataaaatagagggaaaaacattaaattcaaaatttcaaacaaaaattaaatctgggaatttatcaactgactataatatagatcaagtgcttaaagatatagataaattgcagttgaatactttaaatgttccagtagttataaatatagatagtagaacttctagtaatatgataatagataaaggaagtgaaaagagggctattgaattacttaaaaaattaagatggaagaaaataaacataatattagaaccttatccatggattgaaaacggaagtgtgggagaaacagattggaaaccagataatatagatgagttttttaataactggactaataatgttttgagaaatttaattaaagatatagctataccatatcatgttgacgcattaaacatagggactagttttgtgtatatggaatctaatgagcagaaaatgtgtgatatggttgattatgttagagatcgatataaaggtctattaacttatagaacaaatttttgggttacagcgaaagatttctcaccagaatttacagataagtataatgaaaaattaaataataggatattttcaaaggtagatttcatttctatagcagcttattttgaacttacttctaatgacacgaatacggtagaaaatttaataagttcattagagcgtagccaaatatatgatagaaaacaaaatataaaacaggaagtaaaaaacttctatgataaatggaataagccaattttctttggagaattaggttttccaagaactaataaggcttctgttcagccacataatccgttgatttctgatattgtaaataataaggaacaggcaaattgctttgaggcatatagaagcgtgtttgagaatgaaccttggaaccttggattctctatatttgcaataggtgaaactagtgacgataaaaagtattatccaagtgaggaaagtgctgaaattataagaaaatggtatacaaaaaatgaaagctaataaaaggatatgtttataggaagtttaataaaaatgtatataggctctaacttataaagtttacagtatatagagttattgtgaagaatatgatattcatgagatgtttttatgattagtatttttttagagcctatatataactttctaaaagaagttataaagcttttagagttttcctatagcaacgaatacatttacatatttatgtataagtagtaaaataaagaatagtgagatgattaaacaaatctaaagataattttattaagaaacgtttataaggaggtacacattgtgagtacaggaggaattagaaggctttcaaaatctatcaaatttgagttgttgatagaatggagctttttttttatttttatggggttcctggtcattatgaacaactacagtaatttattttttcatactggaattgagttatttattaattttatttttgcagtagtatttgtattttcttttaatacttatagaattaataagaacaactttttattaatattggggattggatacttttttgtagcagtactgggaatattccatacgtttacttatactggaatgccttttttaagcagtatggatggattaaagatagcaactcaattttggattgcttcaagatacatgagtgcttttacatgtttgattgcaataatatttaaaataagcctacaaaggaatataaatccgtacgcgctattcatagcttatttttgcataacaatatttttgatatcgtcaatatgtatatttaaagtttttccagattgttatgtggaaaatgtggggttgacctcctttaaaatagttagtgaatatgtattgtgcactgcatttttaataattgctactgtattttttatattcggaaaaaatattgataagtatttatttgtatgttttgaatgttttcttatattatctggagtatgcgaaatgttttttgtaagttatgtagttccgtcagaatttaccactataataggacatactgtaatgattttagctgcatattttttgtacaaaggagttgtagagacaggacttagaaaaccctataatcttatgaatagcgatttatatacggctgataataaagtaaaattatttgaagaaataatatttaataatgaagaatgtcttaatatgataataaacaactcggataatgcaatatttgttattagtgataataagtttatatttgcgaacaagaaaatggctgaactcttgggagcggaaaaggttgaagaaataataggtatagatattaagaaaataattacagatgaagttaaaaatgaagtttataaaagaatagataatgctatatgtaatagattaagtacaccatttgttgaaagcaagttattgagacttgatggtaaacaagtggatattgaagttacaaatagcttttgtatttataaaggacagccttcggctatggttatgcttagggatattacctcaagaaaacaaatacaacttttggaaaacaatattgaggaaaataaaaaattgataagtaaggctacagaacttaataagatgatgacagaattcttttctaatatatcccatgaacttaaaacaccattgaatgtacttctgggtgctgttcagatcttatcattgtcaggcaatgataaaaataagttagaatcaggtaaatacttaaaaacaatgaaacaaaattgttataggcttgtaagacttgtaaataaccttattgacatatcaaaatttgattctggatactttaaaatgaatctccaaaactacaatgttgtaagtgtcattgaagatataacattatcaattgcagattatgcaaataataaggggattgacttaatatttgatacagatgtggaagaaaaggatatggcaatcgatttggataaaattgaaaggataatgttaaacttactatctaatgctattaaatttactgataaaggaggaaaaatattagttaatatgtatgataaaaaagataatattgtaatatctgttaaagataatggcgttggaatgcctaaggataaactaaatattatttttgaaagattcgggcaagtagacaaaacgcttgcgcgcaatagccagggcagtggtataggactatcccttgtaaaatctattgtagatatgcataatggcgatattaaggcttttagtgaacttggaaaaggaagcgaatttgtagtcaagctgcctgttagatctgtcgaagataaactatcatcagatggacgtttatatgaaagcaaagtagaaaagataagtattgagttttcagatatatattattaaatttgtaaatttgcgtaatgatctgtgcagagcacgacatgtaagtgatgatagatatgagtaatatttatttagtattataaagtaaatgaggagtaaataatggagatttttatttataggacttataatgagtggtttgatgataaaccaactgagaccttggagggcgaggtgaattctatatacaatggagttttagttattgatacattggaagacttcaagaagtataggcaaatactttcgttgagaaacaactttgcaattgtttataaactttcatatggttttttatcgtatgctagagaaatcaatatttattcaaattttaattcttggcaaaactctaatccggaaattactattatgggagaagtatgtgaaagtgaatccacagatagtcacttagtctttataactcaagaggggtttaagcagtgcatatctttatgtggaatttatgcagtaacatatgaaaggtaggattatatgtatctacaagatatagatttaagaaaggtgtatagaatatggaagtcaaatttagggccatttcaagggttcttcagaagtacaccgtttgtttcccttcaaacctatgataatttcatattaaaagaagaaaatacatgtcaatgcaatcaaggtgcattgaatataatagtggaaaactgcagcgagaataattttttgattgttgatttgcctattgatgagattttaaatttagcatttttattaaataatgaatattttataaaaccgattctaaatattaatttattattccatccatttggaataatagggacaaaagagaatattaataaattgataaataatggtttgaatttaaagaaaataagtactgaaaagtttattatgctgataccgtatgataggtataatgataattggaagagtgatgacttgaaagataaattgaataatcaatatggaataagtgatgatgatcttccaagtgcggatatactaaaaattcttggatacactaaaataactattttgactataaataagattaaagatgacttacaggattatataaattgtataaatgaggatatagaagtagaagtgataaaggtgaggggataatgaaagatttcaagcagatagtaaagaaaaataagaggaaagcattatccattgcggtagctgctgcattttttgtaagtggaccgcttggatttacaggctgttacaaccctcaaaaagaagatgacgaagaccaagatggaaatggttctaattatagtggcggtgggcacgttggagggtggaatagttttagcagtggttcatctataaatagtgactcttctagcaagagcaaagctagcatatcagattcgtcagttggtaaatcatcaggatactctggatcaaagggcggaagttcatcaagttagcataagcgacaagataattaaaattttaagtatctttatgtatgcaaagaaattatttaggatgtggattactctatggaaaaacagattaattatactgaagatgttttatttaataactatatggtgagttctttaggtgaagagtatgttcactcgcaaataccgttttattttgataaatcaacttatgaaaaaatggtgttttatagtgaagaaataaatagaatttcattaaatgtacttaagaacattaaggaagggcatagtgagttattgaattattttgatgatttcatgtttaaagaaaaaatatttaacttgaaatgcccaatgtctccgatgttttgggccagatatgatacttttagagacgttgatggggatatttattttgcagaatttaattatgataaaccttgtggtcaaaaagaaattgatttagcaggtaaatgtagttttgatggaaatataaatgttagttttataaataatgtagttaaagaattattaaaaatatgtaaagaatatgagatggagaaagaaaaaatagatgtgggatttttgatggatccgtgtcattatgaagaattacatcacagttattactttaaacatattttgaaagatactaatattaacatagtacaagttggacccaataatttatctgtaagagatggatatgtttatgcatattctaattttaagcttaaaataattttaagattgtttcctacagaatttttttatgaaatttctaatataagtgaaatattgaattgtgttgattgtgggaatctattgttaattaacgatcctagagtaattgctattcaggcaaaaggcttcttcgcttatttatggaatctagttaaatctgattcgaagcttctttcaattagggataaagaaataattacaaaatgtattccgtacacagaaatactaaatcaggatgatatacaagatgtaataatcaataaggacagctatgttgttaaatcgtccttgggtcgatatagtcaagaggtttacataggtaagctttatacacaagaaatgtgggaaaataaaattaaaactgtatctaaaagcaataaagtacatgtaaagcagaagttgataaatattagacaagaatatacttatgcgcctgggaataataatatgaatattccagttttggcctttggaaactttggtatttatataatggattataaagtagagggacttttggttagatggagtagagaacttctaactaatgatgattacacatggatgtgcccaataggagttgaaaatttcccggtttatataaaggaatttaatcctaaaaatagaaaagaaatttggaatgaaataatagatgaaagtgtatttaaatataatttcacaggagcttacacaaatatttatgaatacatatcattgaactcactaattttaaaagaatgtgcctataaagaaatgctttcagtaagtagtaagttttgtgagattttaaaaaaaatatatccatatatacaaaaagaaatagaacttttcggtcctatactaggtataccagaagaactttataaattagtttcaacttcatgtgctacatcactttgtgcattaggaagaattgattttgctattgataatgatggaagtttgaaaattttagaatttaattctgagacacctgcaggtttagttgaagcaattggattaaattttataattaaagaaaaacttaatatccaatatcaaaaccctaatgtaaatctcaaggagcatataaaaaaatcattttttaatatattagaagaacttaagaaaataaaaaaagttaaaaatattgctgttgtaacttcttggtattatgaggatatatatacaagcaatttaatagctgaaatattaaaggaattgaatgagtatagtgtgatttttggaaatatatatgatttgaaagtaaataacaataaaatttatctctatgggaatgaaattgatgccatttataggcattatccattggactggttttcttatgaagatgaaatgaaaaaactaattgatcctttaagttcgggacagtacttgataaatcctggacatacacttataactcaatcaaaggctctattcgcagttattcatgagcttgttagaaaaaaattcttttcacgtgatgatgaggagtttgttttgaaatatataccatatacatgtttagagcctgataatgttctttcttttgattatgtaaccaagccatatctttcaagggaaggagcaggtgttatgttaagttatgatgaaatgagtaaagaattagatgatatagtgtttcaagatagaataaatattaaaccgttatattcaaatatttattcaacaatgaaagaggaaagcaaatacttgtttcctgtaataggtacatatataacaggtgatataccatcaggagtatttactagaatgggagattttataactgataaaaatgcaatgtgtgttgctacatacattgagtgttaatataggctttaaatttgattagtgcaatattaaaaatatacaattatagaagaatatgagctaaggctaattatttaaatagtaataaggaggagagatttatgactggtattgtaaacaatattgtagttagtattatttttggattgataggtattatattgctgattttcggatactgtttttttgataaagtactaactaagattgattttaatcaagaattaaaggagaaaaatattgcagttgctatagttatagctggttttatgatttctataggaattataatttcaggagtcgtatcttaaaataatatatttacgaagagtaataattcaaaaaccatcttgaaataaatagatatttcaagatggttttttttgtttattttaaaaacatgaattatttatagcaataaattaaataatagtattaggctaactttaggtgaaacgattggaatcgttattaaatagataattacaattaaaatactaaggaggagagagacgtatgagaaaaattacacttaagaaaattacatcaataatattagtattatttttaagtatatcaacttcattaaataatactccatatagctcagaatttaatataataagtgttctaaacagtaatagtatagaatcatatagtgatgctaggatagaggatgatttttataatgcagtaaataaggaatggttatcaaaggtaaagcttgatgatggatacatttcctatggaacatttgaggaagtatgtgggagagttaatggagatattcttaatataatatcagatatacaaaaaaataaagacagttattataagaatagcgatgagttaaaagttttaaacttatataacaactatctagatatgaaaaaaagagatgaattagggacaaaacccttagagaaatatatgaatcaaataaatgaaattaaggatacgaatgatcttaaagctatattgaaggatgatgaattctcatattttcaacctctaataaacttaggcgtcggtccagactataagaatagtaacattaatgttttatatgtttctagaagtaatcttggattaggaaattcgttttactataaggatactagcgagaagagtcaaaaaataaaacagatatatataaattatatagctaaattacatatgctatatggagaaaatgaagatgtagcaaagaaaaatgcagaaactttttttaatattgagaatgaatttgctaaaaagataccttcttatgaggaggaagctaaagatgaaaaccgaatacagaattcttataatttatatacagtaaaagaattaaataagttaatacctaatgcagatatacctggattattaaataaattaaatattaataatccaaagaaaataatagtggaaaacccagaagaattaaaattagtaaattcacttattagcaaagataatttagaaaatataaaaacttactttaagacaaatgtattaatgaacacagataattatttaacatcgaaacatagagaggcgtgtaatgaattaagaaaagtgctttatggagtagaatgctccgacttagatgaaggctcaggggtgaaatttgttagtggacaattgaatgagattataagtaaattgtatgtaaataaacattttgatgatgaatcgaagaatgatgtggaaaaaatgtcaaaagagataattgaaaactttgaggatagactacaaagtaatacttggatgagtaaatcaactaaagagaaggcgctcagaaaattggaaaatgtcaatgttaaagtgggctatcctgaaaagtggaatgactatagtgatgtagaaataaattcctatggtgaaggaggatcattagttgataacttaataagtatatatacatctcaaagtaaaaaacagttttccaagttaaaccatgaggttgataaaaatgaatggaacatggggccttgtactgtaaatgcctactacaatgctttaaataatgaaattgtatttcctgcaggaatattgcaagcaccattttacgacaaaaatgcaaaaaaagaaaaaaatcttgggggaattggagttgttattggacacgaactgactcatgcgtttgataatacaggtgctcaatttgatgaaactggtaaattaaaaaattggtggaatcaaaatgactataaggaatttacaaataggagtaaaaaggtagtggattattattctaatataaagatggggaatgaaaagaatgtaaatggaatattaaccgtaggagaaaacataagtgatttaggtggtatggcttgtgttttagatattgcaaaaaaaatggaagatcctaatctaaaggatttatttgaaaactacgcgacagtatggagagaaatatcaacgaatgaattaaaagagtatttattaaataacgatccacatgcacctaaaaaggtaagggtaaatgcagttttatctcaatttgaggatttttataaaacttacaatataaaagaaggagataaaatgtatgtaagaccagaagatagagttggaatatggtaaaagaaaaataaaaactgaatattgaaattatgacatagcggcactaattaatgtgaataaataaaaagtatagttaaacatagccatgcgtgtcgctgtgttaataaatgagtaataaaaagaaaaagagagaaaataaagaatatttatcttaaaatagtacaaaataaaacatgagtaataaatatgatgatataatagattttgttgtcacgagagttgatgaaaaatgctagaaatcaaaaaaaagtgttgacattgattttggatgatgataaactaaatgagttgcttgaaggcaacaagatctttgaaaattgaacagaataacataaatacatttaagtaaaccagcaatttttatttgagtaagctaagattaaactttttattgagagtttgatcctggctcaggacgaacgctggcggcgtgcttaacacatgcaagtcgagcgatgaagttccttcgggaatggattagcggcggacgggtgagtaacacgtgggtaacctgcctcatagaggggaatagcctttcgaaaggaagattaataccgcataagattgtagtgccgcatggcatagcaattaaaggagtaat

SEQ ID NO: 31 - DNA, 58138 bp, Clostridium beijerinckii
ttttagaggtacttattgtatgatataattaatatgacttagagaaatgttgaaaaaatgattaaaatactatctaattgtaaataattagaaggaggtgaagtatgtgttaaaaagactattaaggggaattttttctgtaattggattgatactaggatatttcatatctgaaatattacttacaatccctcaggttgataatttgacttacatttcaaccactattactagagttttatttattattattatatcttttatctttggacttatattttatattatttctcctattatatacaaaggaatttctaatttaattgagtatattgaaaagagtatgcaaaaaatgagcataactgaaatcatttatggaacttttggagctgtaattgctttaattcttatgacatttattgcaaaaccaataaatgatataaatataattgggccaattttattaattttattaaatgtgttagctgctataataggtgcagaaataatgattaaaaaaaaggaagatataacagctcttcttgttaatatgaaaaagcctgtaattaaagagaaaaaagttaaagaggtaataaaagagtctataaaaggaattccgaaagtattagatacatcagttataattgatggaagaatatttgatatttgtgagactggatttgttgaaggaccactggttatacctaactttgtattggatgaattaaggcatatatccgattcttctgattcactaaaaagaaatagaggaagaagaggtctagatatattaaataaaatacaaaaagagctagccatagaaactcaaattgtagaagatgattttcctaaaattgcagaagttgatgcaaagttgcttaaacttgcacaaaagatggaaggaaaggttataactaatgattataatctaaataaagtggctgagtttcaaggagtaccggtattaaatataaatgaattatcaaatgcaataaaaccagtagtattacctggtgaagaaatgacaattgatatagtaaaggatgggaaagaatcaagccaaggtgttgcgtatttagaagatggaactatgattgttgttgaaggtggaagaaaatacataggacaaacaacaagtgttatagttacatcagttcttcagacagcagctggacgaatgatttttgcaaaaccaaaagataattaaaagttaaggagagttttctgtatggttagtgcgatagtattagctggaggcagaggtaagagaatgggttatattcaaagcaagcaatatattgatttgaatggtgcgcccattctttattacacgttaaaacagtttatagaaaatgatttaatagataagatcattttagtagtgcctgaagatgaaaaagattattgtaaaagagaagtattaaataaatatggattaaaaatagatgatttagtatctggtgggagcgaaagacaagaatcagtatataacgccttggagaaattagaaaaatctgatatagtattaattcatgatggagctaggccatttgcatctcagaaaataataaatgatgcggttgaatatgctaagcgctataaagctgcagcacctggagttatgccgaaagatactataaaaattaaagatggtaataatttttcagtcgatactttagttagaagtgaacttgttgcaattcaaacgccacaagcttttgattttaacctgatatatgaatgccataaagagataaagaaaagatgtatatcagttactgatgatactagtgtggtagaactttttgggcataaagtttatatttatgagggtgattataaaaatataaaaataactacaccggaagatttaatacttgcagagtattttgtaaaagatatagtatagtgataatgtattgacaggctaaattcaggaagttataatatattaaaataaaatttaattaagattgtaaaacgttgatgaagaatagtagaagccgattatataagagaaaaagtccgtgggctgaaagacttttaaacaggctttgaaccagcttttgagtatagggaaaaactatcggtctaaaaccgttatcattgttagagaacaaatttaggtggtaccgcgatataaagttcgccctaatatatattattaggggggcttttttatttatctaattatatatttttaacctattaattatttgtaaaatctgatattcagattttattacatcatatatataatattattcgcaatttaaccaatattattttaggaggaacaccaaatgaaaatgtctagtatgttaatatcaacattaagagaagtaccagcggaagcagagattgatagccataagcttatgttaagagctggaatgataagaaaaatggctgcaggagtatataattatatgcctcttggattaaaagttttaaaaaaagttgaggatataattagggaagaaatgaatgcagcaggtgcgcaggaatttctagcatcagctattattccagctgaattatggcaggaatctggtagatgggatgcatatggagcagaaatgtttagattaaaagatagaggtgatagagatttctgtttagggccaactcatgaagaagtatttacagatatagcgagaaatgaaattaagtcttacaagcaattacctcttaatttatatcagatccaaacaaagtatagagatgagcgtagacctaggtttggggtgatgagatctagggaatttgtaatgaaggatgcttatagctttgataaagatcaaggtgggctagatttagcttatgataaaatgcatgatgcatatgtaaaaatatttaatagatgtggtttggatgcaaaatgtgttgctgctgattctggtgctattggtggttcaaattcagcagagtttatggttaaatcggaagttggagaggatgatgtggtattttgtggtgaatgtaactatgcagcaaatatcgagaaagcttcatcaccagcagagaaagagttaaaacaagaatttaaggaaataaataaagttgagacacctaatacaaaaactatagatgaattggttaagtttttcggtactaatgaaaaaaaattcgcaaagactatcttgtttaatgcagatggcaaaatagtagcagttatggttaggggagatagagaaattaatgaggttaaggttagcaatgcaattggtgaagtgattaatctagatcttgctagttcagaagatgtaaaaaaggcaacgggagcagaaataggattcgcgggaccaatggggataaaagtagatatgctattagttgatgaagaagtagctaatatgtataactttattgtgggtgctaatgaaacaggttaccatattaataatgtgaattatggaagagactttgaaggtgtaataggagattatagaaacgtaactgaaggtgaaaagtgcccagtttgcggtggtaaggttactattgcaagaggaacagaagtagggcatatatttaaacttggtactaaatattcggaagccatgaatgctaagtttatagatgaagatggaaaagaaaagccatttataatgggatgctatggaattggagttacaagaacaatggcatctataattgagcaacatcatgatgagaatggtatagtatggccattgtctgttgcaccataccatgtttctgtaattcctgttaatgtaaaagatgaggaacaagctagaattgcaaatgaaatttatgaaaaattaacaagtgctggaatagaagctcttttagatgatagaaatgaaagagcaggagtgaaattcaaagattcagaattaatgggaataccaatgagaataacagtaggtaaaaagattaatgagggagaaattgaatttaaacttagagatggagaaatggaagtaatcaaaatagaagatgtttataatataataaaaggtgaatttgagaaaaacaaaataaaactaaaataattttaggaggtaaattaatgaaggtatttaatactttaacaagacaaaaagaagagtttatccctattattcctggcgaagttaaaatgtacgtctgtgggccaactgtatataatttttttcacataggtaatggaagaacatttattgtctttgatactataaggagatatttggagtatagaggatacaaggttagatttgtccaaaactttactgacatagacgataaaatgattaataaagctaatgatgagggaattacagtaaaagagcttggagataaatatataaaagaatactaccaagatgccgattcgttaaagattgaaagagctactgtaaatcctagagcaacagaatatattcatgatataatcaaatttgttgaagagttgattgaagcaggatttgcttatgaagttgatggtgatgtttactatagcacaaaaaaatttgataattatggaaaattggtaggacagaacttagatgatttgcaggttggtgcaagaatatctgttgatgaaagaaagaaagatcctatggattttgcagtgtggaaagcacaaaagccaggtgaacctgcttgggaaagcccttggggacctggaaggcctgggtggcatatagagtgttcgtgcatggcgaagaaattgttgggagatacaatagatattcatgcaggtggtatggatttaagattcccgcatcatgaaaatgaaatagctcaaagtgaagctctaacaggaaaaccatttgcaaattattggctccatgcagcatttgttaatgtagataataagaaaatgtcaaaatcattaaataacttctttaccgcaagagaagttcttgaggaatatagttcggatgcaataaggtttttgatgttgtctggacactatagaatacaaataaattttactaaggaacttttagattcagcaaaatcatcaatagaaagattatataattgcataaataatcttgaaaatttaaaagatgaagtgactaaaaaattaatggatgaagcggaagaaaaatatctaaagtctttagataaatatagagaaaaatttattgagaagatggatgatgattttaatacagcagatgctatttcagtattgtttgatttgactaaagatattaacaataatgtgaatattagttcatcctctgaattatgtgagaaagcagaatcaatggttagagaactaggaaatccgctaggtatacttcaagatcgtattgagaaggatttggaaacagaaattcaggagcttattgaaaagagacagcaagccagaaaaaataaagattttgcacttgcggataaaataagagatgatttaaaaagcagaaatataattttggaagatacaccacagggtgttagatggaaaaagattgattaattaaaggaagggttgcatttttgcaacccttatttaaaggagaattataatgttagatgacttaagaattagaaaattttcaaaagatgaagtaagaatgttgaattcattacaattggcattaataggtgatggtgtgtttgaagtttttattagaaattatattttgactcaaaatacagcgttatctgcaaataagatacatgtgaaggcaattggatatgtaaaagcaaaaagtcaggcgtgtataatgcatgaaattgagaatctcctaaatgaggaggaagaagcggtttataaaagaggaagaaatgcgaaatcacctactgtacctaagaatgcagagataagggattatagaatggcgactgggtttgaagcattaattggttatctatacctagtgggggataaggaaagattagaatttatatttgatagaagtattgaaattattaattagtgtataaaattaaaaaaaggagggtttataatgaatagtaaactgaaaaaaaatattttaaatggcaagtttatggaagataaagataaatctgtaactgaatcaaaaggtaaagctaaaagctataatcaggtaaaaaataaaactaagaaagataatatggtaggaaatgataaatcaacaagcgctattgaagagagagaagatatagttattggaagaaatgctgtaattgaagctctaagaggagaaagaacgatcgaaacactatatatatctaatagtaaattagaaggttcaataaaaactattgttggtttggcaaaagaaaataaaatattaataaaagaagtggataaaagaaaacttgattcaatgtgtggtggagaagtacatcaaggggtaatagcaaaagtaactccatataaatattcagaagtatcggatatattggatttagcagagaaaagaggggaagctccgttcatagttatattggatgaggttgaagatccgcataatttaggatcaatagtaagaactgcagaattatttggagttcatggaattatactcccaaagagaagaagtgcatctgtaagtacaaccgtttataaatcttcggttggagcaatagaacatgtaaaaatagccaaagtaacaaatttaaattcgacaatagaggaactaaaagaaaaggggatctggatttatggggcggacataagagcagaagaatatagctaccaagtagattttggaggaccttgtgcggttataattggaaatgaagggagaggtatttcaaaattaacggtggaaaagtgtgataagctaataaaaataccaatggtcggaaagattaattctttaaacgcatctgtagctggtggtataattatgtatgaagttttaaaaggacgattgaaatagagagaggtatatcgtgaaaactatttttgtagatggatataatgttataaatagttggcctaatttaaaacaaaaaaaagattctagctttgagggtgcaagacaaactcttatagatactttacataattatggagtttttaatgcttgtagaataatattagtatttgatgctcataaagttactgggagtattgaaaagaaagaagaggtaaatagaaatatatcagtagtatttacaaaggatggagaaactgcggatagttatattgagaaacaagtaaatgctctaggaaggaaacatgaaatagttgttgtaacatctgatagcttagagcagcaaacaatttttcaaagaggtgcagttagaatgtcatctttagaattttataatgaggttctaaggatagagaagtctataaaaaataaagcagataagaacagaatttcacagaaaaatataataagtgataatatagatgataggatagtcaaaatattagaagaaatcagaagaagtaagtaaattcagttgactaacataattttactggggtataattgtctaaacgagtggttagtttaatgcagaagagagttgagaataagcagttgaaaggttttttagatttcaaagataaatcagacgaagaaattgttgcgaaagctaagagtggtaatagtagggcgcaagaatatttgatttcaaaatatgagaactttgtgaagtcgaaggctaaatcatattttttaattggagccgacaaggaagacatttatcaagaagggatgataggtttatataaggctatcagagattttaatgcagaaaaatcaacatcatttaaagcctttgcagaaatatgtgtaatcagacaaataataactgcaataaaaacagctactaggcagaaacatattccgttaaatacttatgtctctttaaataagccaatatatgaagaggaatcagagagaactctccttgatgttttggcaggattgaaaatttcagatcctgaagagctaatgattagtaaggaacaaatggattatatcgagaaaaagatttcgaaagtgttatcagatttggaattagaggttcttacttcatacctagatggaaaatcttatcaggagattgcaagtgatttagaacgacattcgaagtcgatagataatgcattacaaagagtaaagagaaaattagaaaaatgcttagatttaaagtgataatttatattgacaaataaaaagaataatagtaaactttataattggtatatcaaagaagatagcaattttgaacgctcacatagctcagtcggcagagcgtcaccttggtaaggtggaggtcgtcggttcgattccgattgtgagctccaaataataaaaaataaaaaaacactaggccaagtttattagaagataataagggaggaaaattataatggcaaaagcaaagtatgaaagaagtaagccacacgttaatattggaacaataggtcacgtagaccatggtaagacaacattaacagcagcaatcacaacagtattagcaaataaaggatttgcagaagcatttaactatgcagatattgataaggctccagaagaaaaagaaagaggaatcacaatcaatacagcacacgttgagtaccaaacagaaaacagacactatgcgcacgttgactgtccagggcatgctgactatgttaagaacatgatcacaggagcagcacaaatggatggagctatcttagttgtatcagcagcagatggtccaatgccacaaacaagagaacatatactactaggatcaagagttggtatccaatatatcgtagtattcttaaataaagcagatatggtagacgatccagaattattagaattagtagaaatggaagtaagagaattattaagtgaatatgacttcccaggagacgatattccagtaataacaggatcagcattaaaagcattagaaaatccaacagatgaagaagcaattaagccaatcatggatttaatggaagcagtagatagctatatcccaactccagaaagagcaacagataagccgttcttaatgccaatcgaagatgtattcacaattacaggaagaggaacagttgcaacaggaagagttgaagctggagtacttcatgtaggagatgaagtagaaatcgttggattaagtgaagaaaagaagaaagttgtagtaactggaatcgaaatgttcagaaagttattggatgaagcgcaagcaggagataacatcggagcattattaagaggagttcaaagaactgatattgaaagaggtcaagttttatcaaaaccaaattcagtacatcctcatactaaatttgtaggtcaagtatacgtacttaagaaagaagaaggtggaagacatactccattcttcgatggatacagaccacaattctacttcagaacaacagacgttacaggatcaatcaaattaccagacggaatggaaatggtaatgcctggagatcacattgatatgaatgttgaattaatcactccaatcgcaatggatgaaggattaagatttgctatcagagaaggcggaagaactgtaggttctggagttgttactaaaatagtagaataagatacatttattactaataggactaagttgtataacttagtcctatttaaaggatgattgacaagtcaaatattctatgatattgtataaaagtgacattttaagcaacgtaaattttagaagtgaataggaactcaagattcctatttaatatataagaaaactggaggtgcagtcatgagaacaaaagtaactttagcatgcacagagtgtaaacaaagaaattatgattcaatgaaaaacaaaaagaatgatccagatagattagaaatgaaaaagtattgtaaattctgtaaaaagcacactcttcatagagaaacaaagtaattagccgaagtaatgacatatagttattaaatttaaggatgtgaagatatgtcagcaaagaacagtgtgaaaactgaaaaagctattaaaagtaatggtttgtttggtttttttcgagaggttaaggtagaggttaagaagataacttggccttcaaaagatgagacaaagaaagcatttgttgcagttattgtgttcacactaatgtatactatattagttggtggattggattctattttcaataacctctttaaaatgattttaaatttcaagtaaaagggaggtttgggcgattttatatcgcctgacgaatatgagtgatagagcacgatggtatgtagttcatacatactcaggatatgaaaataaagtaaaagcaaacttagaaaaagcaattgaaaatagaaatcttgaagcattaatccatgatatacaagtacccatggaagaagtggttgaagaaaaagatggaaagcaaaaagtctcattaaagaagaaatttcctggatatgtgcttgtaaaaatgttaatgggagatgaagcttggtacgttgttagaaatactagaggcgtaacaggatttgtaggcccaggatctaaaccagttcctctttctgatgaagaagtggaatcaatgggagtgttagaagttcctgttgagattgacttagaggtaggggaaagtataagaattatctctgggccattgagagattcagtagccacaatacaagagataattccggataaacgcaaagtgaaagctttagtggagatgtttggcagagaaacacttgccgaattagactttaatcaagttgaaaaattagtttaactataatgaactaattttaattaagtgggagaactaaaaagagttcgttataccacagtaataggaggaataacaaaaatggctaagaaagtaactggaatgattaaacttcaacttcaagcaggtaaggcgacaccagctccacctgtaggtccagctttaggtcaacacggtgtaaatataatgggattctgtaaggagtttaatgcaaaaactgcaaatcaagctgggtatataataccagtagttattacagtttaccaagacagatcttttagttttatattaaagactcctccagctgcagttctaattaagaaagaaataggattagaaagtggttctggagtacctaataaaacaaaggttggtaaattaactcaagatcaacttagaaagattgctgaaactaagatgccagacttaaatgctgcaaatgttgaatcagctatgagaatgatagcaggaacagctagaagtatgggcgtaactattgaagagtaattcgtaaaaataagtgggaggtcaaaaccgttaacaccacagaggaggcaaattatgggaaaaaaatacattgaaagtgcaaagcttatagataagagtgcattatataatccagtagaagcattagatcttacattaaagactgcaaaggcaaacttcgatgaaactatcgaattacatgtaagacttggagtagatccaagacatgcagatcaacaagttagaggtgcagttgtattaccaaacggaacaggtaaaacagttagagtacttgtttttgctaaaggagataaggctgcagaagcacaacaagcaggagcagatttcgttggagcagatgaactagttcaaaaaatccaaagcgaaaactggtttgattatgacgtagttgttgcaacaccagatatgatgggagttgtaggtagaattggtagagtgttaggacctaaaggactaatgccaaatccaaagtcgggaacagtaacatttgatgttgctaaggcaattgaagaaattaaagctggtaaagttgaatatagagtagataaaacagcaatagttcactgtccaattggaaaaaaatcatttggaactgaaaaattaaaagaaaactttactgcattaatggaagctttagttaaagctaaaccagcagcagcaaaagggcaatacttaaaatcagtatctgtttcaagtacaatggggccaagtgcaaaagttaatcctacaagagctttagattagtattgacttgagtgaaattatgtagtataatttcaaatgttgtaaaaagaaaatattttttccgtagacagtgggtgcgaaagcgtaaagataactgcccgcctaggtgtatataatagattatattataggccttccatgtctgcggaaggtcttttttaataaaagaagcagtttataactgtgaggaggtggactacagtaatgaataaaaacagacaacttaaagaagcaaaagttgctgaaattaaggaaaaattagaaaaatcaaaagctgttgttcttagtaagtatcaaggtctaaatgttgaagaagatacagctcttagaaaaagtttaagagacgctggagttgaatacaaagtatataaaaatactttagtagctttagcagctaaagaattaggcttagatggtatagcagaatatttagaaggaccagtatctgttgcatttagttatgaagatgtaacattagctgcaagacttttaaatgactttgctaaagatcataagaagttggaattaaaagctggtatcatagaaggagaaatctatgatgaagctaaaattaaacagcttgcaacaataccatcaaaagaagttcttattgcaaaacttcttggaagtatcaagtctccaatatcaagctttgcacgtgtattaagtgctattgctgatagcaagggaactgaatctgcagaataatttaaagattaattaaaattttaagaaaaaattcggaggtgctattaaaaatgacaagagaagaaataattcaagcaataaaagaaatgagcgttttagatttaaatgaattagtaaaggcttgtgaagaagaatttggagtaagtgctgctgctgctgttgtagctggtggagctgtagctggtggagctgctgctgaagaaaaaactgaattcgacgtagtattagcaagcgcaggagataacaagattaaagttatcaaagtagttagagaaataacaggattaggattaaaagaagctaaggaaatagttgatggagctcctaagacattaaaagaaggcgtttctaaagacgaagctgaagatatgaaagctaaattagctgaagtaggagctactgcagaagttaagtagtttgttttaaagaaaaaggtgctttatagcaccttttttaaactaaatttataaagctatataaaatgcttgttaggtaaataggtattttatatagctttataactaaaaaggattctttaataatatttattgacaagaaaaatatcctatgatattataatataatgtattattctctatggaatactatatatttatagtggaaataaggagtataatctggtgaataatggttatactatagaaagacgctgtccgaaagcaaagtccttagggaaagtatgcttttggctattttagtttattttatacaaggggtgaaaattcatggtacatcctgtccaagttggaaaaagaacaagaatgagtttcggtaaggttaatgatgttactgaaatgccgaatttaattgaggttcaattagattcatatgaatggtttttaagagaagggctgcatgaagtttttgatgatattaatcctatcacaaacttcacggggaatttagtacttgagttcgtagactataaacttgatatggaaaatatcaagtattctgtcgaagaatgtaaggaaagagacgcgacttatgctgcgccattaaaagtttcaatcagattgcagaataatgaaactggtgaaattaaagaacaagaagtatttatgggtgacttcccattaatgacagagcaaggtacctttgtaattaatggtgctgaaagagttatagttagtcaattagtaagatcaccgggtgtatattataactactctatagataagagtggtaaaaagttatattcatcaactgttatccctaatagaggagcatggttggaatacgaaacagattctaatgatgtaatttatgtaagaattgataaaactagaaaattgtcaattagtatattagcaagagctatgggattaggcagtgatcaggagttgctagatttcttcggcgaagaagaaagatttagagcttcaatagaaaaagacaatactaaaactaaagaggaagcactacttgaaatatataagagattgagacctggtgaaccaccaacagtagatagtgctatatctttaattgatacattattctttgacgcaaaaagatatgatttatctagagtcggaagatataaatttaataaaaaacttgcattaaatctaagaatagctaaccaagtagcagccactgatattgttaatccacaaactggagaaataatggtggagaagggtcagaaaataagtagattagtagctgaagagattcagaatgcaggtgttaaatcggttgatgtattaatagaagataaagttattagagtaattagtaataactttgtagatttgaagaaacaagtttcttttgatatttcagacctagggataaaagaattagttcattatcctactttgaaggaaatattagataatttttctgatgaagtaagtattaaagaggaaatcaagaagaatattagtaaacttattcctaaacatattataagagatgatatatttgcaactataagctatgaactaggattaacttatggaataggttatgttgatgatatagatcatttaggtaatagaagattgagatctgtaggggaattattgcagaaccaatttagaattggtctatctagaatggaaagagtagttaaggaaagaatgactattcaagatcaagaagctataactcctcaaatgttaattaatataaggccggtagcagcagctatcaaagaattttttggtagttcacaattatcacagttcatggatcaaacaaatccattatcagaacttacgcataagagaagattatcggcattaggaccaggaggactttcaagagaaagagctggttttgaagtaagagacgttcaccattcacattatggtagaatgtgtccaattgagacaccagaaggtcctaatataggtcttataaattcgttagcaactttcgcaaaagttaatgagtatggatttattgaaacgccatatagaattgttgacaaagaaaatggaagagctacagatgaaataagatatttcactgctgatgaagaagatcaatgtttaatagctgaagcaaaggagcccatggatgaaaatgggtactttataaataaaaaggtcagagtaagacatttagaggatatattagttgttccaacaactgacgttgatttaatagatgtatctgcaagacaaattgtatctgttgcaactgcgatgataccattccttgaaaatgatgatgcatcaagagcgcttatgggttcaaacatgcaacgtcaagcagttccattattaagtcctcaagcgccaatagttggaacaggaatcgaatttaaagctgctgttgactcaggggtattaccaaaggcaaagaatgctggagtagttacttatgtttcgggtagtgagattcgtgttaagagagactcagatggtggcacagatgtatataaattattaaagtttaagagaagtaactcaggaacttgtattaatcaaagaccgatagttgatacgggagaaatagtatacaagaatcaagttattgcagatggtccatctacagatttaggtgaaattgcattaggtaagaacatcagaatgggattcataacttgggaaggttataattacgaagatgctatgttaatttcagaagaattggtcagagaagatgtctttacatctatgcatatagaagaatatgaatgtgaagctagagatacgaagctaggaccagaggaaattacaagagacataccaaacgtaagtgatgatgcacttaaggatgtagatgacagaggaatcatacgaatcggtgcagaagtgagatcaggagacatattggttggaaaagtaacgccaaaaggtgaaactgagcttacagcagaagaaagattgttaagagcaatttttggtgaaaaggcaagagaagtaagagatacctcattaagagtacctcacggtgaagctggaataatagttgatataaaagtatttacaagagaaaatggggatgaattaaacccaggagtaaatgaacttgtaagatgttatattgcacaaaaaagaaaaatttcagttggggataaaatggcaggacgtcatggtaataagggggttatctctagaatattaccagaagaagatatgccattcttaccggacggtagacctcttcaaatatgcttaaatccattaggagtaccttctcgtatgaatataggtcaggtacttgaagttcacttgggttgggcagctagccatttaggatggcatatagctacacctgtatttgatggtgcaacacaacctgaaatcacagaatgcatgataaaagcaggatttagagaagatgctaaaactatattatatgatggtagaactggagaaccgtttgataatccagtaactgttggtataatgtatattttaaaacttcaccatttagtagatgataagattcacgctagatctacaggaccatattcattggttactcaacaaccattaggaggtaaagctcaatttggtggtcaaagatttggtgaaatggaggtttgggcattagaagcatatggagcggcacatacacttcaggaaatattaactgttaagtcagatgatgttgtaggtagagtgaagacatatgaggctatagtaaaaggggaaaatatacctgaaccaggagtaccggaatcgttcaaagttcttattaaagagttacaagcattgtgtctggatattaaagtattaaatgatgcacatgaagaagttactttaaaagaatttgtggatgaggatatggcaaatttagaagttaatatagaaggcagtgaagagatcatggtgccggaaccagatgtattagaggacgatagttatgatcaaaacactgatgaagacatagatgaaattgattatgatgagagtgtcgatatagctgatcttgaaactgaattagaactagatgattttaatgatgaacactaattttgaagggaggatttacccttgtttgaattaaataattttgatgcaatacaaattggtttagcatctccagaacaaataagacaatggtcaagaggagaagttaagaaaccagaaactattaactatagaactttaaaaccagagagagatggtttattctgcgaaagaatttttggaccaatgaaagattgggaatgtcactgtggaaagtacaaaagagtaagatataaagggatagtttgtgatagatgtggagttgaagtcacaaaagctaaagtgagaagagaaagaatggggcatatagaattagctgccccagtatctcatatttggtactttaaaggaattccatcaagaatgggattgattttagatatgtcgccaagagctttggaaaaagttttatactttgcatcttatatagtgatagatccgaaggaaacaccactattgaagaagcagcttcttaatgaaaaggaatatagagaagctgtagataaatatggagatgaaagctttgtagcaggcatgggagctgaagcaattcaagatttactaaatgaaattgatttagtaacttcttcaaaagaacttaaagaagaattaaagcaaagttcgggacaaaagaaagttagaattattagaagactagaagttgtagaatcgtttagaaaatcaggcaatgatccacagtggatggtcataaatgtgataccagtaataccaccagatttaagacctatggttcaattagatggaggaagatttgcgacatctgatttaaatgatttatatagaagagtaataaacagaaataacagattaaagaagttattagatttaggtgctccagatataattgtgagaaatgaaaaaagaatgcttcaagaggcagtagatgcacttattgataatggtagaagaggaagaccagtaactggacctggaaatagacctttaaaatctctttcagatatgttaaaaggtaaacaaggtagatttagacaaaacttacttggtaagagagttgactactcaggtagatcagttatcgttgttggtccagaattaaaaatgtatcaatgcggacttcctaaggaaatggcaatagaattatttaaaccatttgttatgaaaaagcttgtacaagatggaatagctcataatataaagagcgccaagagaatggttgaaagagtattaccacaagtatgggatgtattggaagaggtaattgcagatcatccagtattacttaaccgtgcacctacattgcacagacttggtattcaagcattccaacctgtattagtagaaggtagagcaataaaacttcatccgttagcatgtacagcttataacgctgactttgatggggaccaaatggctgtccatcttccattgtcagtagaagctcaagcagaagctagattcttaatgctagctgcaacaaatattttgaagccatcagatggtaaaccagtttgtgttccaacacaagatatgattcttggatcatactatttaaccatggataagaatggtgcaaaaggggatggaatgacattctcaagcaaagatgaagctataatggcatatgaagttaaagaaattgatatacatgctcaaataaatgttagaatgtttagagaaattgatggtgtagttaagtctaagataattaaaactacagttggaaagattatatttaatgaatcaattccgcaaaacttgggattaatcaatagagaaaatgaagaagatatgttcaatttagaagttgatttcttagctacgaaaaagtcattaggaacgataatcgatcaatgttacatgaagcatggtccggttaaaacatctataatgcttgataatattaaagcattagggtatcattattcatcaatcggcgctgtaacagttgcttcatcagatataatagttccaaaagtgaaatatgatttacttaaggaagcagatgaaacgatcgaaaagattgaaaagatgtataagagaggtttcatatctgatgaagaaagatatgaaagagttatagaaaaatggactcagacaactgaagatgtagccaatgcattaatggatagtcttgataaatttaatccgatatatatgatggctgattctggagccagaggatcaaaatctcagattaagcaattagctggtatgagaggtcttatggccagtccgtcaggtaagattatagagttgcctataagagcatcatttaaagaaggattagatgtaatagaatatttcttgtctactcatggagctagaaaaggtaatgcagatacagcgttaaagacggcggattctggatatttaactagaagacttgttgacgtttctcaagatgttattgtaagagaagaagattgtggtacagatgaaggaatatttgtaagtgaaattaaagaaggtaatgaagttatcgaagaattaagagaaagattaattggtagatatacagcagaagatattgttgatccaaaaactggtgatatagtacatccaaaaaatgaatatatggatccgtatgcagctgacaagatagtttcagcaggaattaagaaagtaaaaattagatctgtgttcacttgcaaatgtaaagttggtgtgtgtgctagatgttatggtatgaatatggcaacagctaaaaagattgatattggagaagctgttggaataatagcagcacaatcaattggagaaccaggtacacagcttacaatgagaacattccataccggtggagttgcaggagcagatatcactcaaggtttacctagagttgaagaactatttgaagctagaaagccaaaagggcttgcaatagtaagtgaaattgctggtactgcgagaatagaagagacgaagaagaagagaacagtaataattatgggtgctgatggagaagaacgtagttacgatataccttttggatcaagattgagagtcaatgaaagtgattatattgaagctggtgatgaaattacagaaggttcagtaaatcctcatgatataatgagcataaaaggaatagatggagcaagaagatatttactttcggaggttcaaaaggtttatagactacaaggtgttgatatcaatgataaacacttagaagtagttgttagacaaatgactagaaagataaaaattgttgactcgggagatacagaattattaccaggaactatgattgatatgtttgatttctatgaagaaaatgctagagtaagagaatttggtggagaagaagcaaaaggagaacaaactctactaggtataactaaggcagcattagcaactgatagttttctatcagcagcttcgttccaagaaacgacaagagttctaacagaagcagcaattaaaggaaaagttgatcctttagttggattaaaagaaaatgtaataattggtaagcttattccagctggtactggaatgatgagatatagatctttaaaggtggaaacagatagtgaattggttgaagaaactattggagaaactgttgaagaataagcatgtattatattgacatgtgtaaaattaaatgataaaatacaatttgtgtgattttaaatgtgaaatcacacaaattaatgtgaatatatcattttataaaagtaaatttatagcttaatacataggatattgatttattgtgtaaaatttaggtatatttgataagttgtatgatatactaattcatataacttgataaattagtgtttatcttaattttaaaatagataaataaatttcaggaggtgaaaaaatgccaactattagccaattagtaagaaaaggcagaaaaacagcagtagttaaatcaactgcaccagcacttaaagagtgtcctcaaaaaagaggtgtatgtacagtagttaaaacaacaactcctaaaaaacctaactcagcgttaagaaaaattgctagagttagattaacaaatggatttgaagtaactgcatatattggtggagtaggtcacaacttacaagaacatagtgttgttcttataagaggtggaagagttaaagaccttcctggtgttagataccatatcgtaagaggtgcgctagactgcgctggagtagctaacagattacaaggaagatcaaagtacggtgctaagagacctaagaagaaataggaattttaacaaagaatagtgcttatcttcaacagaaattatagattttattttgagtttatatacatgtaaaagatgtagcactttacggtatgaaaaataccgagtaccgatgaacttaaatttaaaatgttaaggagggaagaaaagtgccaagaaaaggacatatcgcaaaaagagacgtattaccagatccagtatacaattcaaaggttgttactaaatttataaatagtataatggaagatggtaagaagggtgtagcccaaaagatatgctatgaagcatttgaattaatagcaaaaagaagtggaaaagaagctttagaagtatttgaagaagctatgaacaatgtaatgccattactagaagttaaagctagaagaataggtggtgctacttatcaagttccaatcgaagttagaccagaaagaagacagacattaggaataagatggatgttaatagcagctagaaaaagaggcgaaaagctaatgagtgaaagagttgctggtgaattattagatgcatctaataatacaggagcagctgttaagaagagagaagatactcataaaatggcagaagctaataaggcatttgctcattacagatactaatatctataaaactgttttggcttatgctaaggcagttttgtcaaattaaattatattttactcattgagaggaggacaaataaatggctagaaaatatcctttagataaattccgtaacttcggtataatggctcatatagatgctggtaagacaacaactactgaacgtatattgttctatacaggagtgagtcacaaaataggggaagttcatgatggtgaagctacaatggactggatggttcaagaacaagaaagaggtataacaattacttcagcagcaacttcatgtttctggaaagaacatgaacttaatattatagatactcctggtcacgtagacttcacagttgaagttgaaagatcattaagagtacttgatggagctgttacagttcttgatgcaaagagcggtgttgaaccacaaactgaaactgtttggagacaggcggataagtatggtgtgccaagaatgatttatgtaaataaaatggatgcaacaggtgctgatttctttagatgtattcaaacagttaaagatagattaaaagcaaacgcagttccgattcagattccagtaggtagcgaacaaggcttcaaaggaatggttgaccttataaagaatgttgcttttatattctatgatgatcttggaaaagatatgagagaagaagctataccagctgaatatgctgatcaagctgaagaatacagagcagcaatgatagaagctattgctgaaacagatgaagaattaatggaaaagtatttagaaggtgaagaacttacaattgaagaattaaaagctgctttaagaaaagctacaattgctaacgaaatatatccttgtatttgtggttcttcatacaaaaacaaaggtgttcaagaaatgattgatggagttgtagattacttaccatcaccattagatgttccagcaataaaaggaacaacattagatggagaagaagatcatagaaattcttcagactctgaaccattatcagctttagcatttaaaatagctactgatccatttgttggtaaattggcatttacaagaatatattctggcgtaatgcagagtggttcatatgttcttaactcaacaaaaggtaagaaagaaagaatcggtagacttgttaagatgcattcaaattcaagatcagaagttgaatcattagaagcaggggaaattggtgcagtaattggattaaaaaacactacaacaggtgatactttatgtgcagaaaatagtccaataattcttgaagctatggagttcccagaaccagttataagagtagctattgaaccaaagacaaaagatgctcaagaaaaaatgggtatggcattagctaaattagcagaagaagatcctacatttaagacttggactgatacagaaacaggtcaaacaattattgcgggtatgggagagcttcacttagaaataattgttgatagacttcaaagggaatttaaagttgaatgtaatgttggagcacctcaggttgcttataaggaaacaattagatcagctgttaaagcagaagctaaatatgctaaacaatcaggtggtaaaggacaatacggtcatgctgtaattgaaatggaaccaactgaaggcgaatatgtatttgaaaatgctgttgttggaggagctattcctaaggaatacataccagctattgatgcaggtattcaagaagcatctaaaaatggtataattgcaggctataatgttattaacttcaaagttaaattagtacacggttcataccatgaagttgactcatctgaaatggcatttaaaatagcaggttctatggcatttaagaatgcaatggctaaagcaagccctgtacttcttgaaccaatgatgaaagttgaagtaacagttccagaagaatacatgggagatgttatcggagatatcaattcaagaagaggtataatggaaggtatggaagctcttaatggagcgcaagttattagagcgtttgttccattatcagaaatgtttggatatgctactactttaagatctagaactcaaggtagaggagtttactcaatggtatttgatcactatgatgaagttccaaagaatattcaagaacaaattgcaggtagcagagctaaataaagagtaatataaagtttttatcatattgtatattaaattattttacggagcatataatgtgttttaataattttcatataatatggtaaaaaacttgaataataaatatagatattaaaatatctataagttataatatttacgaaaagattctttaaattatgtctatcaagggaggaaaattataatggcaaaagcaaagtatgaaagaagtaagccacacgttaatattggaacaataggtcacgtagaccatggtaagacaacattaacagcagcaatcacaacagtattagcaaataaaggatttgcagaagcatttaactatgcagatattgataaggctccagaagaaaaagaaagaggaatcacaatcaatacagcacacgttgagtaccaaacagaaaacagacactatgcgcacgttgactgtccagggcatgctgactatgttaagaacatgatcacaggagcagcacaaatggatggagctatcttagttgtatcagcagcagatggtccaatgccacaaacaagagaacatatactactaggatcaagagttggtatccaatatatcgtagtattcttaaataaagcagatatggtagacgatccagaattattagaattagtagaaatggaagtaagagaattattaagtgaatatgacttcccaggagacgatattccagtaataacaggatcagcattaaaagcattagaaaatccaacagatgaagaagcaattaagccaatcatggatttaatggaagcagtagatagctatatcccaactccagaaagagcaacagataagccgttcttaatgccaatcgaagatgtattcacaattacaggaagaggaacagttgcaacaggaagagttgaagctggagtacttcatgtaggagatgaagtagaaatcgttggattaagtgaagaaaagaagaaagttgtagtaactggaatcgaaatgttcagaaagttattggatgaagcgcaagcaggagataacatcggagcattattaagaggagttcaaagaactgatattgaaagaggtcaagttttatcaaaaccaaattcagtacatcctcatactaaatttgtaggtcaagtatacgtacttaagaaagaagaaggtggaagacatactccattcttcgatggatacagaccacaattctacttcagaacaacagacgttacaggatcaatcaaattaccagacggaatggaaatggtaatgcctggagatcacattgatatgaatgttgaattaatcactccaatcgcaatggatgaaggattaagatttgctatcagagaaggcggaagaactgtaggttctggagttgttactaaaatagtagaataagatacatttatatttgacggtaaaagcaaggtataatttccttgcttttattttatgaattatataatttagttagtatttcataataaaatcggattgttatcacaaatatttatttattatcgcaaaataaatcataacaaactgatataaaatttttagtaaagataattaaaaaatcacccaatataaggaattaaaaaaaaataggaaaatgtaaaaaaaagcttgaaaagacaatataacaatagtataattaagaagttgcatagcatacagcgaggattcaagaggttgccggacttccgggtaattcttgatgagtaagtttggatctagaatccgacgacagggattctgtattaggtttggatatcacgaaacacctggaacagtttacagaatagccgctgttgtgcgttagaagtaaaacgtacataaaaggagggaaatgaaatgtcaaagcaaaaaataagaattagattaaaggcttttgatcatacaattttagatcaatcagctgaaaaaattgttgaaactgcaaaaacatcaggagctaaggttgtaggaccagtgccactaccaactgaaaaagatgttgttacaatattaagagcggttcacaagtacaaagattcaagagaacaatttgagataagaactcataagagattaatcgatattgttaatccatcacctaaaactgttgatgcattaatgagattaaatcttccagcgggtgttgatatagaaatcaagctttagtactggaaataatataaaaacggctagttatgattgttaacagtccgctaattagtttgggaggtgtaaatacatgaaaaaagctataattggaagaaaagttggaatgacacaaatttttgatgaaaaaggaaaagtgattcctgtaactgtagtagaagctggcccatgtgttgttgttcaaaagaaaacattagaaaatgatggttatgaagcaatacaagttggtttcgatgaaataagagaaaaattagctaataagccaagaaaaggtcactttgctaaggctggagctactttaagaagaactcttaaagaatttagacttgacgatataagtcaatacgaagttggaaatgaaataaaagctgatgtatttggagcaggagataaagttgatgtatctgcagtatctaagggaaagggtttccaaggatcaattaaaagatggaatcaacaaagaggacctatgactcatggttctaagttccatagagcgccaggttcaatgggagcttcatcagatccatctagaacattcaaaaacaagagaatgccaggacatatgggatctgtaaatacaacagtacttaatttagaagttgttaaagtaatagctgaaaagaatttaatactaattaagggtggaatcccaggacctaataaaggtacagtagtaattaaagatacagttagagcttaatttctttgaagaaaggaggaaataaaatgcctacagtaggagtatttaataaagaaggaaataaagttgcagatatggaattaaatgaaaatgtatttgcggcagaaattaatgaatatgcattgcaccaagtagtagttgcattattagctaacaaaagacaaggaactcaatcaactaaaactagatctgaagttagaggaggcggaatcaagccttggagacaaaagggtactggaagagcaagacaaggttctatcagatcaccacaatggatcaaaggtggaattgtattcgcaccaaagccaagagactacagagtttcagttccaaagagtatgagaaaggttgctatgaaatctgctttaactagcaaggttcaagataatcaaatgatagttcttgattcgttaaattttgaagcaccaaaaactaagagtatgatagaaatgctaaaggctttagaagctaataaagcattaattataacagctgaatcaaatgaagttgtttataagtcagcaagaaacattcaaggaataagtgttattcctgcaaacaacatcaatgtatatgatttattaaaatatgaaaaattaatcataactaaagatgctgtatcaaaaattgaggaggtgtacgcataatgaaattaacaagccatgatataataagaaagccaatcataactgaaaaaagtatggcgtctatggccgaaaaaaggtacactttcatagttcatgttgatgctaataaatctcaaataaagagagctgtggaagaagttttcaatgttaaagttgaatctgttaacactataaacggcttaggtaaaactaagagaatgggcgtacatgtaggtaagagatcagattacaagaaagctatagttacattaactgaagaaagtaatggaattgaattcttcgagggaatgcaataatagtagaataaagccattattggtgatcaacaccagagaagcttgaagaaggagggaattttaaatggcagttaaaaagtttaaccctattacaccagcaagaagacaaatgactatgccaacttttgaagaaataacttcacaagaaccagaaaagtcacttcttgttgcattaaagagtaaagcgggtagaaatgctcaaggtaaaattactgttagacatcgtggcggcggtgttaagagaaaatatagaataatagactttaaaagaaataaagatgaaatcccagcaaaggttgcaactatagaatatgatccaaacagatcagcatatattgctcttgttatatatagcgatggagaaaagagatatattcttgcgcctgcaggattaaaagttggagatgtaatagagtctggagttaatgctgatatcaaacctggtaatgcacttccattaaagaacataccagtaggtacagttattcacaatatagagttacaaagaggtaaaggtggtcaattagttagagcagcaggtggatcagctcaattaatggctaaagaaggagattatgcaactcttagattaccatcaggtgaaatgagatatgtaagaatcgaatgtagagctacaataggaacactttctaatgcgacaaacgatattgttaatatcggtaaagctggtagaaagagacatatgggatggagaccaacagttagaggatctgtaatgaaccctaatgatcaccctcatggtggtggtgaaggtaagtctccagttggtagaccaagtccagttactccatggggtaaaccagcacttggatacaaaactagaaagactaagaaatattcagataaatttattatcaaagatagaagagctaagtagtttgaggagaatagtaagttctcttcacaacttagaccttagtgtttatgaagggaggcatattagtgagtagatcaacaaagaaagcaccttttgttcatgagggactttttaagaaaatagaagaaatgaatggtaatggagaaaaaaaggttgttaagacttggtcaagaagttcaacaatttttccacaattcataggtcatacaattgctgttcatgatggaagaaagcatgtaccagtatatatatcagaagatatggttggccataaattaggtgagtttgtattaactagaacttataaaggtcatgacgataaaacatcaaaaagatagcctggaaaggaggatcataaatggaagctagagctatagcaaaatatattagaatgtctccaacaaaggtaggagtaattcttgatttaataagaggaaaacaagttaacgaagcttttgctattttacaatatactccaagagaagcagcggtagttataaataaagttttaaaatcagctgttgctaatgcagaaaacaatttggaattgaatgctgataacttatatgtttcagagtgtttcgttggtcaaggatcaacattaaagagattccaacctcatgctcaaggtagagcatttaaaatattaaagaaaacaagcaatataacagtagttgttaaagaaagagcttaataagataaaaggagggaaaagcaagtgggtcaaaaagtaaatcctcatggccttagagtaggtgttatcaagggatgggacgcaaaatggtatgctaacaagaaaaactttgctgataatcttatagaagataacaagatcagaaaatttgtgaaaaaggaacttttttctgcaggtatttctaaaattgaaattgaaagagctgcgaaaagagtaaaattaaacatatatacagcaaagcctggtgttataataggtaaaggtggatctggaattgaggctttaaaaaataaattaactcaattcgttgaaaataagaatgttttaataaacatagttgaagttaaaagtgcagaagctgatgcacaattaatggctgaaaatattgctgcacaattagaaaaaagaatttcattcagaagagctatgaagcaaacaatgcaaagagctatgaaacacggaataaaaggtgtaaaaactgcttgttctggtagattaggtggagcagaaatagcaagaactgaacattatcatgaaggaacaattccactacaaacattaagagctgatatcgattatggatttgctgaagcagatacaacatatggaaaaatcggagttaaggtttgggtttataatggagaagttcttccaactaagaaagtagaaaaggaagaggctaacgcataggaaaggaggaatagatcatgttaatgcctaaaagggtaaaacatcgtaaggtgcaacgtggtagaatgaaaggtaaagctacaagaggtaatttcttagcttatggtgattacggaatccaagcgctaacttgtggatggataacaagtaaccaaattgaatctgccagaattgctatcaatagatacattaaaagaggtggaaaactttggataaagattttcccagataaaccagttacagaaaagccagctgaaacaagaatgggttcaggtaaaggatcaccagaatactgggttgcagtagttaaaccaggtagagtactatttgaattatcaggagtaccagaagaaactgcaagagaagcaatgagacttgcttcacataaacttcctgtaaaaacaaaatttgtttcaaaaagagattttgaggaaatgggtggtgaagaataatgaaggctagagaattaaaagaattgaaatcaagcaatcctcaagatttaacagttaaattgggcgatcttaaagcggagttatttaatttaagatttcaattagctacaggacaattagaaaatccaatgagaataagagaagttaagaaatctatagcccaaataaaaaccatcttaagagaagaagaattaaaagcattggaacaataaaagttggaaggaggtaagccctaatggaaagatcattaagaaagaaaagaattggtagggttgtttctgataaaatggaaaaaactattgtagttgccgttgaaactaaggttagacacccattatacggtaagacagttaatagaactacaaagtttaaagtacatgatgagaataatgaagctaaaattaatgatagagtatcaataatggaaactagacctttatctaaagataagagatggagacttgttgaaatagttgaaaaggctaaataagctttaaaactgaaaggagggtaatttaatgatacaacaacaaaccttattaaaggttgcagataattcaggtgcaaaagaaattatgtgtatcagagtattaggtggatctaaaagaaagtttggtaatatcggcgatgttatagttgctagcgttaaaagtgcaacaccaggtggagttgttaaaaaaggtgatgttgtaaaggcagttgtagttagatcagtaaaaggtgtaagaagagctgatggttcatatattaaatttgatgaaaacgcagcagttataatcaaagatgataagcaaccaagaggaactcgtatctttggacctgttgctagggagctaagagataaagaattcactaaaattttatcattagcaccagaagttctataagaggaggtggccaacttgaagatacatgtaagaaagaatgatacagttattgttatatctggaaaagataaaggcaaaactggtgaagtgttaaaagcgtatccaaagacaggaaaagttcttgttcaaggagttaatatagttaaaaaacatcaaaaagctaataagggtcaagttgaaagcgctataattgaaaaagaagcagcgatcaacagctcaaaagttatgttatattgtaacaaatgtaagaatgcgactagaattagtaacaaagttttagatgatggtactaaggttagagtatgtaaaaaatgcggagaaacattctagattttgaaaggaggtaactaatatgacaagacttcaagaaaaatatcaaaaagaagtagttccagctatgattgaaaagttcggatataaaaacataatggaagtaccaaagctagagaagatagtaatcaatatgggagttggagaagctaaggaaaatcaaaaagtgctagaatcagcagttaatgatttgactttaatagcaggtcaaaagcctgtattaacaagagctaaaaagtctgtagctaactttaaaattagagaaaacatgccattaggatgcaaagttactctaagaaaagctaacatgtttgagtttgctgataaactaatgagcatcgcactaccaagagttagagatttcagaggggtttctagcaaagcttttgatggtagaggaaattattcattaggaattaaagaacaattaatattcccagaaatagaatatgataagatagataaagttagaggaatggatataatcttcgttacttcagctaacactgacgaagaagctagggaattattaagattccttggaatgccattcgctcaataataaggagggaaacacattggcacgtaaggctattattgaaaagtggagcaaaactcctaaatacaagacaagagcttatacaagatgtagaatatgtggaagaccacatgctgtattaaaaaaatatggagtatgccgtatttgttttagagaacttgcttataagggcgaaattccaggttgtagaaaagcaagttggtaagatatacgatgtaacgaaaggaggcacattaaatggttatgacagatcctatagcagatttattaactcgtgtaagaaatgctaatgctgtaagacatgaagtggtagaagtaccttcttcaaacgtaaagaaggaaattgcaaatatattattacaagagggttatataaaagaaataaatgaatataacgatggagttgttccaatgttaagattatctcttaagtatggagctaataaagaaagagttataactggtattaagagaatttctaaaccaggattaagagtttattgtaagaaagacgaggtaccaaaagttcttaatggattaggtatcgctgttgtttcaacttcaaatggaataatggtagatagagaagctagaaagaacggattaggtggagaagtaatctgctacgtttggtaatatctcagataaattaaactagataaaattgtaaaatgcaattttaaaataatacaggaggtgcaattatgtcaagagtaggtagattaccaatagctattcctgctgatgtaactgttactgtaacaccagacaatttagttacagttaagggaccaaaaggtgaattagttaaaactatgcataaagatattagcatagctgttgaaaacaatgaagtaattgttactagacatagtgaacaaaaagatcacagagctcttcacggtttaacaagagcattaattaataatatggtaattggagtaaaacaaggttaccaaaaaactttagatttagttggtgttggttatagagctcaattacaaggtaaaaagcttgtaatgaaccttggatattcacatccagttgaaattgaacctattgacggaatcacatttgaaactccagctgcaactagagtaatagttagtggaatcgacaaagaaaaagttggatttgctgcagcggatataagaaaatggagagtaccagaaccatataagggtaaaggtattaagtatgaaaatgaagtgatcagacgtaaagaaggtaagactggtaagaaataatagaaaggagtgagttttatgttcaaaaaggtagacaaaaaggcgagcagagaaaaacgtcaccttagagttcgtaaaaaagtttttggaactgcggaaagaccaagactttcagtatttaagagtgaaaagaatatatatgcacaagttattgatgatataaatggtgttacattagtagctgcttcaagtttagaaaaagattttgctgcaaaaggcggaaacaaagaaggtgctaaacttgtaggtgaattagtagctaaaaaagctatagaaaaaggaattgacgtagtggtatttgatagaggcggatacatatatcacggaagaattcaagaattagcacaagcagctagagaagctggcttgaaattctaattaaacaaggagggaaataaatgagaatcgatcctagtacactagaccttaaagaaaaggttgttttcataaacagagttactaaggttgttaagggtggtagaaacttcagattcagcgctctagttgttgtcggagacgagaacggacacgttggcgttggaatgggtaagtcaatcgaaatcccagaagcaataaaaaaaggaatagaagatgctaagaagaacttagtaagcgttgcaatggtaggaacaacaattcctcaccaagttaatggtaagttcggaactgcaaatgttctaattatgccagctaaagaaggtacaggagttattgctggaggtccagcaagagcagtacttgaattagcaggattaaaggatgttagagctaaatcattaggttcaaataatcctaataacatggtaaatgcaacaataaacggattagctagcttaagaacagtagaagatatagctaaattaagaggcaaatctgttgaagaaatattaggttaaggagatattgcaatggctaaattaagaattacattagttaagagcttaataggtagaaaaaaagaccatatcgctactgcaaatgctcttggactaacaaagataagaaaaacagtagaacctgaggcaacacctcaagttcaaggtatgataaaaaagattgaatatctattaaaagtagaagaagtataaaaacaaggaggtgcactgaatatgaaacttcacgaattaaaaccagcagcaggtagcaagaaagcacctaaaagaattggtagaggtactggttctggattaggaagaaatgctggtaaaggtgaaaagggtcaaaatgcaagatcaggtggtggcgtaagacctggttttgaaggcggtcaaatgcctttatatagaagacttcctaagagaggttttacaaacatttttgcaaagaagattgttagcataaatcttgacagattaaatatctttgaaaatggtactgaagttactccagaattattacttgaaagaagagttgtaagtaaagttttggatggagtaaagattcttggaaacggaacattagaaaaaagcttaacggttaaaggatgtaagttctctaagtctgctatagaaaagattgaagcagctgggggaaaagttgaggtgatgtaaagtgcttcaaactttaagcaatgcattcaaagttcctgaacttagaaaaaagattttatggacagtattattagttgcagttttcaggatgggaagtcatattcctcttcctggaattaactctgattttttaaaaaatctatctcagtctggtggactattaggattttatgatatgctttctggaggagcttttagcagatccagtatattagcattaggagttatgccatacattaatgcatcaataataattcaattattaactgttgctatcccacaattggagcaactatcaaaagaaggagatactggcagaaaaaagatacaaaatgcaacacgttatgtatctcttggaatagcttttatcttagcttatggaatttttgcaacaatttcaagtagtggagctacagttggattaactgcaatccaaaagactattgttgtttttgcactagtggttggaacaacattttgtatgtggttaggtgatcaacttacagttaagggcattggaaatggtacttcaatactaatattcgttaatataatttcgagagttccagcaacaattgcttcaatgatgacacttcagcaagcaggaagtgcaagtattgtggaaattgtactatttggagtatttaccgtatttctacttgcgactatactatatttttctttatcagaaagaaggatacctgtgcagtatgctggtaaatttgcatcaggcaatagtaatatggttaaatcacaatcaacacatataccattaagtataattggatcagcggttcttgctattatattttctatgtccgtaatggattttccaaaaactattgccacattatttggtggagtaggtgaaagtcaaaaagagtgggcaaagtgggtattaaataatcctacatctgtctttaatcaaaagagttggatgtatatggtactatatgcagtactgacaatattctttaattggttttatactcagattacatttaaaccagatgaaatgtctgagaatttgcataaatcggcaggatttgtgcctggagtaaggccaggtgaagaaaccacaacatattttgaaagagttttaaacagactatcttttattggaggtatattagcagcggtattggctgtaactccagttataatacaaaactatacacaatttcaaaatatagctttttcaggaactggattattaattgttataaatgttgcgttagattttactagaaaagtagaatcacaaatggtagttaggcactataaaggatttcttaaatagattagaataaatggagatgaagccagtgaagatagtattactaggtcctcctggagctggaaagggaacacaggctaaatcaattagcaataaatattcaataccacatatttctacaggtgatattttcagaaagaatatttctgaaaacactcccttaggaatagaagcaaagggttatattgataacggacaattagttcctgatgaagtaacaattaatatggttaaggatagactgcaacaggacgattgtaaggtcggatatttattagatggttttcctagaactgtggctcaagctgatgctcttaacaactttcttgtagataagaatgaacaattagataccgcattgcttataaaggtacctaatgaatttattctagaaagaatgactggtagaagagtatgtccatcatgcggagcaagttatcatgttaaatttaatcctccaacaaatgaaggaaaatgtgatttgtgtggaagtgaagttatacagagaaaagatgatacagttgagactgtaaaggaaagacttgatgtatatcaaaaggaaacacaaccgctaattgaattttacggtgaaaaaggcttgctttcagaagtggatggcacaaaagctattaatgaagttttcagaggaatatgtgaattgttagggaacaacaaataatgattactgtaaagaatcatgatgaaatagccataatgagaaaagcaggtagaatagtaggagaaacattgctattgcttgaaaaagaggtaaaacccggagtaacaactgcaaatttggatagaatagcagaagaatttataactaagcatggagcaaaaccttcatttaaaggcttatatggttttccttcgtcactatgtatttcagtaaatgagcaagtaatacatggattcccaggagaatatgttcttaaagaaggcgatatagttagtattgactgtggggcgttttttgatggattccatggagatgctgcaagaactttctctgtaggggaagtttcagtagaagctcaaagattaattgatataacaagagaaagttttttccaaggtataaagtttgcaaaacaaggaaataaattaactgatatatcacatgagatacaaagctacgtagaagcagcaggtttctcagttgtaagagattttgtaggtcatgggattgggcgaaaagttcacgaggatcctaatgtacctaatttcggaaagtctggtagaggtccgaaattactggagggtatggtgttagcaatagaacctatggttaacgctggtacttataaggttaagacattaaaagatggatggacagttgtaacagcggattcttctttatcggcacattatgaaaatacagttgcaattttatcagatggacctgaaatattaacactgattaagtagaataaagagtgttgcttagttataaatttgcataataccgttgtggtagtgttaatttatactaaggtaatcatagaggtgaaaaatttgcaaaacaatgacttgattggaaaagtagtactttcaaaagcaggaagagataaagatcacttatatgttgttgttaggcagatagatgatgattatgtattactagctaatggagatacaaaattaattgagatgcctaagaagaaaaaaattaaacacttaagtattttagaagatgtagatgatgaattattatcattaataaactcatgcgataagagtactaatttaaagattaagagattcctaaagcttagaggcattgttaaggagggttgattaccttatgtcaaaagatgatgttatagaaatgcaaggtacggtattagaatctttaccaaacgctatgtttcaagttgaacttgaaagtggccataagattctagcacacatatcaggtaaattaagaatgaacttcataagaattttaccaggagataaagttacagtagaactttctccttatgatttaaccagaggtagaattacatggagagcaaaataaagtagatataacttacattgatctactacaaaagtaatatgaggagggttagctatgaaagtaagaccatcagttaagcctatttgtgaaaagtgcaaagtaatcagaagaaaaggaaaagtaatggtaatctgtgaaaatcctaagcacaagcaaaagcaaggctaatgatcaagtttacaatattatttacattaaaataaatgtaaataatattgacatttcagcaaaagtcaaatatgattatatagtcgtttaattaatcaaaaataaattttagggcggctggcaatagaatcgtctattgacctaaaattttattataaattataaattataaaatcaacttttatacatttcaattatcaggaggtgtaaattttaatggcaagaatatcaggtattgatctaccaagagaaaaaagagttgaaataggtttaacatatatatatggaataggattatcaacttcacaaaaaatcttagctgtaacaggaattaatccagatacaagagttaaggatttatcagaagaagaagttaatgaaatcagaacttatatcaacaagaatttaatggttgaaggtgacttaagaagagatgtcgctttaaatatcaagagattagtagaaataggatcatatagaggaattagacatagaagaggtcttccagtaagaggacaaaaaactaagactaatgcaagaactagaaaaggtcctaagaagacaatagcaaataagaagaaatagtaaggagggaagataatggcagctaaaacagtaaagaaaactagaagaagaaaagagagaaaaaatgttgagcatggtgctgcacacattaagtcaacttttaataattcaatagttactttaacagatgcagtaggaaatgctttatcatggtcaagtgcaggagcactaggtttcagaggatcaagaaagagcacaccatttgcagctcaaatggcagcagaaactgcagctaaagtagcaatggaacacggcttaaaaagtatagaggtttatgttaaaggacctggttcaggaagagaagcagctataagatccttacaagcagcaggactagaagtaactttgatcaaagatgttactccaataccacataatggttgtagaccaccaaagagaagaagagtctaatataaatgtagtaataggaggtgtaatttaatggcaagatatactggcgctacatgtagattatgtagaagagaaggtatgaaacttttccttaaaggtgatagatgttttacagataagtgtgctttcgttagaagaagctatgcaccaggacaacatggagctaacaaaaagaaagtatcaaactatggtgttcaattaagagaaaagcaaaaagcaagaagaatttatggcatattagaaggccaatttagaacatattatgaaaaagctgagcatattaaaggtataacaggtgaaaacttacttaaattactagaaatgagacttgataacatagtttatagattaggttatggttcatcaagaaatgaggcaagacagttagtgactcacggacatttcttagtaaatggtaaaaaggttgacatttgttcatatcatgtttcagttaatgatgtaattactgtatgcgaaaagagcagatcaagtgaaaagttcaaaacttttgttgaaaatccaaaaactttaccaaaatggttagaagctaatgttgataactatgaaggaaaagtagttgcagagccatcaagagaagatatagatgtgcctgttaacgaaacacttattgttgagttatacagtaaataatatatttatatttgttagagaaatttatcacaatatatgcaaatatagaatcagttgccctcataataaggttgccatttttaaaataaggagggtttgtcaatgttagaaatcgaaaagccaataatagaatgtatagaagctaatgaagatggtacttatggtaagtacgttgttgaaccacttgaaagaggatacggtattacattaggaaatgccctaagaagaatactattatcatcccttccaggagttgcaacaacctctgtcaaaattgacggtgtgcttcatgagttttctactgttcaaggagttaaagaagatgttactgaattaattcttaatatcaaatcattagctctaaggatgaatggtgaaggtccaaaagttatttatattgatgctaaaggaccaggagaagttactggagcagatataaagactgatggtgatgttgaagttgttaataagaatttacatattgcaactttagataacgatggaagactttatatggaattgacagttaataaaggaagaggatatgttactcagaataaaaataagagtgatgaattaccaatttctgctatagcagttgattctatttatacaccagtaaaaagagttaattttactgttgataatacaagagttggtcaaattactgattatgataaattaactttagaaatttggactaatggtactataaaaatagatgaagctattagtttatcagcaaaaatacttattgaacactttaaattattcatgtcattaacagataatactaatgacgttgaaataatgatagaaaaagaagacgataagaaagaaaaagtcctagaaatgactgtagaagaacttgatttatcagttagatcatataactgtttaaagagagccggaattaatacagtccaagaacttgctacaaaatctatggatgatatgatgaaagtaaggaatctaggaaagaaatctttagaagaagttgaaagaaagcttaaagaattaggtttagccctaaaactaaccgaggagtaaggaggtaaatccatggcaggtcatcgtaaattaggtcttcctacagaccaaagaagagctatgctaagaaatcttgttactagtctattaaaacatggtaaaatcgagacaactgaaacaagagctaaagaaactagatcaatagcagaaaaaatgattactcttggaaaaagaggagatcttcatgctagaagacaagtattatcttatgttcaagaagaattagttgttaagaatttatttgataatgtagctccaaagtatactgaaagaaatggcggatatacaagaataattaaaaaaggtcctagaagaggggacggagctgagatagtaatacttgaattagtataatactaatgggggattaagtttaaacttaatccccattttgacatagaaaataaaattggaacttaatttattatagagatgttttcttactcaagatatatatttttttgttgaatatgctggattttgagatataatgaaaataataatttaatatcaaagataacaatgttgtctttgaaaaacatttgtataatatattaaaactataaaacattatggggaggtacactatgagtgatgcgatgataaagtgtgcaaaagtatcttttaaatatgtaaaggatacagaaggagttaagcaagaaaaatatgcgataaaagatgtagatttagaggtgaaaaagggggagtttttagtagttttagggcataatggatcaggtaaatcaacgatagctaagcatatgaatgcattggtcgtaccatcagagggaacagtgattgtagatggcttggatactagtaaaatggagaatgtttgggagattagatctagagcaggaatggtgtttcaaaatcctgataaccaattagttgctaccatagtagaagaagatgtagcttttggacctgagaatttaggaatagaaccattagagataagaaaaagagtcgatgagagtctagagaaagttggaatgagcaaatataaaaggcatgcaccacatcttttatctggtgggcaaaagcaaagaattgctatagcaggaatacttgcaatacaacctgaatgcataatttttgatgaacctacagcaatgttggatccatcaggaagaagagaagttctaaaaaccataaatgaattaaataaagttcatggtattactatagtattaataacacattatatggatgaggcagctcaagctgatagaattgtagtaatggatggtggaagtgtaaaaatggaggggactcctagagaaatttttcctcaggtagagcgaatgaaaaaaataggtttagatgttccacaggttactgaattagcttatgagctaaaaaaggcaggaatagatataaatgaaaaaatattaaatgtggatgagatggtgaatgaattatgtcaattaaagtagaaaatttaacacacatatatatgcctaagagtccatttgaaaagattgcattggacaatgtgtctttagaaataaaagacggagaatttgtagcactaattgggcatactggctctggtaaatctactttaatacaacattttaatggtttactagaagcaactagtggagaaataattgttgatggaacaaatattactgataaaaaagcaaagcttacggatataagaaaaaaggttggcttggtatttcagtatccagaatatcaaatctttgaggaaactatagctaaggatattgaatttgggcctagaaatttaggactttccgatagcgaaattaatgatagagtaattagggcgatggaaatggttggtctagactatgagacttataaagatagatcgccatttgatttaagcggcggtcagaagagaagagttgcaattgcaggagttatagcaatgcaacctacaacactaatattggatgagcctacggcagggttagatccaaagggtagagatgatatattagatcagataagaaagctacatgaggattataatatgactataattatagttagtcatagtatggaggatgttgcaaagattgcagaaagaattattgtgatgaatggtggaaaagtagcactacaaggaactccagcagaagtatttaaagaagttgatgtgctagagaagataggacttggcgttcctcaggtaacatatctaataagagaactaagaaaaaaaggatttgacattccagataatatatttacgatagaggaagcaaaaaagcaacttttgtctactttgaggataaataaagtgaaaggggaatagacaaaattatgttgaagaatattacaataggacaatatttacctggagagtcatttgttcataagttagatcctagaacaaaaatacttatatcaatactttttattgcatgtttatttatcataaataaatttataggttatacttttgtcgttgtttttttactagctataatattgatcgcaaaggtgccatttagatttatttttaatggattgaagccaatttttctattgatagtcttaacagctgctctaaatatatttatggttaggggagctgaagggacagaagtttttagtattggatttttaaaggcatatccagaggggttaagtattgcagcatttatggcaataagattaattctattaatagtaggaacatcactgttaacattaacaacatctccaattgagttaactgatggaatcgaaaaattattaaggccaattggaaaagaaatggctcatgaacttgctatgatgatgacaatagccttacgatttatacctactttaatagatgaaacggataaaataatgaaagctcagaaggctagaggagctgattttgagtcaggcggaataataaaaaaggctaagagtttagtaccattattagtgcctctatttatcagttcatttagaagagcagatgaattagcaatggcaatggaagcaagaggctatagaggtggtgctgggcgaactagaatgaaaatacttgaattttcgtatagggacctggttgcttttattgtattttgtattttagttttatggtgcatagctgtaagattcattatgctataggagtaagataacttaaatgagaaatataaaattaattattgagtttgatggaagtaacttttgcggatggcaaaggcaacctaaaggaagaactgttcaaaaagtaatagagacagcaatatttaaggctactggagaggaaattatgattaatggaagttccaggactgatgcgggtgttcacgcaagggaaatggttgcaaattttttgactaattcttcaatacctggagataagttcagagaagctattaatacaagattgccagaagatgtatctataattaaatcagaagaggtaagtgaagattttcatgcaagatattcatcaaagggaaagacatactcttatacaatcgtaaatagatatgaaaggttatctttaggtcatcaatatctgtatcattataagtataaattggatataaatgagatgagaagagcatgtgaatattttatagggagacatgactttagggcgtttatgtctccaggaagctcaataaaaactacaacaagaactattcaggatctctatatagagcaaaatggaaatgaaataaaaatatttattacggctgatggatttttgtataatatggtgagaataatagtaggcacattaataaagattggaaatggaaagctggaagcagaaaatataaaagatataatagaagaaggaaatagaaaaaaagcaggaatgtgcgtaccgccaaacggattaatattagaaaaagttttctattaaatgataaaaatgtgttgacacgcccgtgtgcgtgtattataataggtttgtttgttaaaacatttatgtatataagatccactagccccgggtcttgacataaaaaatcttacttaaaataataagtaaagaattaatgtaagttcagggagggaaacagatgaaatcatacattgctaaagcaagtgaaattgaaagaaaatggtatgtagttgatgctgctggtaagccactaggtagagttgctagccaagttgcttcaattttaagaggtaaaaataaaccaacatttacacctaatgttgactgcggagattttgttattgtaattaatgcagaaaaggtagttttaactggtaagaaattagatcaaaaattaatgagaaagcatagtctttacccaggcggattaaaagaaactccttatagagtagtattagataaaaagcctgaatttgcttttgaagaagcagtaagaagaatgcttccaaacggtgttttaggaagacaaatgttaaagaaattaaatgtatatagaggtgcagaacataatcatgcggctcaaaaaccagaagtactagaattaagatactaatacgatctcgggaggaggaaaaagaaatggcaaaagttcaatacatgggaactggaagaagaaagaaatcagttgcaagagtaagacttgtaccaggaagtggtaaggttcttgtaaataaaagagaaatagaaaacttttttggtttagaaacattaagagttatcgtaaaccaaccattagttttaactggaactaaggatagatttgacgttttagtaaatgttcacggtggtggatttacaggtcaagcaggagctattagacatggtatagctagagcattagttaaatctgatgaagctttaaagccagaattaaagaaggctggattcttaacaagagacccaagaatgaaagaaagaaagaaatacggtcttaaagcagcaagaagagctccacaattctcaaagagataatatttggagatcaaaaatcccacaaacgcggtgtttgtgggatttttattttatataaaaatatgtgattttaaagaacaaatataaataatagttattacatttctagtaatgcggttctggtgccacttcctaatatagttataaattcttctattatatatatgttcaaactaagcctatatatttttgccttaaatgaattctttagctattacaagtctaaatatggcgctactatatacaatatatataagttctaaatggtataattcatttttaataaaattattaacatttctatatatggtaattacaaatggatttcaattgatgaaatattttagatattatattaaaaattgtggtgatacatctattgggtgttctataaaatatgcttaataaaaaataaaagtttattaatataaatgaatttgaataattaagattgtatagcaaacaatacactatgtaagtctaaatgatttggaggaatagttttatgagaatgaaaaaatggatagcattgttctgcatattttgcttaatgtctggaattccagtaagaacaaattccgaagaaaataaagataaaaggataatattgatagatcctggtcatggaggaattgatgggggagcaaaatcaaagagtggaactatagagaaggatataaatttatctatatccttaaagttaaaacaggagctggaggatgctggatatgctgtgtatatgacaagagaaggagattctcaattggatgcgaagaaagttaaagatctcaatgccagatgtcaaatgaagaaagatgttaaatgtgatacatttatatctatacatcagaatatgtttccacagtccagttgctttgggtctcaagtttggtattcatcgaatgagatcagcaagtctttagcagaaaatattcaagcatcactcaaagaaacaataaatgacaataataagagagttcccaaggcagcaaaggaacaatatagaatacttagagatggatatgagggtgcatgtgttctcgtagaatgtggctttttatctaattatgaggaagagcaaaaactaaaaagtgatgaacatcaggacaaaatagcaaaaggaataacagctggtatcaataaatattttgaaagtaaagatagctagttatttaatttcataaaaatgggaccaacttttatgctgttttttggatagtcataagagtggtataatttgtctactaataaaaaaagattatacaataacaaacaggttaaaagaacaattaaaaagtaaattagtatagtaaggaatttatctaaatttttagggttcataaattaacctctcaaatatataaaataattatatatgttgcaattgaattcttgcatttttaaaattcaatacttggcttacaagtattttaaatgtaagccagttattgcaacatatatatataattatagtagtaatgaactataattatgagcgataaatttaaaaatagagaaagtatttagtaatattaagcaggaaaatactaaaaatcatcatagagaatgctccgtttatgattatgatgtacagtatataccgcaattgcttgtatggaggtctgagaattattggatcaaataaaatttatttggggttgtaaatagtaagaaatacttttaaacttatatgtagtaataagtataaatgtatagtttataagcgataataaaggagctgtaagaatgagagaaataaatgttgaacttataacagaagctattaaaaatttatcaattgaagctaattatttcttaggatcagatattaatgatgcattattaaatgctaagaaagaagaaccatggaaattagcatcagatgttttagataagatattaataaattcagaaattgcaagaaatgaaaaaatgcctatgtgccaagatacgggaatggcatgtgtatttattgaaataggacaagatgttcatttagttggtggaaggattgaagatgctattaatgaaggagtacgtaggggatatgaggaaggatttctaagaaaatcggtagtaaaagatccgataagaagagttaatacaaaggacaacactccagctataatatattatgacatagtggatggtgataaggttaagatcatattagcaccaaagggatttggttctgaaaatatgagtaaaataggtatgttaaagccatcagatggactggatggagtgaagaagttcataatagatacagttaaagcggcaggacctaacccatgtcctcctatggtaataggtgttggaattggagggacttttgataaggcagcatacttagctaagaaagcattattaagacccatcgatataaggaatgaagatgaattttataaggaattagaattggaactattacaagaagtaaataaattgggaattggaccacaaggcttcggaggtaaaacaactgcattagggttaaatatagagacttattcaacgcatattgcggggttacctgttgcggtaaatataaattgtcatgctaccagacataaagaggtaatactataaaaactatgatttaaataagatatatataagttctaaataacatagctaattctttatgaactatctaactttcattatttgactgcttaagatgaagctttgatgaattaaattttttagagtcatatattttattaaaagtctaattggtaagaatgcattagaaataaaaattgaaattatatgtatgattggagaaaaggtatggaaattaaattagagacacctcttaatgaagaaaagataagacaattaaaagcaggagatagtattttgttaagtgggataatatattctgctagagatgccgcacataaaagattgatagaattgctttatgaagggaaggaactgccttttaatataaaagatcaggttatatactatgttggaccatcaccagctaagccaggtactgttataggatctgctggtccaacaactagctacagaatggatgcttatgcacctaaattaatggacattggactaaaaggaatgataggtaaaggtgcaagaaacggtgaagtaattagttcaatcaaaagcaatgaggcagtatactttggagcaattggaggggcggccgcattaataggaaaaagtattattaagtctgaaataatcgcttatgaagatttaggtgctgaagctataagaaaaatggaggttaaggatatgcctctagttgttattatagatgctcaaggaaataacttgtatgaaattggtcaaagagaatatttagattcggtaaaataaaatgaagttatatattaagccgtattaaaaggagaaatatatgagcagaattaagttaccaggaaaagagaaaaataaaagaatactattatttgtgctagtgctaatagcattgggaataatatctcatgaatttatagaaaatggaaatggaaaggataagaaatataaagaagaaaaagaaataataatgcctgagggaacgcaacaatcagataataatgtagccaataaagaactagaaagtatagatatgaaggatgattctaaaaaggctgttaatgataaaacaaatgaaaagtctagttattcggaaagggaaaatgaattatacgacgaagcatataatttatttttttcacataagtacactgagtcaattagcaaagcagatttgcttataaatgaatttccaagtaatgcaatgggatataatataagaggaattgcgaagtcttataatggagatttcaatagtggtatagatgatatagataaggcattaagtattgataacaattatggatatgcaaggtttaataaagcacttacatatgaattatatggaagaatggatgatgcacttgaatggtataataaggctttagatgttgaagattatgaatggagttattatggtatagcatctatttatggaagaagaggagacataaaaaatacaatgctgtatttgaataaagcaatacaaatagatgcatcaataaaggaaatagcaaaagaagaacatgattttgatccagtcaaaaattcagaagaatttaaaaaagcagtgtataattaatatttagaagataagttcattgtaaaacaatattatgtgagacgtgaactttaggaggaatttgtatgttcaatgtattagtagttgatgacgaaaaggaaatacgagatgcaattgaaatatatttaagaggcgaaaatttaaaagtatttaaggctgaggatggattggaagctttagatattcttgaaaaagaaaaaatacatttaattatactagatataatgatgcctagatttgatgggatacgtacttgtttaaagataagagaaagtcaaaacttacctataataatgttatctgcaaaaggcgaagattcagataaaatattaggattaaatgtaggggcggatgattatataactaaaccatttaaccacttagaattggtagcaagagttaaatctcaattaagaaggtatgagaaacctctaaatgtagaagagggtaaggatataattaaagttaaagatttagtaatagataccgttgcaaaaaagattactttgcgaggggaagatgttaaggtaacagctacagaatacaaaatattatatttgctagcatcaaacttaggaaaagtattttctattaaagagatatacgaaaacgtgtgggaagagatattttacaaaagtgaaaatacagtaaccgtacatattaggagaataagagaaaaaattgaaataaacacaaaagagcctgaatatatcaaggtggtgtgggggattggatacaagattgaaaaggaagattaagctatattttagtagcatctatttagtagatataataatcgtagcattgataacattatttttactttcagcattgggtgattatatacagatcaataggtcgcaacacagcttagcagttaatagaattaaaagtgatttaagaggactaattttcttagctgccatatatgtggcgtttattacaaagattattttcatattgaaaaagaatcaaaattcacctagaatacaatctgattttgttaataatgtgatttttgtaattaaaaatggatttcattataaagaaacaaggagcaaattaataatatccattgcattagcattgatattgttaattgcatatttatattttcttgctactggaggatatgaaaataatatatttgtgaagttttttcaaacgtatccgtttaaaggaagtgtatttgttattataatattatttttcactatgatgtatgcattaaagaagactctagacataatagtcgtaaatgatgcactcagaagagttagtgaaggaaatttgcaagatgatattaaattggatggatcgcctgcgataaaagaacttgcaaaaaatattaacttaataaaagcgggatataaggaaatattagaagatggtgtccacaatgagaaactgaaaacagaattaatatcgaatgtatcgcatgacttaaagacgcctttaacatcaattataaattatgttaacatactaaagaatagtgatataacggaggaagaaagagaagaatacttgttaatattagagagaaagtcgctaaaattaaaagtattaattgaagatttatttgaaatgtcaaaaatcaatagtgggaaaattaagttaaatagagagttaatagacatactatcattaatacatcaaggtataggtgaatacagtactttatatgaggaaaaaaatatttcctttaaagtaacaagtgaagaagatgctgtatatatggaacttgatggaaagatgatgtcaagagccttagaaaatataataattaatgcactaaagtattcaatgagcaatactagggtttatattaatgtaaaaatagatggtgattatgttaatgtcggcgtgaaaaatattgctaattacgaaatggattttaatgaagacgaaatgtttgaaagatttgcaagaggagataagtctagaaattcgaaagtagaaggttcgggattaggtctagcaatcacaaagagtatagttgaacttcatggtggagaagttaaaataaaaaaagaaggagatatgtttaaaatttatcttatgcttccaataaataagggataaaaaatattaataaataaattttatcaattaggtagttaatctatagaaaactaaagattagctacttttttcatatatatctataaattttaaggttttacaattatgatgctaacaattataatatacgatatgttgtatagaaaaattaaattacatacaaaaaacacaatatgtagtagggagagataattgaatgtcgcttttgagtgaattatgcaaagatgctattaatgcaattaaagataatgaggggctttatacagaagataaactattagatgctttaaatccaattataagaaaagatatgaataaaagagaaataagaaattcattgatacaagtagctctggaattaactacagatatggagcctaattggcaatatgtagcagctagggcgtatacatatgaactttatgatagagttagaagttctagaaacttagaggatgataagaatttataccaggattattacgaatttattgaatctctaactgaaagaggtctttatggagaatatattttaaagaattactcaagagatgatattttagaactggagaaggatataaagccagaaagggattttctatttaattatagtggaattaatcttttagcaagtagatacttagttcaagattataatagaagccctatagaacttcctcagcaaatgtttatgggaatagctatgcatcttgcaattccagagaaagaggaaaatagagtatattgggcaaagagattttatgatgtacttagttcgttaaaagccactatggcaactccgacaatgtctaatgcacgaaagccattttatcaattaagttcatgctttatagattcagtggaagatagtttagagggaatctataaatcccttgataatttcgctaaagtatctaaatttggcggtggaatgggtatatatatggggaaaattagagcattaggttcaccaataagaggatttaagggagcatctggaggggtaataccgtgggttaaattatttaatgatacagcaatagctgtagatcagttaggtgtgagaaatggctcggtagcaatatggttagatgcatggcataaggatattcctgagtttcttcaaataaggactaataatggggatgataggaaaaaggcacatgacgtatttccaggtatatgttatccagacctattttggaggcttgctgaaaatgatatagatgctaattggtatatgatgtgtccacatgagattaagaacattaaaggatatgcattagaagacttttatggagagcaatgggaagaaaagtattatgaatgtgtaagcgatgagcgaatagagaaaagagtaatgtcagtaaaagatttagtgagattaatcataaagagtgcagttgaaacaggagcaccattcgcattttatagagatatgacaaataaaatgaatcctaataagcataacggaatgatatattcatcaaatttatgtactgaaattatgcagaatatgagtccgatgaagatacaaaaaagtcaaattcttagtgataaagatgaatatgctgtggttgagaaaataataccaggagattttgttgtatgtaatctttcatcagtagtacttggaaatatagatgtatgtaatgataaagaagtagaatatgttgttgaaactcagattagagcaatggataatgtaattgacttaaactattattcagttccttttgctgagattacgaacaaaaagtatagggcaataggtcttggaactagtggatatcatcatatgcttgttaacaataagatacattggacggaagaagaacataaaagttttgtggataaaatttatgagaagataaactactatgctgtaaaagccagtatgaacatatcaaaagaaaaaggatgctatgaattgtttaagggatctgattgggatactggagagtatttcagattaagaaactacaatagctctaaatggaatgaactaaaggagctagttcatgaatttggaactagaaatggatatttaattgcagtagcaccaaatggttcgacggcaacaattgcaggaacaacagaaggaattgatcctattatggcgagattctatttagaagaaaaaaagggaagtataattcctaagactgcaccaaatctttcagaagataattattggtattataattcggcttataatatagaacaaatgtggtgtgttaaaatgaatggaatacgtcaaaggcatatagatcaaggtcaatcctttaatctttatataacgagtagctatacaatgaggcaaataatgaacttatatatagaagcatgtaaatgtggtgttaaatctatatattatgtcagatcaaaatcattagaagtgacagaatgtgaaacttgttcagcgtaagtgtactttataatctacgtatcaatacttagtattaggggttatacatagtgagattgataaacgagaactcaaattttatatttgagttctcaagttaatttagttctttgatactaattggttatttgaacttatgaaaactaaaatatatgaataattatgatatattttagatataaaatgtttagaattaattgctatataactaacacatgttagctatataatgcttagagaataggagtgcagatatgactataaataaaaaacctctttttaatgaattgggagatagagaaatcagtaaaaagagaattataaacggtaatactacaaacttaaatgattttaataatatgaaatatagctgggtttcagactggtataggcaaggaatgaataatttctggataccggaggaagtaaatctttcacaagatttaaaggattatcaaaacctattagaagaagaaagaattgcatatgataagatattgtcatttttaatatttctagattctatacaaacagcaaacttaagtaatataaataattatattacagcaagtgagataaatctgtgtttaacaattcaaagttttcaagaagcagtacattcgcaaagctatagctacatgcttgatagcatatgttctcctgaaaaaaggaacgaaatattatatcaatggaaagatgatgagatactcttgaaaagaaataaattcataggagacttatacaatgaatttatagagaatccaacggaatacaatttattaagaacacttatggctaattacatattagaaggtatatatttttattctggatttatgttcttctataacctggagagaaatggtaagatgccaggatctgcacaagaaattaggtatataaatagggatgaaaatactcatctgtggctttttagaaatattataaaagagctacaaaatgaaaatccggagctatttactgaagaagtaaaaaatgaattaagaaatatgatgaagattggtgtagaacaagaaattttatggggacattatgttataggagataagatacaagggataaataagcaattaattgaaaattatataaaatatttaggaaataaaagattgaaagaaataaatttatctccattattcaaagaacaagataagaacccagcttcatgggtagatactctatcaaatgcaaattctgttaaaactgatttcttcgaagcaagatctactgcgtatgcaaaagtgacaactttgattgatgatttataaatagatttataaaatataaaaataataggaaatagatggtaatagataaatggagagatactttttttagtaaaaatcataaaaaacgattaaatttaagttaatttttttgtgaattatgttataatagaaaaggtttatacttaaaataaaacttgcaaatacacgaattaatgtaagaaatacttacttaataaatgaaatttacaatcaaggaggagttccatattatgaaaaaaggtattgctgcttctaaaggatatgcaataggaaaagtatttttacaagagcatgaggaaatcattataaatgacagtaaaattgcagatatagatgcagaaaaagcaaaaatgcaaaaagcattggatgattctaaagtacaattagaagctattaaagataaggcagaaaaagaaatgggtgcagagaaggcagctgtatttgaagcacacattacattattagatgacccagaatttactggagcaatgatgatggaaattgaaaacaatagtataaatggattaaaggctattgagagtgttgctaatacttttgttgctatatttgaatctatggataatgaatatatgagagaaagagctgctgatattaaagatgtatctaagagaatattatcaaattttgcaggtaagggcggagattcttttgcaattactgaagaaaatacagtagttgtagctcacgatttaactccatctgatacagcaggattagatagaactaaggttgttggatttataactaatataggtggaagaacttcacatgcagctataatggctagaactttagagattccagcagtacttggattaggtgatataactacagctgttaaaacaggggatgcagttatagttgatggaataacaggagatgttattataaatccatcagaagaagttttagcagaatatagagagaaaaaagcaaaattccaagcagaacaagaagaattaaagaaattaatagatgttaaaacaactactaaatcaggtagaagaatagaagtttgcggaaacattggtaaaccagaagatgtactaggtgttttagcaaatggtggagacggtgttggattattcagaacagagtttctatacatggatagagatagtgctccaacagaggacgaacaatatgaatcatataaatttgttcttgaaaaaatggaaggtaagcaagttgttataagaactttagatatcggaggagataaaacgcttccatatttaccattaccagaagaaatgaatccattcttaggatatagagcaataagactttgtttagatagaaaagatatatttaaagttcagttaagagcattgcttagagcttctatatatggaaatcttgcagttatgttcccaatgatttctggattagaagaatttgagcaagaaaaagaagttgttgaagaatgtaaagcagaattaaaagctgaaggaaaagaatattcagaaaaaatccaatggggcataatggttgaaattccagcagcagcagtttatgcagatgaattagctaaacatgttgatttcttctcaataggaactaatgacttaattcaatacacattagcagctgatagaatgagcgaaaaagtttcatatctttataatccaatgcatccagcagtattaagattaataaagatgactattgatggagctcataaacacggtaaatgggttggaatgtgtggagaaatggctggagatgaagcagctatcccaacattagttgaatatggattagatgaattctcaatgagtgctacatcaatcttaaatgctaaaaagataatgttagaacaagaataatatatcgtttatataattaaggctatctcaaaatttaaaatggttcctatgtcaaggacattttgaaaaaggctaggcagctatgagctggtttctgtattgtacaggagccagctttttaagtccccactgatatctataattattataatactccatata

SEQ ID NO: 32 - DNA, 56578 bp, Clostridium beijerinckii
gcacgccgccagcgttcgtcctgagccaggatcaaactctcaataaaaagtttaatcttagcttactcaaataaaaattgctggtttacttaaatgtatttatgttattctgttcaattttcaaagaccaatttttccttctaaatcctgttattacaagacttacaagtttctgtcgtttctgacagcttaattagtatatcatcgctttcagactttgtcaacaaccctttttaaaacttttcaaacattttttcttagatgttttattagctttaagttattgaattttataatcttcagcaatgaattaaatcataccatcgctatttaatattgtcaacatttttcacaaaacttataattttacaattcaagtatcttataaacttgagttgtttttgcttatatgtcttagcgacgtgttttatcttaacatctttaatttaacttactttttaaattattccccaattttataaaattatttatacttttcgctatcatacttgagtatactaatttttacctatattgatacactagtctcagttgttacatgattgaaatagccatactaaactttatatcctgaaagacatcttcataaattatataacaaataacattttagtttataagcaacatcgcttgcaactttaaaagctagtatattgaaattttatttccataaactatgatctgatggaattagattctattactataacttaaacttgaaatttgttttaaccctgtactgattaatattaatataacaatccacgcaattattgtaagaattccttgtattattggaagattactcgtattacttattggcatatcccaaaccgcatgtaacgcaacagcaataataaaatatttaagaaattttatattcgttatatatttaaattttagcctattatcttcctttaccataactaaagcagctccatacattgctgcccagacaatatgacctccaaatgctaaaattcctctagtatatattatcttcatcattgtaggtatttgaaatccataagcaaacgcatatccagccgtttcaaaaactgcaaatcctgcccccactgctgcacctagcaaaagcccatttaaaatatatttttccttacttcctcttaaaaaatacgcaacaacaatgaatttagcagattcttcaataattcctatcattattgatccaatgtaatctacatttctaacatacactactctacttagaatcattgttattaacaaagaaaaaacacctccaaaaaagaatatttttactacatcaaatatattaatatttcttggagcatttacctcccaaaagaaaataagtaatgaaaacggaattatcaaagcacctataaatataattcctggataagctaatatattctcgaaaatttttaacagcgctactaatccagcaaaagttattgcaaatagaaaaaaaactcttgaaaacagccaaggcttaggccactttgaacatatctcgccttccttaggagatgtttttgctgttccgcaaataaatgtattttctctctcttctggtgtgtgctttttaaatacattaacaactagatctcttaatcttaattctactttcccgcttcctcccgctattttgtttaactcgctcaaaaaactatcatttccattattagtttcttctttagctcttatataattttcatcactatcaagatctagtccgcatgaactacaagactttgaattattagcagtttttttcttgcaatttggacattccttagtgtttttttccatacatctatcctccttcaatctggttctaattatttttcccaatattttttttgtaattcaaattttctgattacatacccaactgatcccctaacaagtataaaaataatttctacattctttcacacttactaaatatcataaattaagcaattcattttttttatgaattaatttataaatcacccataaattctttgttacataaaaatttaattatttctagtatatagattcttcatgatttccttcgcatgaaactattttttcgataatttctccctctacaagatctatattcgtctttcctatatatccaaatttacatttattaagcttaataaaatccatagctctatgaaacgtggaatgattcatatattgagtataaaaaaatatgtaatcagctgtatttaaaattcttatatcaaagttttcgttgaaaccatttaacattcttatttctggatattttattctaaatcgccttctccattccttatctccgccaattataataatttttttgctgatagtatatttctctaatcttttgttacaatccgaaattttgtgattagtatcagaattaaactcatattcttttaaatattctaaatccaattttaaaatcttttcttcatttaatttattctcaagaattctaattcgatcttccttcttcttcatttctaatttatatatgctatctagcttgcttaattcagacttcagcctcttttcatacattaacttttccttgttaaaataatcaagtttatttttcaagctaatgttttcttttttaacttcactaatctgctcctctaatatgcttaatttatagctatttgactcctccatattattaaaatataagcttctagccttcttatactcattaataagtgattgtataaatattccactaacaatacaaaataaaattatgtctgagtcttcattttttgccatcctcacatacggcagtataattttctcgatacaaataaattgcgagtcttcaaacatactctctatattgatcccattcattataaacaaatcctctaaaatttcgcctaactttctaacaccttcattattatgtctcaagatatctttaaaattatatatcttcccaaacttttgctttattagcaacttaacttcctttattttattcttataattttcaatctccatctcaatattttcatttataaaatttttagattcaaactcctcaatatcgtttagaatagaaattacgaacccttgatctactatttcttgtgaaatataaatagcaaaatatagatatactgccgcatcaaattttgcttctatatttctagttattaaatccattttcatgtatctatttttcaatattttcttatcatgcttctttacagcattatatataattggataatactttctaagaactttaataattttgcttcttactgtactatccgtttccccttctataagtaccccaacaatcctacgtgaatatatttcttgttcaatatttgcttgctttatagtagtataatttatacaagtgtcatttatagccgcattataatatttcagtctatcctcataatatattttatcaatatcttttttcatttctttgcttctcgttagacttatacttatattagcaaatatataatttcttataatgttactatcaatatttaaatgttcagcaataatttttgaaaaagaacttacatttatctttctattattacgcacttcaatatccactattttttcctccttgcatttaatactgaatctagaatctaaatcctaatacccatcataattatttattacaacaatataatcactttctccaatctttgaaaactgaaatttaagattcaattttgttaaatcttcctctaaccaatttggaatatgactgcaggctattattagctcattaaaaatttttctatttagaaatggcttcaaagcttgcttagacgtaatacctatattatccttctgcaaattcttaagatttaatatataacgcccacattccccattacctaatgagataataaattgcctattattacttatatctgaatgatttataaatttacttactttctccgcctctttttcttgttctaatatatactccaaaaaacatattggatttccatccatattccacaaactcaaccccattttatctaatgtagtatgcacaaaatccgaaaaattcttagcaacgaaaactttgcattttcctagttcctgcgcaatatttaaaacttctaaataaatttctttactatcctttgtataacaaaattcaaatactaattttttaaccactctccattcatttccctgctttgaaaaaaccttaataaatttgcttttctcatattcagtagcctctccaaaatcatttacacaaactgctatttcattaaccataaatacctccatgtttataacttaatttctataaattcttttgtaataaattttattttaattacaaaaaaatttgatctttttaattaacagaaagaacaaaatcgcaggcgactgtggagcctgagattttttcacgcatctgccttttcgaacgcatgtgagaaaaatttggcaggcgaataagatttcttttttattctttttaaaatacaagaactaatcaatcaactttttttaagttatccacaaattttattggaatataattttctaaagaataaaaaaagtctaattcatatactttgttagtataaaaattagacttcatagccattttgaaagaattaatttatctttatttttttacagctttggtttaggtagctgtttaataacattattatatattttaaaattatatttttcaataagccttcgctcttatttaatgtagtaaaaatagaacttttatattttaagaatttaaactatacataacttaattcaacatattttgaatataagcttcctggaattatttctttgtatatatcctttaatcctgtataaattgccagatcttcaagatctacattacataaacacataatgcaataatctatatcaaataatttacaataaatatctgtcattctcatcccgtttcttttataaaagtcaattcttctttttctaataattttctcactttcattaggtccgcattctaccctctctacttctactataattccatcataatttctaaaatgctcctgtagtatacttaaaaattcacttccaattccttcatctctatgctctttgcataccgcatagtaatcaattaacaaatatgattttgatgaagctaaaagtgcgtatgctagaagttcattattattatacaagcctatacatatgtaattttttcttttattaagtttctgtattacatcaagaggctttaattccccatacggaaaatcttttatcatatgttcattatagataatttcaatatcttcattatttagttcttttagattcattttcgttcatcctatcattatcttattttctcaaaactatttctctaattataacatattttttctattctcaaattcttactattcaaaaaaataattacaatatgaaccacttgtggtaatatataattatttcaaaaaggatggtgttattatgaaaactggaattgaattaataaaagatattgatgaatgtattttagaaaatggagatgttgcgttctggtggcttggacagctgggatatgctattaagatagctgaaactactatctatttagatgtgtttctatcggattggcctaatagaaatattcctccactattaaagccagaggaaattgtcaatgcagattttataattggcactcatgatcatcctgaccatattgatcgagatgtatggcaccaattatctattagttcgcccaacgcaaaatttgtagttccaaagcttcttatcactgagctttcagatgacttgaaaatacctaaaaatagatttataggtctggatgatggattatccatttcagaaaaagatttaaaaatatccgcaattccttcagctcatgagttcttagatcaagatccgtctggtctctatccatacttaggctatacaattgagggaaatggatgtactgtataccattctggtgatacatgtatgtatgatggtatcttctcaaaattaaagcagtgggataactttgacattatgtttcttcctatcaatgggcgcgatgcgaaaagatatagagaaaatttaataggaaatataacttatcaagaagcagttgatttagctggagctattaagcctaatttggtcgttcccgggcactatgaaatgtttgatgataatagcgaaaatcctatattgttctatgattatcttaatgcaaaatatcctggaattaaatgctggattggagatcatggtgagatggttaaaatatgtaaagcaaataaatgagcaaacggcctcactaattttctaaatagcgataaacaattagaatatatcccaacaattagtattaactaattgctgggatataattttttgtcatataagacctagtgaatctattgtaaattcaaaaatatccttattacttgatacttaattttaaacaataatattaacaggttcgttcttaataaaagcttctatattatttgctaataaatttataagcctttgcctagactcaaaacatttccaacctatatgtggagtaagaatgacattttccatgttaaaaagtggattatttaattctggaggttctggatcttgaacgtcaagtgcggcacctgcaatctttttattattcaaagcttcaattaaatcagtttcctttataatggctcctctagatgtatttataataaatgatgacgatttcataagatctaatctagacttatcaataagataccttgtttctgttgtaagtggacaatgtattgtaacaaaatcactttcttttaaaagttcttcaaggctgacaaatttgatgtttgaatcgcttaaatctttatagcttctactgtatataagtattttcattcccaatgctttagctacattcatgacttgtattcctatagatccagcgcctataattccaagtgttttattttgtatttctatatgaggaacctgaagatatttagtaaaattactgtaatttttattttcaatcattctttgctgttgcgctaatgatgaacttaaatttagaataaatgtaattactagttgtgcaaccgcttcgctgctatatcctggtacattgcatacagatatacctttttctcttgctgctataatgtcaatattattatacccagtaccagcctcacaaattaatttaacactagatggaaacttttctattaactccttgttaattgtaagttcctttgtaattacaatattttgttcttttacccgttctaagatttcatcattgctgctatcttcatatttagtcactttacctaaattatctagcgatgaaaaatcaagttgtccatcaaagtttattctgcttgcattaagaaacacaattttattcattttatcctcctacttctctttttcactttttatagcgtgaaagtattaagtaatattactctacaatattataacattttaaatgttaactttatcctattaattaaaatttaataatatttcatctctcttaaaaaatagatgttttttctgcgttttttatttcaagaattaacataaatatttcgataaatctattcattctaaatttttattagctaagaacttttaataataaaaaacatattcatagggaaatatatttttggaggtgatcattatgcaaataaaagatgtaatgtcaaaagatatagtgagtttaaattcagaagattctattgaaagagctgctcaaatgatgagacagtttgacgtgggcgcaatacctgtttgtgataactcaaacaaattagttggaatgattacagatagagatattgctttggattgtgtagcatcaggtgcaagtgcagaccaacaaaagatatgtgattatatgacttcaaatcctgttacaggaagtcctgatatggatgttcatgatgcagtaagactaatgagcagacatcaaataagaagattacctattgtagaaaataacagtgttatcggtatcgtttctcttggtgatatttcacaagaaccaaatctacaggataatgctgaggttgctcttaaaaatatttcagaacctggaacaaacaatcatatataaatgttatatcagtaaaaaatagtacaattatactttttttaattgtaaatataaaaacaatttcatgatgtttatgccatgaaattgtttttatttaatgttataaaaattaattattatcaatatctaatattgtcttcaacaaaacatttgcaccctttaaacagttttcaagtggtgtaaattctttttcgcaatgactgtgccccttttcacttggaacaaagatcattgtagttggaatgatatctgtaataaattgtgcatcatgtcccggaccactatacattctttttgttgaatatccaaattcttttgcatttttttcaacataatctacaaagtcagaataaaaatgaactgtatttcttgaccaagctttttcataacttgtttcacatttttcaacaactttaggaatagccttaattatttcaagaactttattaattacttctggatcttgatgccttgcatccaaagtgaatttaacataatcaggaattactgtatggatatttggatgagctgaaatctttcctgttgtatatactagcttactatcaagcttgtctagttcatcatgaagatattgaatagtttttacagccgcatatagagcatcttttctatatttcattggagttgttccagcatgatctgcttgacctttaaatgtaaattcataatttatcattccacaaacaccttcaactacccctatatcaattttttcatcttctaaaacaggtccttgttcaacatgtaattcaactagtgccctgtatttttctggattcattcgattttctatttttcccatatatccactagcttctaatgcttccttaaatgtaactccttcagtatccttagatgctaacataacatctttatcaaattttcctgtaataacacctgatgacatcattgctggttcaaagcgtgccccttcttcattagtccatataacaactgtgattggatgtttatgagctattttttcagttactatagtttctgcaacttctaatccagtaagaactcccaaaataccatcataattaccaccttgtttaactgaatcagcatgagatcccatcataatagcaggtaacttttcctctccaggaatggttgcgtatatgttcgccatatcgtcggtttttatttccataccaagtgctttgcatcttttgcaaaattcctctcttgcttctaaagcagcaggtgataaagacaacctcgtgattcctcctttacctgtatccccgaatttactaaatgttgtgattttctcttgaagcctttctttattacaagttaacatatgaatatccccctttaaatttagtatagtaattattttttcactctctttcctggttctactgctcttgcaggacatacagtactgcataattgacagcctacacatttatctactaacaatattggcattcttgtatttatgtctaccttaattgcttgatgcccaccatcataacatgataagtaacatcgtccacatcctatgcacttttgcctatcaaaccttggataacaaatactatctctatcaagtttatctgttggaacaatattaggtaaagcactaccaacaatttcagatatatttttataaccttgtgaacttaagtataatttcatcccattaattaaatcatcgataattctatacccgtattgcattacagacgttgttatttgcaaattttcacatcctaaggccataaattcagctgcatctttccatgtttcaataccgcccatcccacttattggcacatcttttagttcttcacaagctttcatatcatgaataaagcgtaaagcaattggttttactgcttttcctgagtatcctcctacactagtcttaccttcaacattaggttccgattcaaagttttctaggtttagattcataatactcttaattgtattaattgctgcaatacctgttgctcctgcctccattgcagccattgctggtatttccatatttccaatattaggtgtcatctttgcaagtataggtaaatttgttccctttctagtagctttagtatatagtgctaccaaatctggattttgtccaacatctgaacctacgcctttacttgtcatatgcgggcatgagaaattacattcaataatatctgctcctgcctctgtcattagcttggccaatttagtccattcttcttcgttttgccccatgattgatgcaacaataattttgcttggatagtcttttttcaatctttttaaaaatcctatattctcttccaatgtgtgatccgaaatctgctctatatttttgaaaccaacaaatggaacactttctttacttaaagcagtaaaccttggtgaaacctcctttggtacaaacattccaatagtcttaaatgctacccctgcccagcccatttcaaatgctttagctaccatttcgtaattacttccaactactgatgatgaaaggaaaaatggattttcacacttcaccccacagaagtctatttctaaatcaacttcattttctttaactctagattcagttgatattgctttcataactttgtcaattggtactgattcattaattttcccttttaagcaagcctccttacatggcttttcttcacatgtgtcacaaggaagtagattgggcagtttatttactgccccagccttattttcaaaccttaaagaacggataatagtatccacttcaatggagtggggacaagctttgcgacaaggtgcttcatcgcacaacaaacaccctgacacatattcatttgttgaaatatctttataaaataaactactcatttccattcctcctaaatcatcgcttatctgatgtttagccactataactctcattattcttaatctgtagataacagtatcataatcctagataacttgaactacagtccaggcactaaatatcacctaagccaagttcctatttactttcttcctactcgtttcacaaattgtccaaatcctgcttttccaacgaattcaccattatcataaactaaattcccacgcacataggtttgaactggatatccatgaagagtttttccttcccaaattgtatgatcataatctgaatgcatattctctaccgaaattgtgaagtctttatttggatcataaattacaatgtctgcatcttttccaactgttagagaacctttttctgtacatccaaatattttagctggattaaatgaacataattctaccgctctattaaaagttatttttccttcatttgctgctgaaagcatatatggatataaattttctacacctgcacacccatttggaatcttcgtaaaatcatctttcccccagtccttttcatagctttggaatgggcagtggtctgtagctacagtatcaatatctcctgatttaatagctttccaaagtgcatcttgactttcttgccctttcattggtggtgaacatacaaaatttctgccatcttctcttttataaacatcgcacgtaaattccaaatattgtgggcatgtttcaacatatatatcatgaccttctcttttggcttcaatagcagtttctaatccttccttgtctgccatatgaactaaatatagtggggctcctatggatttagctaaatgcactgcccttttatctgcctcagcttcaacaaattctggtctgcttaagtagtgataccatgctgaagtttttccttcttttaagaagttttcaatatttaaatcaatcaaatcgggattttcagcatggatgtttgtcatcgccccagtttctttagccttcaatagtattttcactaaagtcgcatcatccaccatcatcccctcttttttataaactaagaaacatttaaaactaggtacaccatattcaaccgcatcttcaaattcatctaagatagttccttcatttaaatcagttatgatacaatgaaatgcataatctacgcacgcctctggatcacacatttcttttcttgtttcaatggtttcaattattccgttgccttttctttgcattggataatcaaatactgttgtaacacctccgcaagcagctgcccgtgttccggcaagatagctgtcagctgaaacagtacctccaaacggcatagctaaatgagtatgtgcgtctatagcccctggtaatattaacttgcctttagcatctacaacacttgcaccttcttctgaaaaacctgttccaatcgctacaatctttccaccttttacagcaaggtcagctacataagattctaatggtgttacaatagttccattcttaataattaaatccataagtattctccttccatttatatatatccttaatatctaaataactaatttagttaataattttctctttaatgcttctgctttttgttgtacttttgatttgagcttcctaatgtatttgtatttttaataaattagttcttttgtgataaattactttctcaaattaaaattttgttatataaattttaagatgattctgtgtggatttaaccacacaggaatcaatttttatcatattattttgttgcttcttcccaatactttgaagtgaatgttgtatcgtctaccactggagttttagctaaatctttattataaagttttaagaaatcccctgtttgcttaattgcattcatatcgatttgtccaatttttgaagtatcaaatccttgaggtgctacaagtttagcaacttctttcgccatataaacttggtgatctaaagaaactgatttatctacatcataaactgtttttcctgctgcttcaggatcttggacagcatctttccaaccttttatagatgcctttaagaaacgaactaataaatctttattcttacctgcccattcagagtttacaaataagcaatcttccatcattgcaacactttcattgttcatatcaattacatttaaatcctctttcttcatgccgccttcaagtaataaaccaaattcgttataagtcattgctgatgctgcatcaactgatccttcttttaattgatccattgtaaagtcttgttgtacaagttttaggtctttctctttatctaaattgtattttgaaagtagtgcaagaagttcatattcattaccaccaaaccagttacctacttttttaccagctaaatcttttggcgaattaatacctttttcttttttagatactagtaacatgcctgatttttgaaatacttgagcgatttcttgtaaatcatacccttgagcttggtaagtcattaaacttgaaacccaagttacccctatattagctacaccattataaacattttgttctggaataatgtcacttcctcctggaagaatttgaatatctattccttcatctttatagtaaccttttgctgctgctacgtaatatcccataaattgtgattgcggaagccattttaattgaagtgttactttttctaactccccatccttctttgtagtatcctctgatttagttgcatctttcgctgttgtttctgatgtttttgatccacatcctataagcatcgtccccatcattaatacagctaaccctaaagctaataacttctttttcataataaattcctccttattaaataaatattatttatcttatacatgccatctatgtgttctcttgaaattctaagagatatcggtgactttcaattttgcttataaagcaaatagtatattaggttgaactaaacttttctattttaaagttggtattatctttgtgatgcatgccattttatggttctacgttctattaataaaataattaagtataaaacaatcccaactaatgctgccattactatataggaccaccccatggccatcattccttttcttaaattatctttaattccaaacccaatccctgaagttgatgctgcaaagtattcacttatcatagccgccattattgctgccgccacattaatttttaatgcagttaaaatactcggaagacaattgggtaaacgaagcttgaaaaatataattttttctggtgctgcatatgactctaataaatcttttgcaaatggttttaaatcatttaatcccctataggagttaattgccatagctgccatacatacaaccgttacaacaccaactttttgtgcaaaaccacttgtaaaccaacgattcataataggcgataatgcaactattggaattgcattaaatgcagctattacactaagtcctgtatatccccactttggaaactgcgtagctatcactgcgacaataaatccaattatgcatcctaaagcaagtcctaccaatgcccctgaaactgtaatcatcgtgtcagttagagctttagaaaaattatcacttaaagttttaataatttgtgatggtactggtaattgaaagggtttaaaacctaatgcatcatgaatgataccaacttgccatgcgattatcattaatattccaaagcctaaaggccataagacatttttaattttttcattcataaaattacctccctatgtagtctgttttctccaaggcatacaaattttttcgaataatattactataaaataacttaaaatccccattaaagcgctggtaactactgatccccagaatacatcttttgttcctgagtataacgagtataaaagtttcactccaattccaccacttgaacctaacatgtcaactaagatagatgctgttattgacattggtgccgctatttttaaaccagcaaataaatatggcattgaatatggaatcataagcttataatatatgcttttcttttttgcagcatatgagtatagcaattcttttttatcgctttctacactatttaatccactaagcatatttactgaaactgggaaaaatgtgatatatgctgcaattactattctagaagtattcatatccctgactaaagtaaagattataggagctaaccctaaaacaggtatcatttgtgatattattaaataaggtaatgatattttttctgctattttcgataaactcataattattgctaaaacaaatcctattgcagctccaagtgcaaacccaaatacagctcttgaaaaggtaagtccagccgcgctcattaaatcagtgaaattttctgctattgatatgatgacactatgtggataaggcaattttgctccagccattggatcatgcatcacttgttctagaaagaaagctactaattcccaagctataaagatgcctatagcccaaactagattaactttatatttctctttcctgctaatcataatcataccccctcaaagctatttcttattttggttatataatcataaaattgttttgactgttttgactccatatttcttggtcttggtatgtcaatatcaatcacagcagaaacacgtcctggatgtggagataaaaccacaactttatccgataaaaatactgcttctgaaatattatgggttacaaaaactactgtctttttggtctttgtccatatttctaaaagatcttcatgaagcttttcacgtgtaaattcatctaaagctgagaatggttcatccataagaagtatttccggattaatggctaatgctcttgctataccaaccctttgctgcatccctccacttaattcataaggataatgcgtaccaaagttagtaagtcctactagatcaagcatttccgtaactcttgaagtacgatcctgcttcttcattcctagaagctccattggcatacaaacatttcttcttactgttctccaatcgtatagaactggattttgaaatacgatgccatatttcttttgaagtcttatttctcttgggctttgtcctcgtactatcacttttcctgaagaaggttgcaatagatcagctataatacgaagtaatgttgtctttccacaaccagaaggacctagtaatgaaataaattctccttctttaatttctaaattaacattcttaagtgctgttactggttctccaccattcttatcttggtaaaccatacttaaatcttcaattttaatttctactttttcttctcttgtcctaaaaacatttctgctttcaaattctgtatctatttcattcaacatactcattgatttacgcctccttttaaacaaaaaacggtacaaaactatttgttttgcaccgttgcaattattttatatttaccataatctactgtatatagttaataagtcttcctttttaacttcttttatagtattcgatggacttccactgttcatagcatcttgcgccatcttatctactactttattgaattcttctttattaattccatactcttttaaagttggtatttcacatatgttacataactctgttaatttttctagaaaagcttctgctgcttccttatcacttttcttatcatctgctgcattaattactctacctattgaaccaaaacgttcatagcttccatccaaaacataagataaacattcctttattagcatggcatttgaaattccatgagcaacatgaaaattagctccaattggtctgctcatgccatgtaccaaggtaactgaagaattatttatacatacaccagcttcatatgcagcaatggccatttcttctctagcctttttattgtcaccatctttataaaccaatggtaaaaactcaaaaattcttttgattgcagataatgcaaaggtatctgttagtgaatttgcttttcttgatgtatacgcttctactgcatgagttaacgcatccatgcctgttgccgctgttacgcttttaggtgatgtcattgagaatttggaatcaatcactgccaaatcaggtagtaatgcttctccctttagaagcatttttatattcctctttgaatctgtaataaccgtaaatttggtagcttctgaacctgtacctgctgtagttggaatcaaaaccaatggtggaaaatctccttcaattgtttttcccatgtaatcagatattgaaccttctaattttgtcatggcagcaatagctttaccgctatctaatggacttcctcctccaattgctatgcagaaatcacatttagcgtttttataggcttttacgccactttcaatcattaaatcggttggctctccaataatatcattaaaaatttcatattcaattcctaagttatctaaacaatctgtcaaaactttaactgttccaattctagttacgttttttccagatacaataaatgcttttttcccaagggattttatcaaactctcgcttgattctaatgcgttatctccaataatcgtacgtcttggtaaactaaactcatatgccattttctcacctcatctagataaattgtttgtctacaattccaagtacttcgtctaatttagctaactcttcttctaattgctccttagtaattattagtggtggagcaacaagtatcatgttctcatgagtatatgtcataaactttctttcctttaataatcctaaaattttccccataactccttctggatcctttccatatggtactaagggttccttgcttcctttatcctttactaattctactgctgaaaataatccaatatacctcacatctccaactgatgggtgagaagctttcatctcttctagtttttcaccaagtacactacctacttcgttaacattttttagtatacctgcttcttcataatagtttatacacgctacacctgctgcacaagctaggggatgtccactataagttagtccgcaagataataaattatcatcaaagtaagctgctatttctttacttactacaactccgccaagttgaacatatccacaagtaacaccttttgcaaaagttactatatctggttttacatcaaaattctcaaagccaaacattctaccagttctgccccagcctgtcataacttcatcacaaatcattaagattttaaattcatcacataaagctctaactcctggaagatatccttttggcggaatgataactccatttgaacctgttatagtctctaaaactattgcagccacactatcaggtccttcataaattatttgttctcttagcttggccaagtaatattttgttgctgcttcttctgattcgaattctattggttctctataaatatatggatcaaagaattttacgaatcctggaataccaggttctaattgatatcttctaggttcacctgttaaattaccagcaccaaacgaagatccgtgataacttctataacggctgaacacctttgtcttacctgtgaacattcttgctatctttacagcattctcatttgattctgcacctgcatttgtgaaaaataccttccccatattatcaggcattaattcaatgatcttctttgcaagcttggctctagattcagctccataagatggccctacaaaacaatatttatctacttgctcttttattgcatctccaatcgccttatttccaaaacctaaattcatattaacaagttgtgacgacatatctgaatatctatttccatcataatcccaaaagtaaattccatcagctttttcaactgaaattggatttaaatttctttgtttactccacgattgtaaattatattcttttaaagtatttctgatttcttcaccattcatctttatacactccctcatatacattaaatattttcctcaaataaaaaaacggaacttattcaagtgaacaagctccgttgctgttatctctattaaattcgttttttctttaagttgtttttattatatactagtaaaactgttatatcaatgaataagtgactaagtttatttgtgcaactgcacatttatttataaatattatattaaggacggctatgctccacatctcatattaagaaattttttactaaatcctaaaaaataaaattaagactatacatttacaaattctatactaattactgaattgaatatatgtcaaagcaatttctaactatgcaaagtatcatgtgatagtttaaatttttacaattattttaaaacaacaaatttatcaacataatgttttaactcactaaaatatggcatgtctacattgtattttttcccactctcaaatacatcatagaccattgccttcatttcattaatagagtgagaaatatgtcctttaatcattaactgggctccatcagtacaatatatattttttaaagctggaattaagacatctagagatgagtaatatagattttgaggctctattttgtctatatctattccacgagctttacaaacgtttagaccttctctaattgcaagtattgtatgtttcaatatttcattgctttctgcaaaagcttttcctgagcctgccttcattactccactgagaagtccagctgcttcggcatagtgagttaatatccaaggcaatatttgtgtcgatacttctggatttaaattggcagattccattacttttgctatggtttttatacgttttgttatctttccatccttttccccaagcatagtaggtgcagttttgtttccaaatatagtacagtaaatcccctcttcgtccattcctccacccataatatgaggaaaaccgaatacatattgagaaggtgataaatatctttcaattttatttgtattctcccaaaaattctgaaaaatcagcacatcagatttgcctactttattttgaatttgctgaaataattcatccaactgagttgactttacagaaacaattataaaatcaaatctatcctcatttgaaaagtcatttacaacacaaggcttatatattaaatccttaaaattttcttccccatttctataatcagaacagcgaatacgaattccattttttttaagttctttgaaccttttttctctagccaagatagtaacattatttccaacttcactcaactgccatccataggttgttccaataacacctgctcctattattaatatattcatagtatcactcctaatttacatattctattcaataggaatatacaaatttgcccttccatttcttccattaggttcaaaatttttatcgtagaactcaaaaacataattgtttattggtataatttctttttgtttaactagaccgtagtaaatattatttatagtaaaaggtatatcttcaatgttattaggcagatcaaatattgcatatttattgccttttactttttttatatccataccttctggcagattataaatatttgatatttccactcctactaaacaggtaaactcttctgaattatcgcagatgtccaaactatataaaccatcataaataatgttaccgtctattttatgcatattagaaacaaactcattgaaaagcttcggtacttctttcttactatttctccccgtatatttcatgccaataacataaaattcctttctttcgataattttatattgcaattttgcagactcattcttaaattttaaatcttcttctgtaattcttggtttatacaaattggataagtgcaccccaagtgttctatatttcttaggagttaaaccataataattttgaaatactcttgtaaaagcttcttgcgagttatacacgtatttaaaagcaatatctaaaatattcagatttgtttcgataagatctatagccgcacttgtaagtcttcttttgcgaatatattcaaaaattgtgtcattgcttattactttaaaaattcttataaaatgaaatctagaaaatcctacttcactggcaatatctgaaatatttatttcattcttaatattattttcaataaaatctattccttttaaaacatatttaaaatagtcaggcaattttatctcctcctagctaattatatattatttaatcaaagtttttttgatagcaattgctatgttttcatctcttataatacatctttaacaaagaaacctaaataaaatcgtagtttttcttctaaatttgatggattatatccagtaatcttttcaatctttttaagctgattatttactgtattcctatgaatatattgtttctcagcaacaagactttgactaccgttgttctgtaaaaacatatataagaagctcattaaatcagtattattttccttatcatatttttctaacttacctagagtatccttgtaatattctttaagcacttctttatctttagcatttaaaagcaatttatgaatatctaatttatcataaaacaccatttcttttccttgttttttggccatcgtcattgctgtgaaagcattattaaaattctccgcctgcattttaatgcctgctttattttcacttattcccatatgaaccttccatgaaggttcattccaattcttaaaaaaagtatcaacaaaattagtgacatcgtaatttccataattcacaagagccagaacccaagaatctttatatgaaaatgaaatatataattcatgaatacttctagctaatctttctgaatacattttaattttattcatatcaaattctaattgattgtcttctttgtgttcaaatgacatgactataaagcagaaatgactgtctctcaaatacccatatctctccatctgtaagattaatgtttctatatcacctgttttaaatataatattcttaatcgtacttgctatacttatttctacttgctcactttgcattattcgataacatatattccgtgttaaatctaccattcttgtttcccatggaatagtataaagaggcatttttatttggttacaatattctataacatcgttaggtattgacttggtgtatggcccaatatttacaacaaaagcgcttgcccgagcagcatatagcttttttgtatattctaacaaccatccatcgccatcatttagaattcctgatgtaaggacaacttcatttccatgaagaaattcactcacctcatcattttcaataatatgtacccattccactagattattaagacctttctgtcctgctagcagtttcatttgatacaaaacggccccatttccaaataattttcctacagtaattgacatattatcaccccaattttatataaaactataagagttttatgcctattatatcataattttattttaattaaattttattaaataatacaaaaacttatttatattatttatttataaacagaaacttaataaagttaagttggttttacaattagtactatttactataaaataattcggatgtactctgcataaaaaaattctagccatattacttaaagcaataaataaagaggcactttgataaaaatcaaaatacctctttattttattgctttacttattattacttgactttaaatattctttaacacttggcgatattcctataatatatacgctaaagatatacactatcattaacatagtaatcattatattaggcgaaatcataattgctgcaactgccgctagaatgacaattataagcaaaattatcattataatcttagcccatgcttttcctttaaatataaaatataatagaatagcttctactacagtcctagttagtcctgaaattattcctatgtttccttgcataaaatagctaaatgcagttgtaactatacttacagctaatattgctattaccatggataaaaatagtttttttcctttttctacacttttcataatatcctccataacaatgtattaaaccaattggatataacgttttaattaaataagttatctctctttatttaggacgtaattattattaataattccttatttatttttacttaacattgcgttattattcctcaaaaataaatctttatgtacattaccatattttatatttattataacatgaattcatagaatttatattcttattttcattcataattattgggaagctaataaaagctccccaaaatttaatatttttaattatagtaacttagtttttacattgctttaaaaatatatttgttaaatttagttttttaactcttgatcttatttcatcattatttatgctatacaatcctaaatctttcatcctttcaaaatattctgctcctgaaaatgtatatctttcactcatttttccttccttaactttgtcatttgcatatgcaataatatcacctgtagcaagctctcttggcaattctaataaaggctttttctccaaatactgaactgcattataacctgctaaagtccctgtagtcatagcctcagtatgacctacaaagaatccacttttttcacctccacaaaataaattttcaacgccatttacttgcattgaattatttctaggcgcagcacataaatatctaattgaattaccattacttccaactagtggatctatataaactacattttctaatccttttattttccttaatttatctagtggatagtgagatgtcataagctttacgcgtcctgtatctaataatataatattctctgcaaattctaaggtcgcatattgctgacataccttttgttctaacttttctaaatgtacatcttccttaggtataggaataactacaactccatttttctctaattcttttattatgtcttttgataaagattctctaggaaattcacaagatccgctcattgcacccttcattccatttgctctttctcctactaagtcatttactcctgctctactgcttatactaactcttgcaccaaagctaggacatcttaatgtacacatgacgcatccatttccatacttcacacaattaggcattgatcctgttgatcctgtagtttctacaaatacatctccagttataatatctttattaaataataccaatgattttattttattgccttccatatttacatctgttattctactttgcaaaaatattttaactccacattctattaaatatcttcgaacaattggttcagctttacctatatcacatagccatgaatgtttgtgttctgggaaatctatattcttatgaattgctattgaatccataattcttatgaaatcacctgcaccaagatttatcagctcttctgcagcagtatatcttccattattcctcattatcccaccaacatttcctactccaagtagcaaatcagttctctcatataactcaacttctgcacctaattttactgcttctaatgcggcagagcaccctgcccatcctccacctataattataaccttcattttattctcctttaaaatagttatctgttatatattgtattcaattttttgtctaagttgagtcttatcatgtttactgatcaaattctctaaaaatttatcactacctattaacatataaaagagccaaaaagcttatcttgtctacttttgggctctttaaagatttataacactgactataattcctgaaataatttttatctagccattatataaatttttttcatgtcttccatattgagcttttgaaattcccctatggttctagtatctttgaagctacatttataagctaggtcatcaatttgatcatctgtcaaattaactccaagttcttttattgatattggcatatcaatagaatgataaaaactttccattgcttctattccctctaatgcaactttttctggattataaaagtcattggttattcccattacgtttacagagaattgtacaaaacgacttatattacttttatacacatacctagcccagcttccccaaactgctgccaaaccagctccatgagcaacatcaaacatacctccaagttcatgttctaattgatgacatgaccaatcaccaactgaaccacatccagttaaatcattatgcgaaagacttcctgcccacattacttcagcacgtgcattataatcttttggatttttcattaatatttttatattatgaattactgttctcattaatccttcgctaattctatctgttatctccatgctctgttcttttgtaaaataacgttccatagtatgcattaatatatcagtagctccactggcagtctgatatttaggtaatgtataagtaagttccggattcataattgcaaatttacaacgtgcatactcagaattacatcctcttttcagccatccttcttcatttgtaataactgatgaattgctcatttcacttcctgcagctgcaatagttaaaactgccccaacaggtaagcagccggttggaataacttttttactatatatatcccatacatcacactcattagctatgccatatcctattgcttttgctgaatcaataacactgcctcctccaacagctaatataaaatctaccttttcctttttgcataaattgattccttcatatacttttgaaagtctaggattaggtacaactccacctaagctaacataatcgatttcagcttcctttaaagattcaaaaattttatccaaaagcccagacttttttgcactgcttccaccaaaatgaactaggactttcttacaattttgattctttataatagtgccgatctgtttttctgaatcctttccaaaaatcactctcgtaggagcataaaattcaaaattcttcattattaatacacttccttatttctaatttagtattaagttctttaataatatattactccttcgagacaactctaagtcaagagaaatatatgaataaaatggtaaaataaaaaactaacttcttgattgcaagagtaaatttatcttacaagaagttagtatcaattgaatacttaacatatcacagcttcaaataaaaatttattactgaacacatataagttaaaattatattactaaactaaatttaagatattgcattataaaatacactcttaaagttttatattaaaataaatgatattatttaaaatattaccaacattctaagttttagatttttatctttctatgtaaagacctttagagtgtgatgttattcatttcatttatcatattggtgactagatcatccattcctatattctctagcccactaggaactataaaattaggatcgtctaactctccaccagctttagctataatttgttttgccctttcagcattattttcatctgtatttacaattaccttataatttacatcagctatttcttcaaaaccgcccataccgcttaccattggatttgcagctgccattggcccgtaacctgaatcaaccgtaggattatcgttagatagtattaagtttgccagactatttgtgctgctttcagtgcctggcctgttttgtccagggttatcatttgtataatgatcatttatatctgccacagcatcttttatacctattttatttaatgcttctacagcttgattagctgcttttataccactaaagtaaccttctatcttcataaaaaaatatctccttttataattttattcagtggtattttttcactatgtttaaactattattcctaaatcttgaatatctaaatatctttttaatttctttacactaaaaagcaactgcagggttgcttcatttacctatcccgcaattgcttttttataattacctatttattgggttcacatggatatatataatttcctatggtacgaactcttaatctttctggatcacattcttcttgttctggaattacgaacactactttacgctcaatagttccacatgcatcacgatcgcaaggatcttcatgtgccattgttacaaatcctttgaatgcaagtattctatcacaatcatcatataaaatagctgcaatagctacttttttgcctaagcaaacattatttacttttatttttactgttactaattttgcaccatgcttttccaaattaactggttttgatttgattgtactacataattcgcagtcatgcttagtacatttacatttattttcatatctttccattctatacaactccttgcatataaactcaaaatgaaataaaaattacttatattgacttggtcattttaatttttttatagttacatatatcattaaaatatatcttcaacataaagtataagttgatatatgttctccaaaatcaaatgagtatctttaaaacgcttttatttcacatatgcaatgctttatcagcaacgaattttcaatgaaaatatttaatgcgcttcctatgtttataatatattctctaataaatatttatgtgaaagaaaacgacattttttcctataaaataaaatcatcacttaaaataaaatgatatttcctgtaataatcttcttttttctttgctattatttgaaaacaaatataaaattagttatgatataatagatatacaactgttttagggggacatatatgattggaacattacttataaacaggtatgagttgcttgaaaaaataggtgaaggtggcatgggaattgtctataaagcaaaatgccatttattaaatagatttgtagctgtaaaaatattaaaatcagaattaagcaataatgaagaatttattctcagatttaagagagaggcaaattcaattgcaagtttatcacatccaaatatagtaaatatttatgatattggctcagagaataatattaattttattgttatggaatatattaatggtaaaacattaaaacaagtattaaaggataatgtacgactcagccctgatactaccttaaatatatctttacaaatggctgaagctttaatatacgctcataaaaataatataattcatcgagatataaaatgtgataatattttaatttcagatgataacattgcaaaattaacagacttcggaattgcaaaacttccaaattcttcaacaataacaaattcaaataaaattataggctcagtgcactacttttcaccagaacaagctaaaggaggatatgttgatttcagaactgacatctatgctcttggtattgtcatgtatgaaatgattactggaaatgttccttttaatggaaagacatctatttcagtagcaattatgcatatacaagaacctgttattccgccaaagaattttattacagatatacctgagaacattaatttagtaattctaaaagccttagaaaaaaatccagccgatagatttaaatcagctaaagaatttgctaatgttttaagttcactaaaagaaaatcccaacttaaaaatagactttaatagcacattaatagatgattcaactgtcatgattgataccaataaagaaattgatcccactgtggttatgagcaaagagccaatacaagaaactgtgctattaaagagcgtcactaataatttacatataagcaacctaaaaagtaaatcaaaaaaagttattttatcaattgggctaattgctttttgcattgctgcctttgccttaggtaagtatttctatggaggattatctaaaaatacaggatataaggattctcctataaatagtagcattgaagaaaatactttaggaaccactagtaaagaaaataatgacaagttgcaaccaagtgaaaaaaggcaagtaccactattagttggaaaatctcaagatattgctgaatctattataaatagtaatgaatttttacttggaaatataggttatgaatacagcgatactgtatcaagcggcctagttataagtcaatctcctactgttggtacatcttatgaaaaaagtggaaagatagatttgattataagccaaggacaaaaagttactcaacctgcaccagaaacaagaaaaaataatagcaataataatggcaatggtaacggtaatggaaaagaaaaagagaaaaagcaaaaaaataaatgaccaaaggaaagtttatctccttggtcatttcttattaaaattgaactttataccctgatatcagtagtttcacgacagcattataacttttaattccttctgtttgaccaccagcttttaatatcttatcatatacattatcatacagctttgatattttacctctataattgctccagtataatgaatcattttttaattctaatttcacattatctgaaagttcattatttattcttttaaaggcttcttgattgaaataatataaatcattcatgcagtaagaatacgccataagatatccgctatattgatattcataatttttagagttagtgcatgctagaaaacttatataatttgcctcatcttcactattaaaacctcttacatggctcaattcatgacaaattgtacttggaacattccatttgggcatatcattattataattagcttcaagggtaaaagttgtttctccctccaataattgatatgacataagttttgaaaaaacaactggctttggatttggataaaaaccttgcaaagacggataaatttctcctatatgttccatactgattattccttcttttcttgcatcataatctagctttaatagtccatcttcatctctttttatctttccatctaactcattcaatctaacttttaaatagtcacaaagttctattaatttttcttctgaattatcctgcacttttaatccagttaattcaacaaaatttaatctgaatgagtttatccctagagtcattatatttaaaaatacaaatgctgatatatatataagcacatttgaagtagctcttatcattattttttttaatgaaagttgttttgaaaagagtagatatgtataatttaatattcttacaagaatatatataaggaaagcatataatattatttcgtatactgaaaatggtattaatgacaaacatcttgaaagtgtatttaccagtgttaaataaatatacttgtaatagaaatttgaaaatccatatatataccgtgccattgcaaatagaagaatgctgaatccaagtagtaatccacttattataaacttagttttaattgatatattcttttttctttttagtaaatttcccattctcaatgttcctttcttactaagaaactaaccttctaatattgtaaatcagttccaatatcattataatatcactttttatttttacattctatactaaaaaagacagtaaatttataaatacaaattcactgcctttttataattcatatacatatcttacaatattgattttgtaaataaaatttactcctaaaatattatatgaaaaaccttctaaatataaagtgccatataaatagcttatatgacactttgctaacattagattaattatatatgatttgcaacctcatatgcatcccagatggcatacataatattcgaaaccttacgtgcatctcctaaaagatagatttctggaatctcaaattccaattctctatataaagaattttcttccttataccctactgaaagtattactgaatcacatttaattttttctactccgttttctgtttctatctcaagatttccatccttataagctttaacttttgaatttacttttacttcaataccgttaaatggtattaatctttcaagcatttcactatttgcagaacacaaaggaccatttagtgcaagaatcttatgcaatgcttctactatagtaactttcttacccttcttagctagatcaagcgctaattcacagccaactaatccaccaccaattactacagtattattagctgactctttctttcctaataatacatctgctgctgtaaatactctctcatcatctcccaatgaaaatactttaggagtagatcctgttgctattatcacagaatctgccttatgacttagtatttgttcttttgtaatttcgctatttaaattgacttctacatttagttgcttcaatgtatttgtataccagttagctaatgcaatatcatcttctttaaagtctggcgaacctcctggtataagatttccacctaatctatcagtcttttcataaagtactggttcatgccctctaagagctaaaactcttgctgattcacaacctgcaactccaccaccaactataagtacttttttctttcctaatataggagttaatgcattgtccttttctttacatgcttgtggatttaccgcacagttaagcatagcataattttgaagacgccccatacatccttcttgacatgatatacaaggtctaattgaattacacttatttgctcttaatttatttacataatcaggatctgcaagaagtggccttccaagactcacaatatcacaagttccattttcaattgcctcaagagccatatcaggattgtccattcttccagcacatattactggaacatcaacagtttctttcattaatttagcatatggtctgtataaccccttttcttgatacattggtgggtgactccaccaccatgaatcataagatccaacgtctatatctaatgaatcatatccataggatacaagtaacttagcagcttcaataccttcttctaaatctcttcctttttcaataaattcttctcctggaagtgctccatctcttaaatctttaataaaactctttggagaatatctaagagttacagggaaatcctctccacatctatctttaatttcttctactatttcatgtgcaaatctaagtctattttctaggcttccaccatattcatcagttctatgattaaataatgaaatagcaaattgatctattaaataaccttcatgtacagcatgaatttgtacaccatcaaatcctgctctctttgcattataagccccatctccaaactttttaactatagatttaatttcatctattgcaagttcacgacatattttatcaagccatctatgttgaattgctgatggtgcaactggtggatattctccaagattagtaggaattgtaacccttccaaatccacctgacatttgtaaaaatacttttgcattatatgcatgtatcctttcagtcatttctttgcttgttctaacaaaatgtactggattatgtgtaggacatggagtacttggcataccatgttcttctacttcattatctacaaaagtaactccagtgataattaggcctgtcccgcctttagctctttcagtatagtagtcaattcccctttgattaaatccaccttcgctatcagctagtccaagtggtcccattggcgctaatgcaaaacgattttttatctcacagttaccaattttaataggttcaaatagctttttatacttattcataaatttcctcccataatgtttaaacgtttaattatctgattaccttaattcctttattcaactatattataatactgcaaaaataaacatgtcaatttttacatgtttaacagttaatatttttctatttcactttatattttactatgctaaaattgtcattggataaactcaagcaaataacattcaaataagctacagaaatattagaggtgcatgtatgagaactttaaaatatgctattttaggacttattaatagaaatcctttaaccggatatgatataacaaaagaatttaattctggtttagttgaattttggtatgctaagcatagtcaaatataccccgaattaaagaaattaaccgatgaggggttaatttcatacgagactgttatacaaggagaaaagttagaaaaaaagttatatactataactgaaaaagggcgaaagtcattgcagaaatggctttcaaaagacgatcctttagagccaaccccaaaggatatttttaaacttaaagcttatttctgtgatgagatggatcacgatactttaataaagcaatttaaaaatacactaaccaaacacattgaaagattggaataccttgaaaattcaatggatgagcttttaaagacaaaagacattttaacagtatcctcttcagatttcgggggctatataatattgaacggagccatcatgagggaaaaatcatacatagattggctggaagattgtttaagaaaaatgcatttatagtatgcaattttcttggcaaattaatctttaattgcttagatatagataaacaatatatgacttagacttatgcaatcacctgccgaaagtaaaaacattattatttcacaggactatgaaaatttcgctgaaagtactaaattgctggttgcaccactaatgcttgctcccaatttcattgttacaagcattagttgaacaacctaaaattaagagcttttaacagctcattttcaatgcctgctgcataaaaatgtttctactttctaatatggtatttattaaaaactagatttatgtgataacttatggaaatcacaaattttgattccgaaaagctatgaaaatatcgctgaaggttctaatcagaaggttatatcctctttactaaaataaattaaaaattcaagttatttttatcaataaattagaattatttttttaatgtgaaaaaaattatataataaaatatcttaaggaggatcacaaaaatgaaaaactctagatcaaaaagcttatatatattagtaataatattgtttatagtaatcatatctgcattttcttttttcagacattccaatagtaatctgcccaaaggcaatagtgatttatcaaataacgaaagccaagacccttcatactataaaagtctatatggtacttggactattgaaaagcatataccttcgaatataaagactactctaagcgaatctactatatctctatgtataggtcaaaaatttactatagagaaagataagatttcctcaatttacggagctgtatctgatccaactattaatgaaggaacaattacagctacagaattttataacacttataatgatactttcaaaaatcttggtatttcaggtgataaaattaaatatataaaaataacgcagcctgaaaagacaactcattctgcaactctttttattacagatgatgaaaaagtctatgctctattaggtggagcactttttgaattaaagaaacagtaagaaagctaaaaagataactaaattaatactagttatcttcttagctttcttatgacttatttccttgatttctccatgaagtaacatattcatctaaaattttatgaagtgcctctccaatccttgaatatgcatcatcattaagattagccagagatattctaattgaccactctggtcctttaaaccctccaccacttaatagaactatagatgattcctcagccaatttgtataaaatatctactggcttatagttaatttgaagatattcgccaaattcacttccataatagcaagtagcccattctaataaatcaaattctgtataatatgcagcatcatacggatcttctcttaaatctaatcctagacccttaaacaaaagtttttgtcttcgtttgcaaatatctttggtttgtttcttatatgtgttttcttcgtctaatagagcaaacgcacaaaagaaggccatttggacttgctgtggagttgataatcctgccgtgtgattaagagctacttgtcggctgtctgctacaattctatctataaattttatatcatctggagtcgttgaaagatccccataccgctgccttaactcaacctttttatcttctggtaaattctttaataatttatcaaagatattctctgaataaagtgatattgttccaagtctccatccagttactccaaaatattttgaaaaagaataaacacctatcgtattatatggcaagtctgccattagagatctataattatttacaaaagtgctgtaaacatcatctgaaataatcattaaattagggttataatcttctactatatttattaactgcttaacgctctctggtttaattgctacagaaggaggattacttggattaacaacaaatagagccttaatactacaatctttaagcttattaagttctgattctgggtattgccacgtatgagttccatcctctgtaagttctgtcgcttcaatatgtataatttcaaagttataacgcggcaaatgtggtatttccaaataaggcgtaaaaactggaaccattagtcctattttttctccaggagccagcaattcatttgcgattaagctatcgaatatataacacattgctgcagtagccccttcaactgcaaaaatattaaatctccctacaggcggtttattgtaacaaagctctgaaacaagatactcatgaacaattttttcaatatgtattagcatccgatctggcactggataattatctcctataatagaatctgtaagctcaaatatccaagagtctgcatcaaacccttgatttttaataccataatcgcttattcttcttaaaagctctattcctggcatctctttattttggtctaaaaaatcataaaatctttcagctatcccctcttttttaggcataccagctaaatcgacatcattccaaactcttcttgtttcttctactgcaaaaattccaaaagtaaaaaaagcttccctaggtgttgcagcagtccagttaggattacctcttcctgcatttaataacgtacgggcactcttttttctttgcccctcagctaaatttattaattcattcttgaattcaaatggacttattttaccataaactttttctatttcttgacgctgaacatttttaatactcataaatagtactccttactcaagttatatgaacatatttgttattattgttcaacaagttacgataatttattcctaactaatcatataactttttagaagaatatcttttcaaataccgaaaaattatcaaatattcacttaaattcccacggaaatgtctcttgaatataagctttgaagatgttattattatttcacggcaagaaaatgcttgtcattataagtaattttcgtgctagatggggagctagcggtgccctgtaacctgcaatccgctatagcaggattgaattctcattataggctttaatccatttggtcagtctaatacaagtggtgttgagaatcgggtcccatgcagcagaaacttgtgaattccgtcagatctggaaggaagcagcggtaaatgataacttctgagtgccgtggataaacctagtttgagctaactatattagtagcgcaagtatgttaactgtcaacaatgagtgcacgtttccttgattattaattctgagatattcgttaagctcttattttgaacctacaaattaaattcgggagtttaatatttagatgatgaaatgtacttttgagtgaatccttttacggttttaaaagcgattgaggcatctgtgaaaacacccacctatcgagagataggcgtcaaaattagagtaccgatattttggatcttattttagagatttaaagccaatgcttaataacattaagcattggctttttgatttcttgcaaataaacgaggttctatccatgattttctatcttaataagttttaaaactgatgataagccaattagaataaaaaatgcaactgctaaaaagcatgatatcatgataacaacgccttcccatccgtataaagaccaaaacgttcctccagcagttccaccaacgcttgaaccaacataataaaataataaataaagagatgacgcctgagccttatcatgagttgctattttgccaatccaactactaattattgagtggcctgcaaaaaaaccaaatgttaaaagagctattccaataatctttagcaaaagacttacatttaatgtaatgcttatcccaaataacattataaaaattgaaatgcataacattatatattgtccatgtttatctgctagacgtcccataaatgttgaactaaatgttcctactatatatattacaaaaataaagctcactaaggtttggctcaaattgtatggtcgttcaattaattgaaaacctataaaattatataacgaaacaaaacttcccataattaaaaatccaataccatataagcaaagaagattaggattctttaaatgattaaaacttgatttaattaaattcttaatttcaaatgatctagcctcgaaatgctttgataaaggcagctttctccaaaacaaaaaacttgaaataagtcctaaaatacctataactgccaacgctaatctccagttaaaaaaatcattaattacccctataataatacgtccactcattccacctatagaattaccacttatatataaccccattactaatcctaaacttgatttgtcaatttcctcactaatataagccatagctattgcaggtaatcccgctaagacaaatccttgcaaacatcgtattactagcatactgttaaaattaggaacaatagccgtcaatactgctagtattgatgatgcgaaaagagaaaaacacataattggctttctcccaagaacctctgacaatgaaccaaaaatcaacatactaacagccaatgtacatgttgtaactgacagcgataaactcgccattgtaggtgatataccaaattccttagacaaataaggcattaatggttgtgtacaatataaaatcgcaaatgtattaaagccgccagcaaataaagcaatactagcatggcgaaattcacgtgtacctttttgaatatagctcataataatcactccatactttattctatgaaacattgttataataaccactataattttagcacaatgaattatacgtttaatttataaaaatagtgtaatattttgtattaggcctatgataacgtttatagatgtatatttctacaattttcataaaaacataatcaaggtaaaaaatataccttattcttaaaaatgtaaccgttaaaaatccatctatattcttcctataattcaggccttgacattgatgcaatgtggagtttattatatgatagatactatatatagtattaaaaatataaaatataagcatgaaaaagaggtattgtatgtatccaaaagattttaattataaaatgcctgctgaatggactgctcatgagcgtacattcatatcttggccagtaaaagattcaatgtgtcatccagataactataaagatgtttgtgctggatatgcagaatatattcaatcaattgctgaatttgaaccagtttcagtaattgttaatccatatgaattggataatgtaaaaaaactttttagtgagtctaatatagaactactccctattgaacatagtgatgcatggcttagagataatggccctacatttctaattgatgacgaaggaaatagagcaggtgtaaattggaagtttaatgcctggggtgaaaaatatgcaccatgggatttagatgataaagtagctcctcaaattttagagcattacaatattaaaaaatttgatgctcctttaattatggaaggaggttctcttcatactgatggtgaggggacattgattactactgaagaatgtttgctaaatcctaacagaaatcctaaccttactagagaacaaattgaaacatatttaaagcaatacttgaacatagaaaaaattatttggcttaagaacggactagatggagatgaaactgacggccatgttgataatatagcctgctttgctgaacctactaaaataattattcaaacttgtgatgatccaaatgatgcaaattacaaaattactttagaaaatattgaaatcttaaaaaattcaacagacgcaaagggcagaaagtttgaaattatcccaattaatcaaccacctagagctgaatacaaaggagaaaggctaactctaagttatctaaacttttattttgttaatgatggtattatcttacctacttttggtggaaatgcatcaaaagcagataaaatggctgagaaagtattaagtttaactttcccaaaaagaagaataagaactgtagatggaatggctgttattaaagaaggcggtaatgtacattgcacaactcaacaaatgccatttccaagaaacctaaaagtactatagaaaaataagatgaggtgataacatgagaaaagttaaagttgcagctacacaaatgagctgttcttgtaatattgatgaaaatatttctaaagcagaaaaattcgtaagagaagcagctggaaaaggtgctcaaattattctacttcaagaattatttgaaactccatatttttgtcaaaaagagaaatctgattactatgtatatgctaccgaagtagcacaaaataaagcaataaatcattttaaagaaattgctaaagagcttaaggtagtgctaccaataagcttctatgaaaagaagaattatgctagatataacgctatagcgataatcgatgctaatggtgaaatacttggaacttacagaaaaagtcacattcctgatggtcctggatatgaagaaaaattctactttaatcctggagataccggatttaaagtatggaatacgcgctacggaaaaatcggtgtaggtatctgttgggatcaatggtatcctgaagctgctagatgtatgactttaatgggagctgaaatgatattctatcctactgctattggctctgagccacaagacggctctattgattcaaaagaccattggcaagcttgcatgttaggtcatgctgctgcaaatttagttcctgtaattgcatcaaaccgtgttggagttgaagaagatgaagattctaaaataacattttatggttcttcttttatagcaggtcctcaaggaaataaaattgttgaagctaatcgtacagaagaaacagtattagttgctgaatttgatttagatcaattggagacacaacgtattgaatggggaatattcagagatcgtcgccctgatttatataaaataattacatcatatgatggagatctaataattaaatagctgctattttcattattaaatattacagttttcgaaaaaaataataagagtaaaatactttttaaagcattttaactctctctaaatattttaaaaaattcattagttcaaaagctatgattataagatatcaactaatcttataaccatagcttttattttactcttatgatatttataatttgaattttccttttccccctatgtttcctctttattaatattttcataagctatttaccacacatcttcttacttattacatttcatagccttttattctgctattagaaattgctgttttgcaattgcttcctttatataaatgctctatatccctgattttccctataaattgtatattcttaaattgttttcttgttaaaattatatatttttccctttataaattgttttcttcatacctttttaaattgttaaatttaaacactttttaacttttaaatgtaaatatgttttaattcttatgtaattttacttttatagttctttaacagctttccttgtagaaattaatttctcctctacttcttttatgttatttctaatcatcccaatatataacatatctattattgctaattgagaaattctcgagctaattgctccttctcttattgatttttctacagctggtatgcgaattactatatcagaaatatcagctattgtattatttacactagcctttgttattgatataactggaacttttctacgtcttgcattttttacacacttaatgacttccttagtctctcctgaatatgatattgctagtgctacatctccttcttctaataatacagatgaagttatttgaaggtgagtatctgtattacatatacatctcttattcatcctgcttagtttataatagaagtcctggccaacaagccctgataccccaacactaaaaatataaatatttttagcgcttataagtagttctattgctttgtctaaacattcttcatctagtaagctgaccgtttgttccataattgaatctactgattgtttaattccatagataatattttttgttcctaaatcgttatctaaatattgaaactgtatagctcctgcttcctcttctttgctaatattaatagataattttagtttcaattcatttaaagtattaaaccctatttttttagcaaatcttactactgttggagctgaagtttttgtagcctcagctatatctcttgcagacattgatataatccgttccttagtttctattaaataatctgctattaacttttctctatctgtaaaactgtcataattttgcttaatatactgtaatacattcataatctcacaccttatcgtacttggttttgctcttacaattattttatattaaaataaaatcttttaccaccatctatatatttcaataaatataagtaatctttcgtaactgaagctatgacatttgttctaatatcagctttttgatttgttttaagaatctgtaattcccccatatatctcatataatttacattatccaatgtaatatcaccgaagttcttgtctattgtattaaatggctctatagtttctccattaagaagcaatctactttcagctgctcttattgcatctctagcctcatctattctttgggtataagtttcttttagcaattttagagttatatcattataatcttttaactctattagtagctcaactgcattaggatctaatgatgataaatcttctaattcttttttacttggaagagaatctccaatgaaaacacattgatttcctaatgcaaataaatggttagcagcttctcttacatttttccctctatgatcctctaatgttggtaatccatcttttaaaggtgctctccttctattattcgattgcacaaaagcagagactttaatccctcgctcgctcaaaatagcatttttttctttcatacattcttcagagattccagttcccacccttggataaaaattgtgaagtgcatctatattctcatagtctggtgaataattatctaatctctcaaaaaatctcttagtaattgttgatgcatttaattgaattttgattccataaggatttttgctcattctcgctatttcttcttcggtatatccaaaatctattctaatagtcttaacaccaatgttacctaattcttttaagtccatgttttctaattctaagaacttaaaagtattaggtgatatatcacttattatatccatattatattcttttgctaacttaaaaaattctattacttctaactttaagacattataatttgcctctggtatatgaagggatgtaaatatccttgtaatattcagattatgtgcatcctttaacaattttatattttcttctttagtattatccaatccaaaataaacagaaaatccataattcataataatgcccctttgctatatttatatgaaattaaataaaagttttttataattcacatatcatgataaattattcatacatctactatgattctattctcttattcattaactaaaaagaccctttcgggtctttttaaaattattcaattgggtcatcgaagcctaaaatgttagtaaatagatatccacttgcatatgaaaccaatactcctattaagaacaccccaattttcccatttgcaattaacaatgctaaaggtaatcctgatacgcccatagcaactgctcctactttaaatatagccattgctgcaccacctactgcagctcctaaacaagctccaacaaatggtttaccaagtggtaaagttattccatatattaatggttctcctattcctaaaaatcctggtactaatccatttttagcaattttctttagtctttcattttttgtttttcttagtacagctatagttgctcctacctgtgccattcctgctgttgctagtataggcaataatacagtatacccaacattcgctattaaatctgcatgtattggagttaaagcctgatgcattcctgtcataactagtggtaagaataaacctcctgatacagcacctgatataactgctataagaatattatctgatgctattgtttttgcaactaagaatcctatactatctgaaatagctcctccaactggttgaaggataaatagtgccgctaatgctgaaactgaaagtgtaactaatggagtaacaaacaaatctaatacatctggcacaacttttctgcatgctttttcaatgaaacaagctaacactactactaatattactgatataacccctccacgtcctggagttaacttttgtccaaaaagagttatgtttgcaagagttgctgatgaaagaattccgcctaatactccaccgagcattggcatttgtgagccaaattcttttgctgcatttacaccaactaaaactgataatatagaaaatactccatttcctataagccctataatttgagcagctgttgtttttgtataagcatctttaaaatacactcctgcaatattatttattgcaagcacaaggccacaagccacaaataatggaatcaaaggaatgaagacatttcctagttttttaagaatattcttaaacttagtatcattcttttccttcaatttagcctttgtttcagctactgcatcttctcctataactacctttgtccctactaatttctttacttcttcagttactttattaacctttcctggtccataaataacttgtagttgttcttttgtctcaactataccaagaactccttctgatttcttaattgcttctatattagcttttgaaaagttatttaattcaaatctacagcgtgtcatacaattagtaactgattttacattatctttgcctccgactaattctactaattttatagcaatctctttatttgtcataaatctcctctcctttacttattatctatttcttgtaacgctttagctatataacctttatttttatccaatttaattctcgcctcatctttatttagctttgaaagtatcataaatattgctagtttgacatcgtaatctgttttatttagtgcttctgttgcctcttccatgtttatacccgttgctttacaaactattcctttagctctttcaattagcttttcatttgtagctcttaaatctaccattagattttcatatacttttccaagcttaatcatgacaccagttgatatcatatttaatactagcttttgagctgtcccagactttagtctcgttgaacctgttacaacttccggaccaactactggtgcaattgaaatatgggcctcctttgcaacatctgaattttcattacaagtcactgaaactgttaacgcaccgatttcatcagcatacctcaatcctcctataacataaggggttcttccggaggctgctagtcctattattgtatcattctctgttatatttttactctttaaatcttccactgctaattcttctgaatcctctgctccctcttttgctctaaatatagcttcttttcccccagctataattccttgcaccaattcttctgaaactccatatgttggtggacattctgaggcatctaatacgccaagccttcctgatgttcctgcacctatataaattaatcttcctcctctatgaattctttcagctatcatatctatagcttttgctattttaggaatctctttttctacagcgtttgctacctttttatcctcatcattcatgatttttaccatttctaaagtcgatactttatctatatttattgtagtttcatttctgctttcagttgttagattttttaaatttaaactatccacattcatcgcctccatataaaacatttaattttgactacgttttcacttgatatatacatcataacatttttgaaattttgtttcaatatattttaaaaaatatattattttgtttctaaaatataatttaattatatcatctgttctctatgcctctaggtttaacaaatttctttatacaattttgttatattaattctaaacaaccttaataaaaaccgcttaaatgccttgtgtaaatactaatacaaattatctataaacattagcctaaattatcataaaaatctcttgcataagaaatttaaatatgttattatatcttcacggcctaagaacaaatgatattaagttgttcaagtaggcttatatattgattataaattctggaatattcgttaagctcttattttgaacctacacttaaaatacgggagttcaattatctagatgtggaaatgtactttcatatgagtccttttacggctttgaaggcgattgaatcatctgtgagagcacccacctatcgaaggataggggtcaaaattagagtaccggtattttggatattatataggacattctatgccaatgcttaatgttaagcattggctttttattttcatgaattaaaactaaaataaatgtttaagagctcaaattaatctctgctctttttagtaattatttttattatccgcatatgtgaatatagcctctatatctgcatttataatattttctcccgcttcaataggggtagtattactggtagatttaagagtcattactagtggtgtactagtggtctcattttgttcatttatttgaattggtataatattcaactttactttaagttgatcagctacaactcgtgctttattttgagcatcttgtagagctcttcttaacgcttcataataatactttgtttcatctgagacaataaagataatcccagttaatgaatttgcaccattgcttactgcagtatcaattactgcacctacattattaatattactaattaaaatcttcaaattgtttattacttcatatcctctaaaaacctgctttccattgatgtaatcataatttggccgtatgctataattttcggtttgtatattcttaagaggtattcccaatgctcttatactatttataacttcttgagttatcttagcattctcctcctgcgcaacttccaattgcaaatcttcagttataactccaacgactatttctgctaaatctggttttacacttaccgttccttttcctataacttttagcttattagatgagcattgatcatcgttaaaatcatttaagctatagataccgccctgccctaaagtatgcatctcattttccccttcaaaaaattaatcattaattcataatatgatgaatcactcgaaatgtctctaagctacatacatcaatcttcggaatactttatggttagaaaaagtcttaaattcatctcaaatttaaggcttaaatatactttactgaattcaagatcctaaaaagaataatgcttttccaccacttctcttgtaaatccataatcaatgatgactggctttccatcaatcattccccaactgcttttcctacaaaaatcccccaataacaacctataatttttctttatttcttgcaattcctgagtttttaaaaattcatccctattcgatacattaaaatacttccatacatataaaatatcacttatcttgcttgctttttgcattataagtaagctaaagtcacttgaaacttgtataacttttgcaaataacttagtatgatcattatccgaaatgatatattcagctttattttgtgctattccagccttattttttgctatcttcaaaacatatccatttcctaaatcgaatgctttcctgccagaacctgaaccaatatatttataatagccttgttttatattaagcataactttatcaaaatcaatagtcattctagcacctactcataactatattttaatctattcgaactctacatattacattactctattctattaaaatttgttcttattaaactaaattttatttttattagtgctatgcaatttcttatatagattaaaataataaatcaacatttgaatctctagcaaaccaagtgctcaattaagagcataatatagaaacttaattgcaatatattatatatacttataaaatattttgttaatccattggttttatatgcatatattaagcacaaccaatgttgttaactacattttcatatcgagttgacaatattaaatattaattatatacttgtcttgaaattatttaataaattggggcgtggtaaaattatatggaaaaattagcagaagaaattattaacggaagacgattaactagatctgacgatttagaatttttattaacttgtgatttaaagaaaatttgtgatggtgctaataaaattcgtaaaacactatgcggagaaagcgtggacctttgtacaattattaatggtcgcagtggaaaatgcagcgagaactgtaagttttgtgctcaatcaaaccaccacaaaacagaaattaaagaatatgattttttagatcctaatgtaattttaaaagactgcaaaaaaaatgaagctaatggtgtacatagatactctattgttacagcaggaagagctttagttgggagcgattttgataaagctgtacaagcatacaaaatgatgaataaagaatgttccatcaacctatgtgcatctcacggttttttaagcgaagaacaatttgtacttttaaaagaagcaggagtcacaatgtaccatgcaaacatagaaacttctaaaagaaattttcataatatttgtactactcattcatatgatgacaagattaaagaaattaaactagcgcaaaatgcaggtttaaaagtttgttccggtggtattataggaatgggtgaaacttggtatgacagaattgacatggctataagcttatcagaacttggagttatatctataccaataaatatattaatgcctatcaaaggtactccattagaaaatttaaagaggatttctaatgacgatatcttaagaacgattgctatttttcgttacataaatccaacagcttatattcgtatggctgccggaagaacttattttgaagatggcggcatagaaatttttcaatctggagctaatgcaacgataactggtgatatgctgactactgtaggtaacaatacatgccaagataaaataatgttgcaaacactcggttttttaattaaaaaagaattatagaaaagaaatataatatataaaggagatttaaaattatggaaaatatacgtagaactaacgcacgtcagttaacaataatcggaataatgagtgcttttatatgtacatctgcaccattttcaattcctattggtatagtaccaattacattaacaaatttggcaatttaccttactatatatataattggaaaaaaggaaggaacaattagttatcttatttatcttctcataggtgcattgggattgcccgttttttcaggattctctggtggatttactaaattagcagggccaacaggtggatatttaattggattcgcttttatggcatttataagtggaatattcattgacaaatttcctaataaaatttttatgtgctttttaggtatgctgataggtacactagtaacctacatgctcggaacagtatggctagcatatgttgcacatctaccatttaataaggctctaacaattggtgttcttccatttattcctgctgacctcgcaaagatggtagttgcatcactaatagggcctcagattagaaaaagaattaaaagcgctggattataatagttaaaatatatatattcgctaaaaaggattttctttaaattataacattaaagaaagtcctttatattataaatcattcaaattcacttctacttttttctaacttctctaagtattctctcacttatctcttcaacttcttcattattcaatccttttcttttaatagcattagcaaatatatttgttatttgttcccaatcactaattttctctgaatgtaattttatctcctctaatagctcatatacctttttatttataccatcactctcctcgtcaaatctaccatattattataacaaaaaaataagaatcataaacaatatttctaatgtccatgattcttattaattaaacctctttatgagaaaagtctgtaattattttattatcatcatcttccgttttctttattttgcctaatttaatcttaatagttagtgtcatgtcttccctcttcctacatattaattaacgtgaataattaatctttatataagtattatttattattttataattgaacttcgcttttatactatcaatactcgatatcttttcaatatagtacatatctgctaaagttaaatctcttaactctgcaacaaattcaaatttagaacacttttccaaattatcatttataactttcatgatttcattatgtatcttcatagcatatcacctctcatatatattaactttaaaaaactattttatttacttttaactctattatgtttagttcaaaaatataaaaaaccaatcaaaactaattaaaaaaattaattagttttgattggtgggttgcatcattaactccaaattctcaagatgcccaaatacagagaatttttcacagttcccaatctttgtatatttatgttactttatgtctttctatgtatatattataacaataatataagaaaaatcaacattaaatgcaatatttaccttacaataattgttacatatttaaaggtaattattaaatgtataaaaaattttatttactgtccttaaatatcatatttaagttcattttaatataatgtttatattgaattaacatatttgttataatcttgtaataattatcagctataataagaaaataagataatttcttattaactatttatccttctatataaaatcgtttatgggtaacttatttatgtattgtaataagttacccttattaattttataattctcatatagatatccaaatttaaaactaaacttatgtgataacttaccgaaatcataaatattttgttccgaaaagctatgaaaatatcgctaaaatttctaagcagcaagttgtatccaatttagcatgctccacctttcagtttgacaagctaaattggaacaacctacagctaagaacctttaacagctcattttcaaatgttttctccacaaatatatttatgatttctagtgatgatatgaacttaaagttttagcaaatttgcaaatacattcatctaataagttgaattcttaaattggatatctatatagataaacaaatttagaattagacttattagtagtaatttctagcataagctaacgacttaaccatatttgtatcatcattgaaacaatcataaattgatgatacagaggaaaaaaggtcatcaatagaaggaaaagcactaggactgaaaatacaactttttaatttattccagatattttcttgaggatttaacttaggagaatatctaggagtatttattaaaaacaattcttcgctatgcgcgttagcgaaatcttgaatttctttagatgtatgaaattttgcattatccaataaaacatatacttttttgcccggatttgcgtcaagcaatctttcaagaaaaacctcaacctcatgtgatttaatagaatgttgagcggaataagcatccataatggtatcgaatttttttgaaatctcagttgcaccaattaaattaagtccttcgtgagaattattactttccaaaacaggggatacacctaccttactccaagtcctacgaatatcagattctgtcctaagaccagtctcatctaaggcatacaaaacagtatcagaagaattttctacagtatggagaagggttcgcattttttttaaagacctcttgttcttttttatcagccttactaggctttcgttgagctcttttatagcttaatctacgtttttttaataaaactcttatatattcatctgaatatttaataccatagttttggtttatatattctgccaagagagggcaagtccatacatttccgatgaatccgaaatcgtttggacgcgtatttagaacagtatttactaaatcatccttcatttcggctgtaaaagttcctccggtcaaagcaccacgaccatctttaagtgccttaagaccgacggaattccaactttttatataatgaataactgttgatttagtttttaataaaaactttgatatttcaatagtactatttccttcatatctcatgattacagctgttagcacgttacgagcaaattcgtccttagatgaatttctcattttcttaagattttcgattgtccaattatataatgatgttacttcaataccttttctacccatagctatttctccttacaaaaattaactaatactagtttgtgtaaaaataaatatgctatgcataagtgtatttattagtttggatatctatatatataacataatcataaactatacttagactatgaaatgtcttccaaccagaaatgagtaatatacttttgtggaatgtttcattggtaattttgatggatgtgattctttggctataagttgttccaaatgtgctagttcaaagcttgttctttgagactagcactttgggtgcaacttttatagccttagaatcacccatcagaattacctagaaactggaacaaaagtatgttactcatttcagcgagttatatgcataagttaaggtcttagttgggttatctatatttctttatacaatttataatcttaactttaggttattactaataacacatcatttaaattaatatatcttttataaaaaaacagcatcccccataattttcataaaaaattatgtagaatactgtttaatggatgttatcatcccctgaatttatgaatactttatattaatacaacttagtattttcaatatttttaaagttttctacccattatcacacccatggctgatgccatcataagtcctctagtccatccacttgagtcacctaaacaatgtaagccttttatattagtttcgaaatttttatctaaatcaattctattactgtagaattttatttctgggccatataataatgtttctctgcttgcaaatcctggaactactgtatccatggcttgtatgaagtttaaaatatttgtcatagttctatatggcatagctgatgttaaatctccagcttctgcatctggtaatgtatgtctaacgtttgattcatacaattccttttcccaagttctcttaccatccaatatatctccatatctttggactaatatttttccatttcccaacatattaacaagttctgcaaccttctgaccatattcaattggttcattgaaaggcgctgaaaaattatgcgaacttaaaattgctaagtttgtattatcagatttcttatctttataagaatgtccattaactattgctaaattattatcataattctcttgacttacaaaaccacctggattttgacaaaaagtcctaaccttatctttaaatggtgctggatgccctataagtttagattcgtaaagtacattatttacactttccattacttcatttctgagctcaactctaacacctatatcaactggccctgcactatgatttatcttgtgttcaatacacatgtcttttaaccaatcagcaccttttctacctgttgctacaactactttatctgaaaacatttcttcatcattacttctagttaatgaatctgttattaataccccagatacttcattgtttcttatcaaaagatttttaactgttgtatcaaatttaatttcaacaccagcatttaatagatgtttttgaatcttcaaatatatttcttgagctttttcagttcctaagtgtcttattggacaatctactagctttaatccaccttgtattgcttttcttcttatttctttaactgcttcattatttcctacaccttcaactttagtatctgctccaaaatccaaataaattgaatctgtataatttatgtattcttgtattaaatcagctcctgcaagttcaggtagatctccacctacttcatagcttaaagatagctttccatctgaaaacgctcctgcgccagaaaatccagtagtaatatgacaataaggtttgcatgatacacactttttagtcttatcttttggacaatgtctcttatcaatgctctttcctgattcaactaaaaggattttagattgaggtttttgtttctttagttcatacgcagtaaatattcctgctggaccagcacctactattattacatcataattcattcttatctctccttgacattaaatataatttttaagtagacacttatagtcctatagcaatttacggtagcttggtagaaacatccgacccttattatcagatttatataagtgaatattattaactttttttttaaaatagttcttattactaggtaattttagctcatatattaataaaaatcaataacaaattatttttttcttcttttttcctttataaacacgaacattaatctaaactcaaagaataaaactctcatctatgtgatcgtatggccttataaaaattaaaatttattgtattttaaattggtaaaaaccaccaaaatcagaaattgtgattttaatggtttcttacatacaaaaataaagttattattttactatagattttctttctccaactggtaataataatccagactttgataaaacgggtcttatagcattataaataatacttactaatattactgacactactgcattaacaaaggttgcaaatacacttatttttgccaaaactgcagccatttgctgcggctgcccaagaatatattgtttataaaagtatccagctataggatcaaaaacaacattaaaagctaatcctccaattgcagcaataatagtccatttagctatatactttttatccctactttcatctatttttgcatatttatgagcaattaaaccagttatcaaaccaatgcataactttaaaatgaaagttttaggtgctccgattgcatatgttggatctaatagatctgatattgtcatacctatagcccctgataatccaccataccagcctcctagaagcaatgctgccaatacacaaaatgcattcccaatgtgcagtgaaaccgcatcttcacctacaggtatttttattgaaagaaaagtaaatgatacaaagcataatgctgcaaggacacccgtctgaattacttttacaattcttgaattcttattttccatataatagccccccttattgtattattctatcttcataggaaaatgttgtgattattataacactataggagttctctagcaattgtatgggttcatttatatttcacattgcatcttttattatatattatgtttaaatttacaatgcacatttcacaattcacaattacggctagaatccttgcaatgtttttagaaattttatgaagaattatttttgcaatatatatacaaaaaataagactcccctaaatcacaaattagtggagtcttttaatcgtaatcttctattttaataatgatatagctatttaatttagcctgattttaactttgttaaataataattattgctactattgttgtgataattaatcctataacaacaggtttgagattttttttagctaattcaaatgcatctacaccgcaaatcgctgctactggtattagtgcccatgggattacggttcctccacctacccatattcctgcaatttgtcctaaagctgttaatgttgctacaccaccacctaaagcagttgagaatattttcgaaatggatcctaccaaagatattcctgaaaaacctgatccatctaagcctgtaattgcgccaactactgtaagtgtgccggcagaaatagttgaatttattggaacgttatttgcaagtgcagcacctaagtcattaactatgccatttgagccttctggaagtatctttccaaatatatctgtaaatgcagagtcacctaaataaaaaaatgcagctattggtataacaactccaaatattttgaaaccaaactggagtcctttaacaagattatcagtaattttatctagtgatttttctttataagctagtattgaaattaagctcaggataaatatagcagtacctccaataagcgctgttgcatcaccaccttgtaatttagcaatatacattataaaaatatctaatgcaaataatactagaattaataacgctaaaaaccttcttactttttttgaagaaataagcattgaagaacttgaaattgatgttgaactttctatttcctcatattcactagacatctctcctgatttaatctcctttctgaggaaataaaatgcagcaacagttgtaactattcccattgttagttcaagtggaatacttgcagatataacctcagaaactggtatacttgctgcatcagcagtaagttttggtgctgcctgaattatataatcgcttgataaagctataccatgtccaaataaattcattgaaatagctactccaatagctggaagtccagctttcttagcaataggtagaaacaatgcccctataagtgcaactgctggagatggccagaaaaaccacgataaaaccatcataaaaattccaattacccaataagcaatccaataattttttataacttttctaaaaggagacaccatctcatcatttattccagagtccattaatgtattactcattgctgttattattgatattataaaaattgttggcatcaattcctttgctgcataaacaaaactattaaatactcccattacagatttataaattgattctgttccggccaatcccagaataaaaatgcctaatatacataaaagagagatatctttcttcttcaccatagccaatataattataatgataaaaataagataaatatagtgaagcggtgttaatactaagttaatcatatatttctcctataaaagttcttgtacttataaattatgtaggaaatatattcttagttactatatattaaa

SEQ ID NO: 33 - DNA, 55563 bp, Clostridium beijerinckii
taatagaactcatatataaaataaataagattagatgaaatgtattacttaaatatataaattaattgaaaaataccaatatatggaatataattgaaattgatcaactagtcagttagtgataataaaaacaagaaaggactagttcgtcaaattgacaatacggtaaacgtttccttaaaaatttatatttaatttataaaagtgaccctttgatcattggtaatgtatattttgggtacatgaaagaaaattatatttttgaatgtgccttattaggagggcttgtgatgcaagatgagtatattgttaaaggcaatattatttttactaaagaattaggtaagtatgaaatatttgaaaatggatatattgttattgatggtaaatttgttaaaagtgtttataaagagctgcctaaaaaattcagtaaactaaagattttagattatgggcatgcacttataataccaggatttattgacatccattcacatgcaccacagtttccaaatctaggattaggactagataaggaacttatgccatggttagattcatacacctttccagaagaaaaaaaatattcagatatagactatgcaaaaaaagtgtattctgcttttgtaaaaagtttatggaaatatggcactacgagatcttgcgtttttgctaccattcataagaattcaacaaagttattaatggatttgtttgcagaagcaggattaggtgcatatgtaggaaaggttaatatgaatagaaatgcaccagaatatttattagaaagtgcagaggaatccattcataatactaaagaactattagatgaatatgggaaaaaatatgaattagtgaaacctattattacaccaagatttgttccaacatgcagctttgagctcttaaaaagtcttggggaattatcaaaaaaatataatgttccagtgcaatctcatttgagtgaaaatttgagcgaaattagttttgtgaaaaaactacatcctaaattaaaaaactatgcaagtgtctataatgaagcgggattgcttggtgatcttcctactataatggctcattgtatttggctagaagaagaagaaattgaactaatggtgaaaaaagaagctttcattgcccattgtcctaattcaaataacaatttatcaagtggtattgcacctattcgaaaattgatgaaaaaagggttaaacataggacttggaacagatatatcaggtggacatagtgtatcgatggcgaatgtaattgctagttgtgctcaggtgtcaaagttaaaatggctagaaagtaataaatcagacaagcctctaaccacagcagaattattatatttagcaacaaagggtggaggaaagttttttggtaaagtgggaagttttgaagaaggatatgaatttgatgccttaattattgacgatagcagtctatccatcttcaagccattgtcagtagaagaaagactagaaaaatttatttatacaggtgatgacagaaatattaaggaaatatatgtagcaggtaaaaagatagaagaaccgaaacaatattgaatatttttacgctaaaatttgattaactagttaataagtattgacttatatttatttcagttatagatatcacaatcataaactgcacttagactatgaaatatcttccaaccagaaatgattaatatacttttgtagaatgtttcattggtaattttgatggatgtgattctttggctataagttgttccaaatgtgctagttcaaaaagtgagaatcgaaattttatatttcgttcttcgaactttctctgtgagcgcttgttctttgaggccagcactttgggtacaactttatagccttagaatcacccatcaaaattacctagaaactggaacaaaagtatgttattcatttcgatgagacatacgcataagttcagattttagctggggtatctataatttaaacagaaaaaatagaaaatagggggattatttatgagtgataaaatgcaacgcattccttttgaaaaaatgttaacttggattactagagagttaaaagaaaaagaatctatttttggcgtgcataaagataaattttattataatgaaactggaaaatcaattacgttatttaatgagaaactttcatcaccacttggaccggcagcaggcccaaattctcaattagcacaaaatattgtttgtgcatatttaactggaagtcgttttattgaattaaaaacagtacaagttattgatggagaagatattacagtgtctaaaccttgcatcaatgcacaagatgaggggtacaatgtagagtggtctacagaattaaaggtatcagaagcctttgatgaatatgtaaaagcctggtttttacttcatgtcttaatgaaagagctcaaattcgcaaaggaaagagattttatgttcaatatgagcgtgggatatgacttgaaaggcataaaatcttctaaaattgatacttatattaaagggatgcaaaacgcatcgtctacaaaaatttggacagaatgtcaagaagcacttctttctcatatagaaatgttttctgaatttacaaaggaagatttggaaaaaatttcaccaactatttgttcatctattacgatctcaacacttcatggttgtcctgctaatgaaattgaaagcattgctagctattttattgaagaaaaaaaattaaatacttatattaagatgaatcctacattactaggagaaaagtttgttaaagaaactttaacagccatgggatatgactatatagttcttaatggacatcattttacaaatgatttgcagtactcagatggagttgcaatgctaaaacgtttgaaggcggtcgcaaataacttgaatttagaaataggagttaaactaactaacacactgccagctaaaataattaataatgaattatcaggggaagaaatgtatatgtcaggacgtgcattattcccactatctatatctttagcaagtaaattagctaaagaatttaatggtgatttacaaatttcttattcaggaggggctgatttctttaatattgataagatattatctacaggaattagtccaataacatttgctacatctatcttaaagccaggtggttacgaaagaataactcaaatggctaaaaaagttgagaaacagcttaatggtaaaatttctggaattaatgtagaaattctagaggacatagtcaaggaaactattaaggataaacattatcgaaaagaactacgacttgttaatagcagaaaacttaattctaaccttcagttttatgattgtgcagtcgcaccttgctctgtaggatgtccaattaatcagcaaatcccacaatatacagctttagtagggcaaaaaaaatatgatgaggctttttcaataattgcgatagataacgcgttaccggctattacatcaactatttgtaatcataaatgccagactaaatgtactagaattgattatgatgaatctgtttcaattagagatttaaaacaaattgcagttttaaatgcacaggataaatttattgagtctattgaaccaacagatattagaaccgggaaaaaagttgttattattggagctggtcctgcaggtctttcattagctcttttcttaaggagaaatggtgtagatgttactgtaagggataaaaaggaaagtgcattgggtgtcgtagagcatgttatacctgagtttagaatttcttctgaaatgattaaaaaagacttggaaatggttaaaaagcaaggagtaaaatttcaattttgtgtagatgaaaatattaatttgaaagaattaaaaaaggaatatgattatgtagtgttagccataggagcatggaaacctggaaaagtttcactaagcgattgcgataataaagcaattaatgctatctcatttttagaaaaatataagaaacaaaaaggaaatattgctttaggtaaaaaagtttgtgttattggaggaggagatgttgccatggatgcagcacgctcagctaaaagggtgagtggcgttgaagaggtttctattatatatagaagaactaaaaaatatatgccagcggataatgaagaaatagaacttgctatttctgaaggtattttacttaaagaactccttacgccaatttctattgacgatggaaaacttacttgtgaaaaaatgattttaggtgatagagatgcatccttaagaagaagttctgtaggtactggagaaataacaacattagatacagatacagtcattatagcaacaggtgaaaaaattgatagtaatttattaagacaaaatgaaataaatttggattctaatgaatttcctgttgttaacgaaaaattagaaacaaatattgcaaatgtatatattattggcgatttaaaaaaaggtccatctacaattgttaatgcaatagcagatgcaaaaatagttacaaaagatattctagcaaaagaaggtttgagttctgattttaagcaacaaggttattgtactgatgaaaagatattatatggaaggaagggaatattaggagattcaaagtcttgtgaagaagaagctgatagatgtttagggtgcaagaacatttgtgaattatgcgttgatgtttgtcctaatagagcaaacgtaatgattaatgtaaacagtgattttgtttctaatcatcagattatacatttagatggtatgtgtaatgagtgcggtaattgtggtattttttgtcatcataaaggaaatccatataaggataaaataacagttttttggagtaaagaagattttgaaaatagtgataacaaaggattttttactgaaaatttagaaaaaggcatttgtctagtaagaactgaagaaaacgctattataagttatactgcttcgcagcaatcagaagtttcaaaagaaatggctagtctaattcaaacgtgtatagataagtatgattatatgctttaggcatgtgaaaataaataacgagtccaaagttgccaatataagttccgacatgcagcatagctactctgttctaatgtgtggatatttttcatcaggcaaggaggcaaattaccctcatagtgggcctattataagtgagagtccaaatcttgtatttgttttctcgaacttagttaaattgcgcatgtaatttaacctcctttaatgatggaaaataggctagtaaatggacttgtcattttttgaatgtgccttagtattaaaaattaaatagatagcaagcgaagaggttatgtaccattgcaagagggggagtgtatggcaaggatttagaaaattgaaacaacaataaggcacatgaatttgttatttatttgattgtgcctaacactagctataattttaaggaggacatttcatgaaaaaagatgtaaccaaacaaaaaccatcatttttggagagttattttcacttggaggaaaataactcaaatgtaaagacagaaatacttgctggaattactacttttgttacaatggcatacattatatttgttaatcctaatatattaaaaatagctggtatgaattctgcaaatgcagtaggagatgcagcagcacagtttagtgtaggctctgatccaatagtatcatcagttttcgtagctacttgtctcgcagctgccattggcacattaataatggggctgtatgcaaatcttccttttgctcaggctcctggtatgggtcttaatgcattttttacgtatacagtatgtttaaccttaggttttacatggcatcaggctttatcatgcgtattcatgtcaggtgtattatttatacttattacagtaacatccatacgagaaaagatagttgatgcaatacctcaaaatctaaaatatgcaatttccggaggtattggactctatatagctcttattggattgaaatctggtggtgtagtagtgtcaaatccagcaacattagttggattcggaaactttgcaaatccaggaacactgcttactataataggaatcataataactgctgttctaatggctaggggtattaagggttcaattttaattggaataatttcaactacaataataggaattccattcaaaatcacatcacttgaaaatttacatgttttcagtgcaccaccatcacttgctcctacgtttgcagcatttgattttgcaggacttttttcaaaaggaggcacatcaataggaggcgcatttcttagcgttataatggttgttataaccatttgtttagtcgatctttttgatactatcggaactcttgtaggtacagctacaaaagcaggaatggttgatgaaaatggtaaggttttaagaatgaaaaaagcattgatttgtgatgcagtagcaacaactgctggttcagttttaggtacaagtaccatttcaacatatattgagtctacagctggtgtttcagaaggaggaagaactggacttacttcaacagtagtgggaatattatttattttatcattattcttctcaggccttgttggtatagttccaggacaagcaacagctccagcccttgtaatagtaggtgttttaatgatgtcagcaattgttaatatagatttcagcgattttacagaagcagttccagccttttttgctatatcattaatggctttttcttatagtatagctaatggaattgcagttgctatgattttttatccaataacaaaaatagctacaggcagacaaaaagaaatccatccaatagtgtatatacttgcagtattattcattcttagatatattttacttccctttgaataaaactatggaatagtaacttatataccagttaatgatattaggaagtatattatgagttaaaacgttagtaatcacaaaacttgcgagataagttaaaatgtctatgccaaataaggtaactaggtgtttagatttaataagtcacattcaaaaaaataatcatagcaactttggatttgttatttattttcttcatgtgcctaaaacaaactatatcacctagttcagccaatatgacattttctattaaagatagaacaagtatctgtaagtttgaaatattcactattgggagagtttacggatgctagttatcggataagaggaaaatcaattggataaacataaatttctacataataaaatgttacaagaaagatgggattaattatgtctggtgacgttaaagaaaaaatactaaaggctacaatgaaagtggtttcaaaagagaaaattagtggtactcgtatgcatatgattgccaatgaagcgcatatgagtcaagcaaatttacattatcatttctcatctaaaaatgatatattgatttctcttttagataagatacaagaagaattttctaatgatcgaaagaattatattaatttggaaaataaaagtgtagttgaaaatatcagaggtttttttgatcaaaaaaagaatgatattctcaacaaaaaggaatttgattatacccagattgattattgggtgcaaggaacagtaaatgaagaaataaaactaaaatttaaaaatacatttgaaatttggcgtgacaatattcgtgaagttttatataaaggtgatcaaatcgaagataaagatatgatgaatttggacatgttaccgtacttagcagtgtctttaatgctaggtgcttcactgcaatatttaattgatgaggggaaatttgatttagatcaatattttgatctagcagaagaagtgatatttgggcaaattcaaaaaaataacaagctaatttgccttagcataaagtaattaaatttttagtaagataagaattaatttaataggaggaattataatggaaaaaatattatggaaagaaaatacgttgcctaaaactgataaagaagaaagtgtaaaatttcttaataaagaagaagtatcaaaggcaaggaaatttcatgaaagttttttagaatatgatgaaacaccattaatagatttaaaagagttagctgaaaagattggattgggaggaatatatttaaaggatgaatcttatagatttggattaaatgcatttaaagtgttaggcggctcatttgccatggggagatatttagcagaaaagttaggtgaggatatagacgatttaccatatgaaaaaatgacttgtaaggaagttaaagataagcttggagatataacttttgtaacagcaacagatggtaatcatggaagaggagttgcatggacagctaataggttgaaacaaaaatcagtagttttcatgccaaagggctcttcaattaaaagattaaataacataaaggcagaaggtgcagaagctagcattacagaactaaactatgatgatgccgtaagacttgcaaataaatatgcagaagaacataaaggcgtaattattcaagatactgcatgggaaggctatgaaaaaatccctgcgtggataatgcaagggtatggaacaatggctttagaagcaagtgaacaattaaaagaacttaatgttttaaaacctactcacattttcgtacaagctggtgttggttcactcgcaggagctgttcaaggtttctttgcttcgcaatatggagacgactgcccaaaaactgtagtagtagaatcaaatcttgccgattgttactataaatcagcaatagccaatgatggggaagcaagatcggttggtggtgatatgcaaacaattatggctggacttgcttgtggagaagttaacacaattggttttaacatactaaagaattattcaaaggcatttatttcatgccctgattgggtagctgctaaaggaatgaggattcttggaaatccattaaagggagatacaagcgtaatttcaggtgaatcaggagcagtaacgactggtgctttatatgaaattatgactaatgatgaatataaagatttaaaagaagctttagagttagatgaaaattctaaagtgcttttatttagtacagaaggagatacagatccagagaaatatagagaaatagtctggaatggtaaatattaataattgggtcacaatgaatgttttatcaagtgaaacttgattcaggtgggggttgatccccatctgaatattagttgaacttatatcctcaaggggggtacatcgtctagggttgtaccgctgttatacaatcactaatgtgatttgcataagttcgagtaaccaaatacaagatgctcacagagaaagttctgttgaccaaatacaagatttggagcatcacttttggactatcacctatctcccacttaagcagagaacctaaatctatgatttagtgtgaatcgcttactcatctgactttaggaagaggagtttcatatattgtgggagtgttacagcggctagacatcagataaataccaaagtagagttcaaaataaaaaaaggcgaaagctggtataaaaaggtatggaggagtttttatgaaaattgtaggtaatggaagactaataactcaaaacaaggaaaatccattttttgaaaatggtgcattagttataaatgatggtaagataattgactatggaaatactggtgatatcttagataaatataaggaagcagaatatatagatgcaaaaggaaaagttatcatgccgggtcttataaatactcatggacatatatatagcgcttttgcaagaggtatgaatttagatggtccaacatctaaaaacttcttagatatattaaataatttatggtggagattagataaaaacttatctttagaagatataaagtatagtgcttacacaacattaatggatagtttaaagtttggagtaacaacattttttgatcatcatgcaagtccaaatgctgttaaagacagcctttttacaattggaaatgtagcagaagaacttgggataagaacttcgctttgttacgaagtatctgatagagatggagaagaagttttagaaaagggaattaaagaaaatgtggattatataaattattgcaatgaaaagcatgataatatgaagtctgcaatatttggaatgcacgcaagctttacactatctgatgaatccttaaaaaaatgtgtaaaggaagctgaaaaattaaattgcggatatcatattcatgtagctgaaggattagcagatgaagagcaatgtgtagaaaagtatggcaagagaatagtagaaagactaaatgattttaatatattaggagaaaaaacaattgcagtacattgtgtacatgcaaatgaaaatgagcaagaattacttttaaatacaaatacgtctgtagtgcataatcctgaatcaaatatgggcaatgcagtaggtgtatcaccagccattgaacttataaagaaaggtgtaactgttggacttggaacagatggttatactcaagatatgtttgaatccatgaaggttgcaaatataattcataagcataatttaaaagatccatcagtagcttggggtgaagtacctttaatgctatttgagaataatgggagtattgcagaaaggcattttgcaggaaaatttggaattattgaaagaggagctaatggagatgtgataatagtagattacaatccattaacaccaatgaatgaaagtaatcacaattcacatatcttatttggaatgatgggaaaatctgtggatacaactatagtaaatggaaatgttttagttagcaatggtaagcttcttaatgttaatgaagatgaaatattaaatgaagctagaaaagtaagtcaaaagctatgggatagaatttaatcaaaagatattttggaaatgaacatctttgttaaaagtaagtgtaataaaaaaataaaatataacaagattaggagaattaaaaatgaaaaaaataattaatactcaaaaggcaccagcagcaataggaccatattcccaaggagtggtagttcaaggattagtatatacttcaggtcaactaccattaaatccggaaacaaaagttttagaaactgaaataaaaacagcgactaaacaaagtttagaaaattgtaaagccatattagaagaagcaggaacaagtatggagaaagtatttaaaacaactgtatttgtaaaagatttaaatgattttgcagcagtaaatgaagtttatggaacatattttaaagaaaatccaccagcaagaagttgcgttcaaattgctaaattaccaatggacgcagttattgaaatagaagtcattgcaacaatggaataatattacgatagatttataaaaagtgataagagaatggtgagaatattattaagagaatatttacggtggaaggtgaaaaaatgtttgaagacatatacaagcaaatattaattgaagttaacaaccgtaatcagtgcgtaatgttaacttatcttgatttgcatagtgcaagacaaggttccattgtcagaaaagttatcttaacaaaggaagatatagaaaaaaagtctctttcacttaatgactatatttacgaaaaaatatgtagttgtttagaaagtgggaaacttgaatcttttaatatagaagaaaatgagactattttaattgaaccattcatccctaaaccacgtttaattgtttttggtggcggtcacatagcaaaacctttatcagaatttgcatcaagagcatgtttctctattacggttatagatgatagaccttcctttgctaatacagtgcgatttcctgaagcagaaaaagttatttgtgaaagtttcgagaaatcctttgatttaattaacttaaagaagtccgattatgtagttattataacaagagggcatagatatgatggagttgttttgcgtaaagtcttaaatcatgaccttagttatgttggaatgataggttcaaggcgcagagtaaatgctatgagaagcgagctattagaggagggcttttctaaagaaaagcttgaattggttaatgctccaataggtatagatatatatgctatcactccagatgaaatagctatttctatagtagcacagcttataagctttaaaaataagggttctatgagtaagtttggtaaaaatttcgccattccagagtttgatgcagaaatattagaaaatatatctaaaaaatcatcagaacctaaagcacttataactatactgtcttctaaaggatcagttccgagaaaagcaggagctaaaatgttgacttatcctgatggcagaactatcggaagtataggcggaggatgcagtgaatctggtgtattgcaaaaggcaagagaaattatgcgagaaaaaggtttttatatagagcaagttgacatgaccggtgatgtggctgaatctgaaggtatggcatgtggtggaactatggaagtgctaattgaaataatttagggaaagttaattttttaacattaattaatactaaattttattgaggaggttgattatgtcacaaaataatattaaaaaagatgacaaagtaaatgaaatgctaccagtaagtcagcttgctattttaggattacaacatgtactagcaatgtatgcaggtgcagttgcagtaccattaataattggcggtgctgtaggtctaacacccgagcaattagcatttttggtggctgcagatttatttacttgcggtattgcaactttaatacaggcaattgggataggtccgtatgttggtattaagctgccagcaattttaggttgtacatttgctgcagttggtccactaattattattggtaaaagtttaggaatgcaaacagcgtatggttctataatagtagccgcaattattgttgtattagtagcgccattgtatggaaagatattaaagtttttccctactgttgtaacagggacagtagttacaatgataggtctttctttagtaaatgtaggagtcactagtattggtggaggttcaggagctaaagattttggaagtgtagacaaccttatactaggatcatttgtaatgataattgttttaatatctaataaatttctaaggggattttttcaagcaatttctgttttaaatggtattattttaggaacaatagttgctgcatttatgggaaaagtagatttttcagtagtaacaaatgcaaaatggataagtattgttcatccttttaattttggattacctcaatttgatattggttcaataattatgatgacattcgttatgttaacagtaatgattgaatcaacaggtacatttcttggaattggcaaggtctgtgaaaaggttatcaccgaaaaagatattgtacgtggacttagagcagaagcaatttcaacatttttaggaggtatctttaattcattcccatatacaacattcaatcagaacctaggacttttagctttaagtaaagtaaaaagccgttttgttgttatagcatctggtattattcttatttcactaggattaattcctaaatttgcagcattagctactattattcctcagcctgttataggcggagctacaacaataatgtttgcaatggttgcagtcgcaggttttcaaatgcttcaaagtgtagattttaataataatgcaaatatgatgattgttgcttgctctattggtataggacttggaattactgctgtacctacgttacttgaccaaacaccaacatttttcaagtctatttttagtagtggtatagtttcggcatcagtaactgccgtaattctaaatgcatttttgaatcatggtaataggaatattgaaagtaatataaagcaaaattcggtttcagaatgaatcttacagatatctagcatacaacttagagttatttgataacttaccaaaatcaaatacatttttgtttcttaggactataaaaatttaaatggaagcttacaccaacattagcttgatcccaatttcattgtgaaaagctaatgcaaacaagcttccattaagtacttatagaagcttattttcaaatgcctgctccacaaaaatgtacttgatttctaatgaagatatgaactatatgttcatctaataagttgaatttacaagttatttatctatatattaaaatgttagaaactatacttagcaagttcttttgagaaataatttgctagaatttatttacagatttatactatttatagtaaatactgttaaaagatattaaatgggaggttatttatgtttagattaaatataaatggtaaagatgaagtatctgaaattgataaatctttaatgtcttttttaagagatgatttgagaatcacttctgtaaaagatggttgcagcgaaggggcgtgtggagcatgtaccgttttagtagatgggaaaaaggtaaaggcttgcctccaaaagatatcaaaattcgaaggaaaaaagattttaactgttgaaggattaagctctagagaaaaggaagtttatgaacattgttttgcagaagcaggcgcagttcaatgtggtttttgcattcctggaatggtaatctccgcaaaatcattattagatattaatcttaaaccaacaagaatagatgtgaaaaaagcaattaatggaaacctttgtagatgtacaggctataagaaaattgaagaagctattttaatggcagcagaatattttagggacaatcttaaaattccaactgctcctactgaattaaaaatggcacagaaatttaaacgtgttgatgcagctgaaaaaataaatgggacaggtattttcgtagatgatattgaaatacctggaatgttatatgtaaaagcagtacgtacaaaatatccaagagctattataaataaaattgatataaagaaagcagaagcgcatcctgactgcgcgaaagtcttacttgcaaaagatgttccaaacaataaaattgggcatataaagcaggactgggatgtaatgattgctgaaggagatacaactagatatgtaggagatgcattggcattagtagcaacttaccataaagacaaacttgatgaagtatgtcaattagttgaaattgactatactgaattggaacccattacttgtccgacagatgctttaaaggcagatgcacctctaatccattctgatggaaatattatgagccgtgatattctaaaacggggtaatgctaatgaagcaattaaaaattctaaatatgttgtaacaagaaaatataagacaccatttcaggaacatggatttatggagccagaatgtgcaatcgcaatgcctgaaggagaagatggcatattgttgtattcaggttctcaatctgtttatgatgagcaacgtgagatttcaaatatgcttaaaattccaatagaaaaggtacattgtcatgcacaacttgttggaggcggatttggtggtaaagaagatatgagcgttcagcatcatgcagcattaatggcatggtatacgaaaaaaccatgtaaagtaaaattctcgagacaggaaagtctggattatcatactaaacgtcatccaatggaaatggagtttacaacagcttgcgatgaaaatggttacttgacagctatgaaaggtgttattattgccgatacaggcgcgtatgcatctcttggtgggcctgtattacaaagagcatgtactcacgcacctggaccatataattatcagaatattgatatcttaggaatgtcagtttacacaaacaatgttgtatctggcgcatttagaggctttggtgtaatacaaagttgttttgctactgaaaataacattaatctacttgctgaaatggtcggaatttcaccatgggaaattcgttatcgtaatgcaattcgtcctggggaggttttgccaaatggtcagatagcagatgaaagtgttgctatggcagagtgtttggaagccgttaaggatgtatatgaatcaaatccatatgcgggtattgccattggattcaaaaatagcggaactggtgtaggaaataaagacattgggcgttgtattttatcaattgaagatggaaaagttcatattcgaacttctgcagcatgtatggggcaagggattgcaacaatgtgcactactgtattatgtgagacaactgggttagatccggttcttattatacacgaaagaccagatactattcgtacacctaactcaggaactagtacagcttctagacaaactgtagtaactggagaggctgtaagacgagcatctgaaaaattgaaagcagaattagataaaggcttagggcttgatgatttagaaggcagagaattttatggagagtattctgcaaagacagacccaatgggatctataaaagaaaatccaattagtcatgtaagctatagctatggagctcaagttgttatcttaaatgaagaaggaaaagttgaaaaagtagttgcagcatatgatgttggaacacctgttaatattcagtctgttgaagggcagattgaaggtggtatggttatgggattaggttatgctttgacagaagaatttaaaattgaaggaagttatcctaaaacaaaactaggcgcgctaggacttatgagagcgactgaggcccctgagcttgaagttattcttgtgcagagcaaaaataaaattccagagacctatggtgccaaaggttgtggagaactatgcttgattccaacagctccagcttgttcccttgcttactatagattagacggaaaattccgtgctcagttgccactaaaagatacattttataaaaaacaaaagaataaataatatataaaaggaagtatttattcttttgtttttaagaaaggaagattcttagatgaaaactaatggcattatagtggctgctggtttatctagccgtatgaaggcatttaaaccactcctgaaattgaaagaaaaaactataattgaatacagtattgatagtatgcttaatgctggagtgaatcaaatcgctgtagttttgggatttaatgctgaagaagttgagactttactacgtaataaatatgattgttcacaattaacatttatatacaatgaaaaatatgctgaaacggatatgcttgcttctgttaagcttggagtactagcattggataactgtgatgccttttatcttcttccaggagatatgccagcaattgaaacaaaaactttccttatggtgaaagattcaataagcagaacaggtgctatggtggcttttcctactattaatggacaacgaaaacatccacctttgatttcttggaaatgcatagattttattattaattttcacggagatgggggtcttagagaattatggaatcagcttgaagaccaaatagtaacagttcctgttgaggattttgggtgtacgatagatgcagatacaaaggaagattacaataggttggtacattatatggatgaaaagaattgagattttaatatattaaaattggattttaagtaaggaaatacattgcaaatatttttgtaagataacataaagttaaagactttgaaattttgcaaaaaataattagtagatatatgggaggcgctatgcatggaaaaaataagtgaatctgtaaagaaaaaggatcatgaatctaaaataaggggtagtgctcttttcgtggatgatcatgtaatggatggtatgctttatggtaaactactgcattcagcaaaggcaaaagcacgaattaccaatatttcgattcctaaattaccggaaggttattttgttgttgataagaaagatgtaacaggtgtaaaccgtgtccatattgttgaggatgatactccggtttatgctgaagatactgtagagtatgttggggaaccgattttaatggttgttggacctgagtttaaagaagttgaaagaattttaaatgagattattgtagcatacgaagaagaagttcctattttggatatgcgtaagtctgatacagtttttttccattacaactatgcaaaaggggatatagataagacgttaaaagaagctgatcgtgttttcatagaaacatttcagactggatatcaagaacaagcttaccttgaaactcagggaatgattgcttatccccatgatggaagaatgactgtacgaggttctatgcaatgtccatattatgtctatggagcagtttcaaaagcattgggttatgatgcaaaggatatacaaataattcaagatgttactggtggaggatttggaggaaaagaagcatttccttcaatacttgcctgccaggttgcagttgctgctaaaaaggctaatagacctgttaaggttatatttgatagaagagaagacatggagtttacttcaaaacgtcatccatctatatctacctataaggtagctattaagaacagtaagattactggcatggacattgatgttttatttaatagtggtgcatatactacactttctccagttgttttacagcgtggcttaatttgtgcaaacggcgtataccgtgtagataatctccgtgttgtgggacgtgctgttaagaccaatactgtaccttgtggcgcataccgtggatttggtgcaccacagacgttctttgcagtagaaatgattatggatcatattgcaaaagaaatgggtgttgattcccttaagcttaaggaagaatatattgttaaacaaggtgattctacgtctactagtggcaaatatcatttccatgtacctctacctgaaatgattgaacagattgataaactttgcaattaccgtgcaaaacgagaccagtataagattcagaatggtagatatcgtaaaggtattggaatgtctttatttttccatggatgtggttttactggcagtggagaacgtgatttcattaaagcaattgcaaaaataaggaaaaattcggatgatactgtagatattcttgcaagtaattcagatataggtcaaggtcttaaaactactttctctaaaattgttgcggatactcttggtatttcctatgaacaagtatttatcaataatccagacacagatcttgttcctgattcaggcccaactgttgcaagtcgttcgcttatgacagttggagaattattaaggcgcgcagcagagagacttaaaaaagaatggaaatcaggagaagttcaagttatagaagaacatttcgttgaacctgattttgtgattccatttagtcttgatgaatttaagggagatgcatatccaacttattcttggggagtaaatgctattgaagtggaagtagatacatttactgccactacaaagatactaggagcatggggaagctttgatgttggtgttcctattgacatgaatattatacaaggacagatgcagggcggattccttcaagggattggatatgcatctatggaacagatggattacaacgataaaggtgtgattagaaataatagttttagtgattacattattcctacagcagtagatgtaccaaatttagttactgaaataatcaataatccatatacacatggtccatatggagcaaagggtgcaggtgagttacctctcgtaggtgcagctccagcttatgttgaagctatggaaaatgctattggtggagatttaaataaagttccattcacaacagaagatacaatgatggttttacaggaggtggataaataatgataaaatttattcttaatggcaaagaggttacatcaaattctaaagcaaatgagcgtttactagatgtacttagaaatgaatttcgtattactggcgtaaagtgtggttgtaaagaaggtgaatgtggagcttgttctataattcttgatggcaggttagttaattcttgtatggtggctatgggcagtattgaaggcagtactgttgtcactattgaaggctttagagaaactgaacgttttgcagttattgataaggcatatgcatcagttagtgcggtgcagtgtggtttttgtattccaggcatgatccttgcatctgaatgtatccttaacaagaatccaaatcctacagaagcagagattcgcgaaggcatttctggaaatctttgtagatgtactggttataatgccatagttaaggctattggcattgcagcaaaggaggggaaaggattatggtagattgttataaaccaacatctttaaaagaagcattggacatcctagcaaaggaaagtgctacaccttatgctggaggtactgatttgatgattaaaccagatgaaaatgccacatatttattccttgataaagtagcagaaatgaaaaatattgtagaagataaagaatatattcgtattggtgcagcatgtacttatactgatattattgaaaataaacttattccaacagtactgaaagaagcagtttcacagattgcagcaccagcaattcgaaatattggtactgttggtggaaatatatgcaatggttctccaaaggctgatagtgcactgattttttttgccactgactctaaactacgtcttgcaagtaacagaggcgaacgagtaattcctatttctgacttttaccttggaagaaagaatactgcgattgagaaagatgaactcctcgttgagattctaatgaataaaaataatttaaataattactattacaagaaggttggtgaaagaaatgctttggcaatttcaagagtttctttcgttggcatcattaatatagttgatgataaggtctttaactgtagaacagcatttggtgcagtaagtgatgttgttataagccgttcagatattgatgcaatgcttataggaaagactgttgaagaagctaaggctctcaaggataagtatctagcagcatatgaaaaggaaattgttccaataaggggtagagtatctgcaaaatacagaaaaactgtgtgtatgaatttactacgtgattttcttgaaagtaatggaatttaacttatataagattctggcattaagtggaattttatttaggcgggatttgattcccgtctgaatcttagtggctagagataagataaagttaaatagaatataagcatttaatctcaataggattgaatgctttttaggcatatgaaagaaaataacaagtccaaaatgccatgattatttttcatcaagcaaggaagtagattgtctcatagcgggcttattagggcaatctgctgacacaggatgacggaaaataggcgtagcagatggaatcgttattttttgaataagcctcattattaaaattattgataaatagggatatattctaaacagatataataataatccataatatgtatttttagggtttaattattttataaaaacgtgtagaataatattgtatcaaaagtaaaatataaccagttagtttgagggattaaattggaatctaataaccaaaatataagatactaatcaatttgttaaagtttgaatgatatgtacaagcctatttgagttttgttgaagaataagataatactgcttaagtagagcaagaggtatagatatgaagagtaaagagaagagaacaacaggcggtataattgttgccgcaggaaaaacatcagaaagaaatggattgaatccattattgaaaattggctccattactgtagtaaaaagaattgttttaacttttcaaaaagctggaatttcaccaattgtggtgattactggatataaagctgaagaaatagaacatcatttagctgattatggagttgtatttttgcgaaatgatcaatatgaaaactcgcgaaagtttgattctgcaaagataggactagattttttacagaataaatgcgaccagctattattcaccccagttaatattcctatgtttacaccagagacgcttcaaatgatgatagaatatgatgaaaaattactttcaccagcatatcgtggaaaatctgggcatccccttttgatatcgtctgaattgattcctaaaattctaaaatataatgggaatatgggattacgaggagccattgaaaatattggagttaaaagacaatggatagatgtagaagatgaaggtattctatatgatactgattatattgaccgattagatcaacttttaataaaacataataaacatatacttcatccctttgttaaaatcagcattgaaaaagaatacttgttttttgattcaagaacaaaattgcttctaattctgattcaagatacccactctgtacgaagtgcatgcaaacatatggcattatcttatagtaaagcatggagtatgttaaatcagttggaacaagaactagattatgcagtagttgaaagaaagcatggtgggagcaatggtggaaaaacttatcttacaaaagaaggtactgaatttttggaaaaatatcagcaatttgaacagaatgtacaccagtttgcaaagaatgaatttgaaaggttattttagaagttgcaattaatctgatgtctagccgctgtaacactcccacaatatatgaaactcctcttcctaaagtcagatgagtaagcgattcacactaaatcatagatttaggttctctgcttaagtgggagataacagcggcacgaccctagacgaggtaccccttgatggtataagttaaactaagattcagatgggaatcaaaccccacctgaatcaagtttcacttgatatttaacaaaatttttgaaaaaaattttacttataattcgttatacttatacaaaattaccaaataatgatggaggaacaaaaatgaaaaagattaaaactacagaagctgtaggtaatgtaatttgtcatgatattacacaaattatcaaaggagaaaaaaaagatgttgcgtttaaaaaaggacacattgttactgaggaagatattccagttttattatcaataggtaaagataatctttatgtatgggaaaaaaaggaggggatgcttcatgaaaatgaagcagcagaaattctctgtaaaatatgtaaaagtgactatatgagtgcaactaaggtgaaggaaggcaaaatcgaactaattgcggcagaagatgggttgtttaaaattgatattgaaaagcttcgtaaaataaattctcttggcgaaatgatgattgcaacacgccacagtaattttcctgtaaaaaaaggtgataaattagcaggcacacgaattattcctcttgtaattgaacaaaagaaaatggacgaggcagttaaattggcaggtgataaaccattaatggagattcttccatttatccacaaaaaagcagggattgtaactacagggaatgaggttttctatggaagaattaaagatacatttgggcctgttattagagaaaagcttgcagaatataatgttgaagttttagggcagaagattcttagtgatgatcctaaattaattacagaagctataaaggattttattaaagaaggtgcagaattaataatatgtacaggtggaatgagtgtagaccctgatgatacaacaccaactgcaattcaaaatacaggcgcaaagattgtttcatatggtgcccctgtgcttccaggtgcaatgtttttactagcatattataatgatgcacttccagttattggacttccaggctgcgtaatgtatgccaagcgtactatttttgatttggttcttccaagagttatggtaaatgacaaaataactttagaggatattgcaaaccttgggcatggtgggttgtgtctttcatgcgatatttgtacattccctaattgtggtttcgggaaataagactgacaaagcttaatcaagtgaaacttgattcaggtgggatttgatcccatatgaatcttagataaatattgcaaggtcaacctgaaagtgttcctatggcttaatgtctttaataagtatttaaaaattatctgtgataaacttggttgatatgaggtgaataaaatggtagatagtagtggtagaaatattgaataccttagaatttctgttacagatagatgtaatcttagatgtgtatattgtatgccggaatgtggaattgaaaacttagaacatgacgaaatacttacttttaaggagattatgcttatagttaaaactgtttcacagcttggtattcacaaggtcaaaattacaggaggagaaccattagtacgaaagggtattgtaaatttagttagaagaatcaaagatattgatgggattgaagagataacaatgaccacaaatggcgtactttttggtgacatggcagatagtttagcagaagctggtcttgatagtgtaaatatcagtcttgatacattaaatagtacaaactttaataaaattactcgtagagactgcttagataaagtgaagtttggattgaaaaaagcagaggagcttggattgaaaacaaaaataaattgtgtcccaatagctcagttaaatggtgatgatttaatagatatattgaaaattgctaaagaaaatccaatcgatgtacgttttatagaacttatgcctattggttttgggaaaagttattcacctgtttgtaatgaacaaatatttgagcagatagaacagaattttggaactcttcagaactcaaaaattaaacatggtaatggaccagctgtgtattataacttatcagattttaaaggaagtattggctttataagtgcaatttcaaatgaattttgtgatacttgtaatcgtattcgattgactgctgatggaaatctgaaattatgtcttcattataataagggagttgcattaaagcctcttctacgtagtggaataagtaaagaacaattaaaaagagttattgaaaatgcaatatataataaaccaagtcaccatggttttaatagcagtgacacggaaaatatagaattaaaaaacatggttcaaataggaggataaatactgttggaaaagttatagcagtatgcatcaatagaatgaaaaacttaggaagtataagataggagaataagaaaaatggaactaactcatataaatgaagaaggaagagcaagaatggttgatgtatctgaaaaaattgacactgtacgggaagcagtagcaattggaacagtttccatgaaaagagaaaccattgaaagaataaaagaaggtactatttcaaaaggggatgtattatcagtagcgcaggtaggaggtataatgggtgctaaaaatactccgcaaataataccaatgtgccatcctataatgatatctggctgtgatataagttttcgaattgacgttgaaaacaataaaattgaaataactgcaactactaagactgtagggaagacaggcattgagatggaggcccttactgctgtatccactgcagcattaactatttatgatatgtgtaaggctattgatagggaaatggtcataaacaatattatgcttgtaaaaaaaagtggagggaaatcaggcatatttgaaaggaagggattatgatgagtaaggttattgcagtgaatataagtgagaaaaaaggtgttataaaacatcctatagaaaaaggtttttttagagttaatcatggtctcgatggggatgctcatgcaggagagtggcataggcaggtaagtttgcttggaactgaaagtattgataaaatgaaatcatcaggagtcgaaggacttactccaggaaagtttgctgaaaacattactactgagggaatagttttatatgaacttcctataggaacaaagcttaaaattggggatgttatgctagaagttactcagataggaaaggaatgtcatttgggctgcgaaattagaaaattggtaggagattgtgtaatgcctagggaaggaatatttactaaagtactagaagaggggtatattaaagctggagataatattataatagtttaaaataagaaaaataacaattcaagttatatttttgaattgttatttttttcactatattaagctattccataaccatatttttcaaaaatctttttacaagtatcagtaaataagaaatcttcaaatgcttttgcggcatcagcatttttgctagccttaattattccgattggatatgtaatcggtgaatgcttgtcctctgctattgtttctataattttagcatctttactgcttaacgcatcacttttatatacaaatccaacttcagcatttccagaagtcgaccaggcaagtacttcttttacatcttttgcaaaaacaagttttgatgaaatagaatctttaataccaagcttagtgaaaacttcatcagcatattgtccagctggtacacttttaggttccccaacagctatctttttaaccttatcacttgttagatcagaaagaccgcttatagtagtgtctttaggtccgactaaaactaaatcatttttaactaagtcttttttagtattttcaagtaataaagatttgctgtctaatgctttcatttggctttgaccagctgaaatgaagatatcacaaggggcaccttgttctatttgttgctgtagagatccagaagcaccatagttaacagttaaagtaacatttggagcagtctttttatattcgtcttgtatatctgtcagtgcttcttttaaactagcagcagcggaaatgtttaattctattgaagcttcagtagcagattccttttgtggagtagttgatgccttttgagctccgcaaccaataagtgacgttgttaataaaacagttactaaactaaataatcctattttctttttcataaataaaacctcacattcataaaaatatttctattataattatgttttgttacgtttggatatgtttcattacgttttgcttgttgattattatactagcatttatttataagaaaaacaatatgtaattgtaaaaataagtacttgaatagaaatattgacaaaattattaggatatgattataattagcctaatggtaatgtgatgttacggtatgttttattagataaagatctcaaagaagagattacagaaatgtatgagcttctttgagatctttttttgcttatgttgagaaaatatataattatgtacaagtaatatagcttgtaatatcacatctctatattgcatttgtacgatagaaacagtaattacgtaatgttattgcttctactcataatcttttataattatttcaagatatttttgactcagtgtatttattgaaataataaaggattttataaatgtgatgctgatgtaaaactattttcaaattgtattgtgaaatgataaaaattaacatataagtaaaaatattgttgtaaattaagctggaataatttataatgtacataatcaatagtaacataacaacattgattgaatttaacttggggaggaaataaaaatgaaattaagtgcaagaaaccaattggcaggaaaagttgttgaaattaaagaaggggcagtaaatgcatcagtaaaaatcgaaattgctgaaaatactataatatcagcaactatatcaatggatgcagtaaaggaactaggattaacagtaggatcagaagctacagcagtaattaaggcaacatcagtaatggttatggcttagttctctatcatcttatactacatatgaaatcataatcaaaagaggatatcttaagctaagatattctcttttttactagcagactactatatatatttaaataaaaggatatatatcaaaaaaataattctttacaatactacaagaatatagttatatgtgtgtatatttatgatatctatatgcaatgttcggaatcattaataatgatctcaaagaggagaatgcagaaatgtagaaaactctttgagattttttgtttataaaaaattaaattatgatatcccaataatggtatcttaaaaggttgaacaagaatggagtgattaatttgaaatttgttacattttctggaccaccatcatcgggcaagacttcagtaatattaaaggtaattgagtgcttaaaatcggaacaaagaaaatgtggagttgtaaaatttgactgccttacaacttatgatgatttactttataaaaaggcaggaattgaagttatggtaggattatcaggaaatctttgcccggatcacttttatatcagtaatatagatgattgtgttaaatatggaacagagaatgggttcgatttgttgataagcgagagtgcggggttatgtaataggtgctcacctcatattaagggtattttagcagtatgcgtaatagatagtctgtctggagtaaacacccctaaaaagattggaccaatgttaaaatatgcggatattatagtaattacaaaaggtgacatagtttctcaggctgaaagagaagtgtttagttttatggtaaaagaggctaattccaaagcagagatagtgtatattaatggtcttactggtcagggggcttatgaattaagcttaagcataaaaaaagcaaaatctattgagagtcttgaaggagaaaaacttagatttacaatgccttcagcattatgctcttattgccttggagaaacaataataggtgaagattaccaaactggaaacacgaaaaaaataaatttccaagaaattaaaagtaacagagaacttaaaacgagttattctttcaacaaaaatagtgaaatatctgaaatagactgcacaatagttaactcgttaacaattgtaggaggacatgataaaggtggaaataaagaagatattgaacttacaattaaagtaggggaagtaatttgcatagttggacctacaggatctggtaaaagtagattactcgaagatatagagtgtattgcgagtggtgatactccaactggaagaattataaaaataaatggagaaaatttaaattgtagcaggctggttgcagagctttcgcagaatatgaattttgtaatggatgtatctgtagaagaatttataaaaatgcatgcaaaaagcaggaatgttatagagataaaaagtattacagacaaaatagtaaaatatgcaaatgaactagcaggagaagaattcactggggatacaccgataacttcattgagcggggggcaatcaagagcattaatgattgcagatacagcattattaagcgcttccccaatagtactcattgatgaaattgaaaatgcaggggtagatagaagtagggcattagaacttttagttaaagaaggaaaaatagtttttgtatctactcatgaccctatattagcattgcttggggataagagaattgtgataaaaaatggtgcgataaataaagtaatcacaacagttccaaaggaaagagataatcttaagattatgaaacaaattgataataaaatgttagaacttagaaatgccttaagaagtggagaagtaatagattgggatatgaaagaatattttctatagatatccaaatgcgacttagacttacgcaatagccaaccgaaattaggtgaactctgttgtttcggttgctatagaatacagctgtgaatttctaacatcagaagttgcaacatttctgcatgctcccgaggcaagctcgtgacaagcaaaaatggaacatcttcttattaaaaataagtgaaaaaaatataagatggaggttgaaaatatgggaaagatgaaaaatataattgataaatcagaatacgatgttcttggattgttaccgtgccctataaaagtgccaatagaaattggttttgatgaaatgataaataatttagaaagtgaatgtgattttaaatatcttgttgaaggtaatgctaattatgaggtcatgtggatggatgagtcttcatatattcctaaaaaagaagaattgccaaagattattataagtgctggagttaatagtttttatagaaaagattttagagctaaggcaatagaagagaaatactttaaggaaatcaaaaacatagaagatggaaaattaattgaaaatgattttagtgatccaaaaggtaattattatataatggcattaaatcatttagttatggcagtagatttaactaaattgaataatagaaatataccaacctcgtggggagaacttttgaatagttcatttaaaaaagaagttgccataagaggaaagcgaggaaagtattgtgaaacaacattgctagcgatatataaagattatggtatggatggaattatgaaattaaaagaacttgttggctttggcggacatccagctgaaatggtaaagaatgcaggaaaaggaattgagaattcacctacaattagtgttattccctatttttatgcaaggcttcttaaaaataataagaatgttaagattgtttggcctgaagaaggtgcaatagttagtccagtgacattattagtccaaaatgatatttcaaacatgttggaaaatgtggtgagccattttactagtgaacaagtacgaaatatatgcaaagatgcagcactgcctcatccaatggattatttagagtgcttaaaagaaaacaattataagttaaattggttgggatgggattttataagcaataatgatataaacaaattacttccaaatttaaataaatgtttctaaatgctagaaattctcacctctaaatgttagaataaattattatacggaggagggaagttctatgaataatgaagaatccctaacggcagtagatgtcgctgaactattaaagataactaaaaatacagtgtatgaaatggtcaaaagaggtgaattacctggatacaaagtggggaaaaagcttagaattgataaaaaggatgttgagaattacatcaatagtcaaaaggtagcaaaaggtagcaataatcagattaagatattaatagatgagccagtaatagaagaaaatctgagtaatataaaaaaagcggaaaattcaaatgatattataatatcagggcaagatgtgattttagatgttttagcagaaaaaattagggaaaaggcaaatgatataagggtccttaggtctaatacaggaagctactcaggtctatatgacttatataatgataaaatttctatatcgtcagtacatttatgggatggagatactaatgaatataatactgcttttgtaaggaaactagttccaggtatatcttgtttaattataaacttggcttacagaaatgttggtttttatgttccaaaaggaaatcccaataaaataactaattggaaagacttgattaaacaagatatatccatgataaatagggaaaaaggttctggaataagaattttgcttgatgagaaattaagagttaataatataaatagagaacaaattaaaggatataatattgaaaaacaatcccactctgcagtagcaagaagtattgcaagaggggaaggtaatgttgggataggaaatgaaaaagcagctaatcaggttgatgggattgattttattaaaattcaggaagaaagatatgacttagttatcaaggaatctgatttaaaatatcctatatatcaacttataattagaactattcaaagtgaagagtttaagagggaaattgaaagtttaggcggatatgatttaaaagatataggcaaaatacttgataaaacataaataatgatatagtataagattaatattataattttatgcaaaggcgcagtaattttactgtgcctttttgttattaaaaaataaggtatatgaaagaaaataatagatgatgattgattattttttgaatatatctaaataaaggagtgatagtatatggatgaaataggagtatttttaaacgaaaaagatcttataagttcttttgaggaagcacgatatgtaaaaatatttgcaaaagaaaaacatttgtggaaaacaaaaaaaaccattttaattaatagggcaggtggtgaaaaatcaataaatgaaatcagacaggaatacaaaaatgtaattaatgaaatggatgattgtaaaattataatagtaacaaaggcttttggaattccgtatagtgtattttatatgggggattttagtgtttgggaattggaaggaaacccatttgattattttgatgaaattattaaaaatgaaatggtacaagaggagaatgaaaataaagaagttgaaattgctaagaaacttggtgatggatatttcatgatagatctacaggaattagagctgataaatcctgaaataacttctaaaaaggcaataattccttatttagaaaaagaagatgtaaaaaaaatagaagtacgctgttgtcatgtaccgccttggctggttgcaaaaatggacaagggtgaaatcttattatccattaatgagataaaaagaaatgattatatggtaactgtacagaaaaatgtttgaggcacatgaaaaaaataatagactaggaggcgaatttatggagaaaataataactaagtatggtattttaaatgatgctattattgctgagtattattccactggggaaccagaagcgtataaggtggaagaatacagcgaattaaaagttttagactataatttagtaccgttgcatggatttgtagatgaaagaagaaaagaatttccaccagtaaaggtatttaagaatggcaatattaagagtatttcattaaatgatttgacagtaataaatactagtataggtgtatttgaagttgaaaaaataacattctatgaagatggtgaaataaatagattgtttcctttggatggaagattgtcagggtattggactgaagatgatgaatataaattagcaaaagcttataaatttagttttgatttttcatcatttgaagctaagattatgtctcttcatttctatgaaacacaagaacttaaaagtatcacattgtggccaaaagaaaaaattaaaataaatgttggagaatataattttgcaggcagaataggagtctctttatataaaagtggaaaaataaaatcctgtgagccattaattgcaacaaatataaaaacgcccattggaaaaatcgaagcttatgacgttaatgcaatgggaattcatggggatagtaattctttagaattttatgaggatggaagcataaaatctcttatcacatctactaatacaattacaattaaaacatcggaaggtgacacgatttttcattctccaaaaaaaattagattgtattctaacagtgaagttctggatacgataactttaaaggtggaatttattgatgataaggtcataatagataaacaatatgaatatgagattaaagaaaataaatttgagataaaagcatttggagaaagacactttacccttaatggagatagaaataaataattctcattaaatttaacaaaacacgaatgattttgataaattgataaaaatatatcgttatcattagaaaagttatagaaaataaaaaaatagtttgcaatatcagttttttgtgatattatagtttcaataaataaaacaagcaaatgaaaaaaagaaattaataaaaaagtaattatatacaagtttttttgaaataatataacttaaattaaaaaaatattaacctgtcattaaggcaatggagtctaagtgtttaactcaatgaggaagttaacgacttagatttttttattacaatgaaaggacaaagaagtctattttattataactattaatagttaaataaattaggcttatttttttaaaataatttattgttatattaatacaaataagttataatgacccatttgggcttatataatatatttaattatgaggaggaaactaatatgagacaagtagctatttatggaaagggtggaataggaaaatctacaaccacacaaaatttaacttcagctttagctgaaatgggaaagaatataatgatcgtaggatgtgatcctaaagcagattccacaagattagttcttggaggtttagcacaaaaaacagttctagatactttaagagaagaaggagacgacattgaattagatgcaatcttaaaaacaggatatggaaatataagatgcgttgaatcaggcggaccagaaccaggagttggatgtgcaggaagaggtattatcacttcaataggaatgcttgagcaattaggagcttatacacctgatttagattatgtattttatgatgtattaggagatgttgtatgtggaggttttgcaatgccaatcagagaaggtaaggcacaagaaatatacatcgtagcatctggagaaatgatggcattatatgcagctaacaatatttcaaaaggtattcaaaaatatgctaaaactggtggagttagattaggtggaatcatctgtaatagtagaaaagttgataaagaattagaccttttagaagcttttgcaaaagaacttggaagtcaacttatccatttcgtaccaagagataacatggttcaaagagctgagatacacaaacaaacagttatagaatttgatccaaaagctgatcaagcagatgaatacagaacattggctaagaatataaacgaaaataaaatgtttgttattccaaagccaatgaaacaagaaagattagaagaaatattaatggaatatggtttaatggatatctaagataaaagcacaattattaatttacaattcacaattattgattaatgttgaagctcataaagaaagttttgctaaccaaatagaagattcccacaaggcgaaagttctgttatccaaatacaagatttggagcatcacttttggagcaccacttttcaattcaggattttttgaattcaattatttataatgtgaaatttaagttgaaaaatatataaaacaaaatattaaataaaaggagatagagagatatgtatatgattcgagcaataataagaccagaaagggttagtactgtgctttcagaattattggatgctggcttcccagaagtaacgaagatggcggtttatggtagagggaaacaaaaaggaatcaaagttggagaaatctattatgatgaacttccaaaagaaatgcttctaattgcagttaaagatgaagataaagatgatgttataaaggtaataattagaaattctagaacaggagaaaaaggtgcatttggagatggaaaaatattcgttgcaccgattgaggaagtatacactgtaagtagtgggaaatcaggattataaaattgaaataggaggaatagctttatgaaagaagttatgtgtattattcgtttgaataaagttaataaaactaaagaagcactcgcagaagctggctttccatccattacttgcagaaaagtacttggaagaggcaagaaatcaattgatatagctttagttgaagcttatatggaaactggtgaagtaccgccaacatcgtatggtgagaatttatcagaaagaggaagattaatacctaaaagatttataactttagtagtaaaagatgacgaagtaaaaacagtagtagataccgtgataagtgtaaattcaactgggactccaggagatggaaagatatttgtattaccagttgaagaagtatacagagtcagagatggacaaataggtgaagaggcaatttaaagtgtggaggtgaagttaatgagtaaagttgatagtgttttggacaagtatagtgccaaagtatataaaaacagaaagaaacatatgcttgaacttgagcaggaaactcaagaaatagatgcaaatagaagaactataccaggagttatgacacatagaggatgttgttatgctggatgtaaaggtgttgttcttggaccattaaaagatatagtacttttaactcatggaccgataggatgtggatattattcatggggtactagaagaaataaagcaataccacagaaaggcgacggaaactttatacaatattgtttttctacaaatttaggtgaaagtgatatcgtatttggtggagaaaagaaattaaaggctgctataaaagaaattgtagatatatttaatccaaaagcaatatttatatgtgcgacatgtccagttggacttataggtgatgacttaccagcagttgcaaatgaatctaaagaattgtatggaattgatgttatatcattcccttgtgaaggatataaaggtgtatctcaatcagcaggacatcatattgcaaataacaagctgataaaatctgtaataggaactatggattacacaccaaaaactcattcagttaatatccttggtgaatataacataggtggtgacgcttgggaaatagaaagaattctaaagaaaataggctatgaagttatatcagtcatgacaggtgatgctagcattgacgatataagaaaagcccatactgcagatttaaatctagtccaatgtcaccgttccattaattatatcgcagaaatgatgaaaattcaatatggtactgcatggataaaagttgattttatcggggttgattgtactgttagaactttaagagatattgcgaaattctttaatgatccagagttcacagaaagaacagaggctgttatagctgaagagcttgaagatattaaagatgatatggattattataaaagcaagttaactggtaaaaaggcaggtttatatgttggaggttcaagatctcaccattatcaaatgctattaaatgatttaggtgtagaaacattagttgcaggatttgaatttgcacatagagatgactatgaaggtagagaagtaataccaactataattgaagatgcggatttaaaaaatatcgaagtattagaagtagaaaaaattgaaggtaaatataaaccagttaaaacagatgaagaattagaagaattaaagaaagaaatcattaatttagaatattatccaggtatgatgcgtgacatgaaaaaaggttcgattgtagttgatgacttaaatgaatttgaaacagaagaatttattaaaaagttaaaacttgacatgtttttctcgggcattaaggataaatatataatacaaaaaggtggagtattatcaagacaattgcactcttatgattatagtggaccttatgcaggatttaagggtgctgcaaactttggtagagatgtaacaatgagtttatatactccagcatggaaatacactgtagctccatggaaaactgaatcaatattagaaggaacatttggaggtgaggtataatgttagatttaactcctaaagaaattaaggaaagaaaagcgattactattaatcctagtaaaacatgtcaacctgttggtgctatgtatgcagctcttggagttcatggatgtatgccccacagtcatggttcacaaggttgttgctcatatcatagaacagttttatctagacatttcaaagaaccagctatagcaactagttcatcatttagtgaaggtgcttgtgtatttggtggtggtagcaatattaaaactgctgttaaaaatatctttgatatgtatgatccagaaataattgcagttcatactacatgtctatcagaaacaatcggtgatgatttaaaaggttttattgatgctatagatattccagaaggaaaatatgtgttacatgcaaataccccaagttatgttggatcacatattacaggattctctaatatggttactggctttattaaaggtttatctaaaacaactggagtaaagaacggaaaaatgtgcgtgattcctggattcgttaaccctggcgatatgcgtgaagtaaagagattattaaaacttatgggtgtagattttacaatgttaccagatacaactggagttttagatgccccaatgactggaaaatatgaaatgtatccaaagggtggtacaaagattcaagatattattgaattaggtgactgcgaaaaaacattagcactaggaagttttgcttcagaagcaggagcatctactcttgaaaaatcattcaagattccatactctacattaaagatgccaataggtattggttctacagatgaattaattatggaattaagtaaattcagcaagcaacaagttccttatgaacttgaagaagaaagaggacaattagttgatataatgattgactctcatccatattatgatggaaagaaagtagctttatatggagatccagatgtgctaattgctttatctaaattcttattagagcttggaatgattcctaagtatgtaattacaggaactccatcaaatgtatttgaaaaacaaatgcaagcattgtttgatgaatttggtgttgaaggctgcatagctaaacaagatgctgatctttttgaattacatcaattaattaagaatgaatctgttgatttactaatgggtggaactcatggtaaatacatagcaagagctgaagatatcccactagttagaattggattcccagtattagatagatatgttcattcatatatgcctaatgttggatatagaggtgctatgagattattagaattaatgcttggtgcattaatggatagacaagatagagacgtaaaagatgaagattttgaattagtaatgtagataaatatgcataattaccgaaatcataaatattttgattccgaaaaactatgaaaatatcgctgaaggttctaagcagcaggttgtatccaatttagcatgctccaactttcagtttgacaagctaaattggaacaacctacagctaagaacctttaacagctcattttcaaatgttttctccacaaatatatttatgatttctagtgaaaatatgaacttaaagttttggcaatttctaatgaagaaatcctacattagtattctaaatgcaacactgcatattatgacccttgtggttataaaagagtacctatcatttctggtgtaatgtatactccaaaacttaaatttatttttaaaattatttatctaaaaatagtgtgtgaagtgagtgtttaataagtatttagtggaaagatgtgtattttggataaagttttcactgcaagttaagtgtaaatgttgatttatttgtttaagaaagtacccaccatttctggtgcggtgtatatctaaaatttaaatttgttttttaatttatttatttggaaagagtgtgtgaaatagtataaaccaaatcatatgtatatgttgcaattcacaattgaggctaaaattcttgcaatatttttagaattatgatgacgaattagttttgcaacatatatacacatataaaaaaagcagctatgatgcaattaagattttaaaagatatgttaaattcaaaaaagttaataatttcaatgattgagcaattgaacatgggtaaaacatgtcaattgctctatttattaatagggcttttaatgctcattaatattgaaaattgagaatgtagaatgagtaataaatttggttataaggaatttataaaaaatgtattgtgtggcattgtttaaagttaagttaactttcatcctttattctcaattctcaatctataattacaaatttaaaaggtggtgtgtgacattatggaaaaaaggatatctaattcacttcttgaagaaagagaagattttgtgtgttttaaacaaggtcataataaaaaatctatgaagtgcgatggtgatagtgtatcaggatcagttagtcaaagagcgtgcgtatattgtggagcaagagttgtattaaatccaataacagatgcataccacatagttcatggacctattggatgtgctagttacacttgggatataagaggaagtctttcaagtggtgataatttatatagaaatagtttttcaacagatttaagtgaacaagatgttatttttggtggtgaaaaaaaattaattgctgccatagaagggataatggaaaatcataatcctaagttgattttcgtttatgcaacttgcattgttggagtaataggtgacgatgttaaggcagtatgtaaaatggctgaggaaaaatataatgtacctgtcattccagttatgtcgccaggtttttctggaaataaatctaaaggatataaattagcatgtaatgcactaatgaatttattttctaggaatattctccctaagagaaaaggaattaatatgttaggagatttcaatttagctggtgaaatatggatagttaaagagtatctaaagaaaattggagtagatgtgatatcaactattactggagattccagctatgacaaattaatcaaagctagcagcgcaagttttaatgttgttcaatgtgctggttccatgacatatttagcaaagagaatggaagcagaaatggacattcctttcgttaaaataagttttgtgggacttgaagatacaaaaaattcattactcagaatagcaagcttatttggagatgaagaaatgttagcaaaggctaaggcttttgttaaggaagaagaagaaaagatattgcctatattagaaaaatataaggaaaatcttagaggtaaaaaagctgcaatatatgtaggcggaggatttaaagcaatctccttaatcaaacagtttaatgaacttggaatagatacagtgatggttggaacacaaactggaaagaaagatgattatgaagttataaatagtctagttagggatggaacagtagttttggacgatgcaaatccttcggaattagaaaaatttatgattgagcaggatgtagatattttagttggaggggttaaggaaagaccacttgcttataaattgggagttgccttttgtgaccataatcatgaaagaaagcatcctcttggaggttttgtaggagctgttaatttcgcaaaggaaattaatctttcaattaatagtcctgtatggaagtatgtaaaggagagtgaagagaatgaaggaatctaaaagttatgtaaatctaaccgtaaatccatgcaaaatgtgtatgcctatgggagttagcaatgctttatatggaattaaaaattgcatgactatattacatggttctcaaggttgtagtacatatattagaagacatatggcaacacactataatgagcctgtagatattgcttcatcttcactaactgaagaaggaactgtttatggtggtgaaaataatttaattaaaggattagaaaatttaattaaattatataacccagaagttataggtattgcaacaacttgccttgcagaaaccataggagaggatgtagtaagactttcaaagatattttatgaaaaacatccagatagtaaagttaagttaataccaatacaatcgcctggatatggtggaactcaatatggcggatattttacagctttaagggcagttgtagaaaatgtagaaatgtatacagataaaaatgaaaaagtaaatgttattgccgggccaatgagtagtgcggatatgagggagataaaagagatcttggaggattttaaaattgattatatattgctgcctgacttatcggagaatttagatggagttcatagtaaaaaatataataggcttccaagcaatggtacgagtatagacgaaattaaatttatgggtggtgcaaaggctaccattgaactaaccacatttattaaagaagaatattctgtaggagtttatttagaggagaattttggagttgagaattttagaattaatgttccaagaggtcttagagatactgataattttttaaaagtgctagctaaaatatcaggaaatccaattccagaaaaatataaaaaacaaagaggaagatatttagatgctatgattgattctcataaatataatgcagaagctagaattgctatatttggagaacctgattttgtatactctactgcaagattagctgtggaaaacggagctgtaccagtacttattgcaagtggagatgtatgtaaaaaacttgaaccaagcttaagggaagaagttgacgaactttcaaatcagttatttgcaggtgaatgcaaaatcatagatgaggcagactttaaggaaatagaaaaattcgccttagatttaaaggtaaatgtaatgattggaagctcggatggaagaagaatagaggaaaaacataagattccattaattcgaatgtcatttcctattcatgataggatcggtggacaaagaatattatctataggctatgaaggatctttaaatttaggggatcaaattactaatgttatgcttgctaagactgaaatgacctttagagagaatttatacaatgaatattataaggaagaagttgaaataagtaataaagatatagcaattgagggggagaaaaagatggaagcaagaattatcagcagagaagaagtagaagaaaaaacaaaaactcatccatgttttagctgttcatcagctcacaagtatgcaagaatgcacattcctatagcgccaaagtgtaatattagctgcaattattgtttaagaaaatttgattgtgttaatgagagcagacctggggtaacaactgaagtattatctccagaagaagcttttgctaaatacaaactagtaaaatcaaaaatggacaacttaaaagttgttggaatagcaggacctggcgatgctcttgctaactttgataatgttagggaaactttgaagcttataagagaacatgatccagaagttacattttgtctatcaacaaacggattaatgcttccattttatgctcaagagctgattaatttaggagtaagtcatgtaactgtaacaatgaatgctattgatcctaaaataactgctaaagtatataaattcgtagattacttaggggttacttatactggtgaagaggcagctcaaatccttttaactaaccaattatcaggtattaagtatttagctgatagaggaattatggttaaggtaaatatagtaatgcttaagggaatcaatgatcatcatatagaagaagtaacaaaaaaagcaaaggaacttggagcaggaataacaaatataatgcaaatgattcctgtaaaaggaagtgtctttgaaaatatgccgcttacaagtaataaagagataatggatttaagaaaaaaatgtggagagcatattgagcagatgtatcattgtaagcaatgtagggcagatgctattggtttacttggagatgatcaatctcaaaaatttaataagccatcaaatgtaaaggaagttacagaagaaaaaccactaaagtttgctattgcatcaaaaagtggaataggcgtggacatgcattttggacatgcatctgaattttatatctatgaatataaaaatggagagccaagatatttggaaaaaagaaatgttgaaaaatattgtaatggtaaagaagtttgtgaggaagaggaagataagtttgctaagctttcaaaagttgtttcagactgcaatggagtactttgtcttagaattggtgatgaaccaaaaagaaaatttaaaagtatgaatatagaagtttttatgacatgtgaaaccattgaaacagctgttgaaaaagcagcagaagctatattaaaaggaactgaagttgaagaaatgctaagagcttaaacctgaataatgagtatatacaccgaaataatgtggcatgcgtttgctacagttgacccgagatttatctggatgattctaaggctacaaagttgtgcccacaatgcttgcctcacaggcaagctgtgaacaagcacatgtggaacaacttataacctaagaatcataaccagataaatcactaaggcaacatttcgcaaaagcattctccattatttctgatatattatagatactcaatataccaggtttaaattaaagtttaataaaaaaggagaaatgaaaaatgattaatttaaaacatcatatttttgtttgtgcaagttgtagagttaatggaatgcaaaaaggaatgtgctattctaaagattcagtaaaggttgtgcaaaagtttatggaagaagttgaagaaagagatttaataaatgaagtaatggtgactaatacagggtgtttgggagtttgcaataaaggtcctatagtagttgtttatcctgaaggaacttggtatggaaatgtaaagattgaagatgtagaaagaattgtggaagaacatattgaaggtggaaaagtagtacaagaattagttatttaaaaataaattttatactagtccataaaagtgggctgtcacactatgaactgctttgtgttaagcaacagtgaaaaaataaaaatatttgataccgccaattacaaaagtattggcggtattttatgctacagattcggatattctcgatggtataaggtgccgtattttagaatagcattgttttactgcattaacaattcgtggtataatgaagcataattaattgaagccatagagagtaattatctctatggttttgattttaagatagctctgtccatgtaaaaaaatttagatttgtttttgtttatgaatttaaaaaattgcttagatcataacgagaatcaatgatgtaaggagatttgaaaatgataagtataactaaacttttatgtaattctgataattatggagatagcttaaggtatgtagaaggcgcagccatagaaaagtatggagttagtccaggaagaggacctgtagttgcttggaactgtacaaaaacttgtaatttaaaatgtaaacactgttatgcaagttcagataataaaagatatgatgacgagcttacgttagatgaatcaaaaaaattcatagacgatttaaaagattttaacgtaccagcattattgttttctgggggagagcctctgatgaaggaaaacattttggaattattagattatgcaagtcaaagaaaaataagaagtacgatatctactaatgggactcttttagataaagatgtttgcaaatctttaaagaaaataaatcttggatatgtaggtgtaagccttgatggtataggatcaaatcatgatgcgtttagaggtgttagtggtgcttttgacagtgctttaagaggaataagaaattgcattgaagttgatcaaaaagtaggtcttaggtttactataaataaaaacaattataaagaattggaagatatatttaagctaatataaagaagaaaagatacctagagtgtgtttctatcatttagcatattcgggaagaggaagtaaaatggtagatgaagatatttctaaggaagaaacaagacaagctctagacttaatcataagtaaggcaatagaatttggtccaagtgttgagatacttacagttgataatcatgcagatgccgtttatacatatttaaagtcattagagaaatttaaagataaatcagataacatattaaaacttttaaagactaatggtggaaatagatcaggaatggcttttgccaatgtagacttttttggaaatgttcatccagatcaatttacttggcaacatacttttggaaatgtgaaagaagaaaaattcggatctatatggagaaattctgaaaatgaaatattaaatggtcttagaaatagaaaagaattattaaaaggtagatgttcttcttgtaaatggttaaatgtttgtaatggcaatttcagaactagagctgaagcagtttataatgatttttgggcagaggatcctgcttgctatcttacagatgatgaaattaatattatgaaataagaaatacaaaagggtatatgagattttatgtaaaggtgagtgaatgcaaatgataatatcatggaatactacaaataaatgcaatttaaagtgcagtcattgttatagagattcaggcaaagaaagtcaaggtgaattaaatacagaagaagcaaagttacttatagatcaaattgcaaaagctaattttaaaataatgatattctctggtggagaaccattaatgagagaggatatttttgaattaataaattatgcatccaaagctggcttaagacctgtccttggaacaaatggtacccttatatcaagggaaattgcagaaaaattaaaagctgctggtatttctgcaataggcataagtcttgatagtcttgattcaaaaaaacataataaatttaggggaaataatgaagcttttagagataccatttatgcaatgaaaaattgtagagatttaggaattagatttcaaattcatacaactgtcatggattggaataaagatgagataattagtttgactgatttttcagtggctatgggtgcagccgctcatcatatattcttccttgtgcctacaggaagaggaaaagatatagaagatgaattattaagttcaaaagagtatgaagagttattaacatcaataatgaaaaagcaaagtgaagtaaaaatagaaataaagccaacttgtgctccacaatttgttagaattgcagaagatttaggtgtaaatagtagatttaaacgtggatgtattgcaggaagaagctattgtattattaatccaaaaggagatgttcaggcttgtgcttatttaacagaagtagctggtaatataagagaaataccatttgatgaaatatggaaaaatagtgaattgctcaataacctaagaactcaagaatataaaggaacttgtaacagttgtaaagataaaaaaagttgtggaggctgcagagcaagagctgcatattataatgacggagattatatggcatcagataaaatttgcatttttaataattaaaggcaaggattctatttgacattccaaaactttaagtgaggaggaactgctatggataaaacagataaagaattgcttaatttaatgcaaaatgaaattccaatagataagaatccttttaaaatactaggggaaaaattattacttacagaaaatgaagtattaaaaagaataaataagttaaaaaatgaaggaataataagaagaataggtggaatttttaattcgagaaaaattggatatacaagtactctttgtgcagctaaagtgcctgaaaatgaaattgaaaaggttgcagaatatataaatatgtatgatgaagtgactcacaattatataagagaagatgagtataatatgtggtttactatgataacgcgttcagaagagaatttgattaatattcttgaagaaataaagagaaatactggtttggaagaaataatgagtttaccttcagttaagttatttaagattaaagtggctttaaatcttcaaggagatgatacaaatgattagtgattttgataagaaaataataagtagattgcaagaggatattcctataataactaatccgtataaggatatagctaaagagcttagtatggatgaagatgtgcttatagataaaatcagaaattatagtgaaactggaatattaaaaagaataggagcaatactttatcatagaaaagctggatttaaagctaatgcaatggtagtttggaagattgatgatgaaagattagatgaaattggagaatatatggcatccatttctgtagttacacactgttatgaaaggaaaccttttggttcgtgggattataatctatacacaatgatacacgagaaagataaggaaagctgtaacaaaattattaagcagatagctgatgatataggaattgaaaattacaaaattttgtatagcacaagagaattaaaaaagactagcatgaaatatttcaaataaatatatatacaaagcattggttatgtgataatatatgtataaaatagcatattaacaaagacaatgtggtctaaaaccaaactaagaagttttgttttaggctattttttgttggcaagggagcctgtttaatatatataaatatattaagtaggctccttttagatagattatattcacatgtagaaaaaatttgcaattaaaaaggggtggaattatggatgaaagaaaaatcgaaattatagataggacaataattgttttgagagagatatttggtgataagttaaaagagaaaagcgcacaggtaagagaattgataaaattactatatataataggaagcgattatatagaaattacgcaagagctttatgaagaactatcaccattgcctcaagatgtaaaattcataatatctaacaataataaaattgaaataggaagtgttaatgtattatatgagatattagacaataagctaaatatatataacaaaatgaatgcaagaatagtaggacttgatgacattatcttttatgattatcagcagatttttttagagataataaagttctttggaaataatatagagctaagtataaaaaataattataaatcagctacagctatgagtttagaatgggttaaagctggagggaaaaaagttgtaacgacttttgcaggaattggtggctttgctcctcttcaagaaatattaggagggtcttcttttttagagaaaataaaagatcatagtaattataagctatttcccaaggtattaagcatatttgaagatattactgaaagtaaaatcagaggaaatgcaccttttataggaaaagatattttcaatgtagaatcaggaattcatgtaaatggtatagctaaagattcaagaacttttgaaccatatgaccctagtgaaattggaaggaaaagaaatattattataggtaagcattcaagtgtaaatgcattagaaataaaattagaagaactaaacataaaatacgagcatgataatttaacaattatgttggaagatgtaaggaaattgagcacacaaaagcgtggtggattaagtaatgatgaaataaaaagattatataagaaactgtgtgtttagattttataaggtggtgatatattgatttataatgaaaaattagacaatgaaatatatattgtggatacaactttaagagatggtgaacaatgtgcaggaaaagctttttcaattgatgaaaaaattgaaattgcgaaatatatggataaaatgaagatttatcagatagaggcaggcatacctgcaatgggagatttagaaaaagaatgcattaagaggatattagaaataagaaaaaattcactaatttccgcttggaatagaatgaataaaaatgatatatttcattcaatggagtgtaaaccagatattattcatattagcgttcctacatcggatatacaaatatattcgaatttaggaaaggataaaaagtgggttgaagaaaatattaaggaatgtgtatttttagcgagagataaaggttatgaagttactataggttttgaagatgcttctagggcagacattagctatcttataaatttgtgtgaaataattattggtatgggcgtaaagcgggcaagatatgcagataccgtaggaatatcaatgccttcacttataaaggattcaattaaaactttagtaaacaataccggaatagaaatagaaattcatgctcataacgattttggaatggcgattccaatttccctagaggcagttaaaagtggtgctaaatatgtggattgcacgttgggtggaataggtgaaagaacaggaaattgtaatctacaggagtttttaaaaatatcaaatgcatatttaaaaagaaataaaaaaattgagggattgatttagatatatatgctataattcacattttacaattcacaattacgtctaaaatccttgcaatatttttagaattatcatgaaaaattattttggtaatatattattgtaataataaatttgtaagtggaattctattgagctaattgcattaaatgagaataataatgtagaaactcaattacaatatgttctaatataaaacatttctaaaaataattaaaaaaatcatataaataaaaaagtgagcttgaagaatgtagatattatttcaagcttattttattgcgtgggaaattatggacattcaactaagacctgaacttatgcatatatctttccgaaagtagaaacattgttatttcgcaggactatgaaaataagctgttgatgtttcttaatgggaggtgtttgatttgctgcttgtcatgagcttgcctaaggagcatgctgaaatgagtgcaaccttttacttagaactttctagcgaaaatttcttaagtcctgtggaataaaaatatatgcaatttcggtatatatagataaacaatttaagcattcgaattattagaagagcatatttgcaaagttgataaaactttaagttcatgtcttcattagaaatcataaatatatttgtgaataaaacatttgaaaatgagctgttaaaggttcttagctgtaggttgttccattttagcttgtcaaactgaaagttggagcatgctaaagtggatacaacctgttgcttagaaccttcagcgatattttcatagcttttcggaacaaaatatttatgatttcggtaagttatcacataaatctaagttcaaagctagatatctatattgaaaaaatataagttgcatagtattatttataaagtccaaaataataaatatgtttaaataaaattgtgttataatttattacataaattattgtaaattggcgggtgaacaagatgaagttggcagatgaaaaaaaacaaattatgagcaaactaaaaagtgaagaagtaaataatcttctagaaagatatagcatttcgagtatgctcacttttggaagttttaacaacgatgatttcactcaagagtcagatatagatatagcagtaataggtatagaaaatatacctttagataaaatattagaacttgaattatttttagaaagaactttgggtaaagaaattgatgttatagatttaagaagtagagaattaactatatttttaaagataaatgtattaaatgaaggtaaaattatatattctaatgataataatgttattttagaaaagtataaagatgaagttgatataatatatagagaaaatgagaatttcttttggtttagaagaagggatgtgttgtcatgaatcaagaaagacttataaagatagttgaagattttcaagagtgtataagtgatatcgatgaatgcattgagatattaaaaaacaatagtgataacaaaataatgattaagcttgcaaaatctagtttgagacaattatttgtaagttttaatacaatactagaagactttacatcggtaactcttaagtcattaaaaaaatataaaataggtatgactttaaatgatagtttagaagttttaaaagaggaaaaagtgcttgatgctgagttgtttaactttttagaaaaatcaagactgcttagaaatagaatttcacatagatataaagaaccagcacatgcagaattatttgagcatgttgtaaagtataaagatgattttaagaaaattttaaatattgcaaaacagtatttaaaagagtaagtaggggaagagatgctagaagatttaatcagtgttttagataatgtaatatatttagatatagaaacaactggacttgatgaaacatgctcagaaattatagaaattggagctgttaaagttaagaatggagttgtaactacttataatacattaataagaccaagaggacgcgtgccaataagtatttacagtctctgcagtgatctaaatgaggcagatttactaagtgctagaagtttgaattctataaaaaaagaagtactggaatttttagaagatttacctttaatatgccataatgcaaattttgaaagaaaatttttatctttttatattcctgaaataaaaaatacaataatggattctatggagcttgcaataattttagaaccatggagaaaagaatataatttaaattctttgattaaagaaattactaatttaaataaggatgagttacatagaggactatcagattcaatagacaccttaaaagtagttaattcactacttttaaggcaatggaatagagaagaaaatagcagaaaaaagaataaatctctgcataatctaattattaaagaatatcagtatttacaaaaatggccatggactaagcatttattgaagcctccttttttcattgaggaaggttatacatatgtaaattacctagagaacaaagaagaggaacttaagctaaggaaaattcctatagattatttgaaatatgaagatttacttgaaaatgaagagatatggaataatggcggagattttggataccagtatagaaaagatcaaaaggaatttgcaaaaaagataagagaaaattttgaaaaatgtgagaggatatttatagaggcaccaactggaagtgggaaaacttttgcgtatgtaataatagcggctattgaaacgtacctaaataagcagaaaaatagaaaagatgatgctagctttattatatctaccaatacaaaggaattacaaaatcaacttattgagagggatattccgactatacttaaaaaattaagattagatgataaattaaattatggtgctatgaaagggaaaggaaattatctttgcatagaaagaataaataaatgtgaagaatttcagatggatgaaaaagggaatctagcattactttttctaaggagactttgtgaaaatggtaattatggagatatagaaaatataaattatctagttcaaaaacatctggaattggataagtacataagggaagttaattgtgatagtgaacaatgtaagcttgataaatgtacaagggcttgcttcctaagaaaaaggtataatgagctgcctgaggaaaacatcacagttattaatcattctcttttagcatgctggccatatactgaaaagaaaaagattaaccacataattattgatgagggtcataacttaatggaaaagtgttatgatttttttgctgaggaattttcgtcagctgaatttatacaattgctagatcttatagaaaaaggtcacccgagtattatagctatgcttttaactttaaatgctagttatggttatagagaaaccatagaaaaagataaaattatgtatttagcaaatgacattatagtaaatataaatatattattaaatgattttagaagtataaggcttgttagcggggaatataattttactactgaatttttccttccaagagaagatttaaaagtaataacaaatgccgtaggatctgagatatcagttttgaaagaaagtatatatccactatataagatgttaaatgattatatttataatataactttagatgatgaaatagatggagatattgaccacaagaatttatctgatttcatagcaaagcttaaaagtgcatttgatgttttagataagtttttagaaagctcagtgttctatgcaaaaatattagaagtagactcagaatataaatcattcacacttaaaaatgttcctttaaatgttggagaactagttaatgaacatatgttaaaagatgttaaaagtacaacgttcttatcggcaacattgagaatagaaaattcttttaataaaataaaaaagcatttaggacaggaaaaggcaaaggagtttataattccaccaacttttgatttaaagaaaaggactaaaatctttgctttaaaagatgttgggaggtatgatgaaccatcatatataaaaaatgtttcaaaatttatttataatgctgcattaaaaataaatggtcatattcttgttttattcaataataatgcaaggagaactgctgtgaatgaagagcttgagctgcttactagaggaacaaaaatagaagtacatatgagcaaaaaatcagtaagagctttaaatgataaaaataggcaggttataatacttggaagcaagggcttttttgaggggatagatgtacctggagacgcattaagctgtgttatgttagataaaattcctaactatagtccagaatatcctattttaagagcaattactacataccagaagaagggatatcaggatgtgaattatcctcaggtatgtattaaagctaagcaaatatatggcagacttattagaagcacttttgattatggatactttataattttagatccaggacaaaactcatatactataagaaatcttgaaagagatctaaatgggccaagtatagaattttcatcgactactaaagtactttcagagatggagtttgattataataattggagaagaaacaatattaatacaattataaacaacattaagaaaagtaataaaagcattaaagaggaatttaacaatgagtcgaaaaagcataaattattttgggaattactaaaagttgaaaatgatatgtattattttgaaaacattaattttaaattaaatggtaagatttaaaattaaactactcacctactaaagtaggtggatttaaggtataaataccttagactgaaagtcatagctctttaaggattaatccttctaaaaggccattagctgaagcaacctaaagagcatgactgaaactctttattgttctatcttaaatatatcttctttatcactaagttcttggctttctatataccttttaatagtttcttctgtaacactacctactgttgcacaaaaatatcctcttgcccacaaatgttgtccccagtatcttttctttaattctgggaattcatcttgtattaatcttgatgatcttcctttaagatactgaacaaccttactgggtgcaatgttcggagaacatcctatcagcatatgaacatgatcttttccaatacttcctctaacaatagcaatgtttcttgcttcgcaaccttgccgaattaactctcgtaatcttgaggctatcggcttgtttaatactttgtatctatattttgttacccatataacatgatattttatatcatatatcgtgtgactgcctttgttatactcatccatactaaatcaccatccttagtaattagtatggtcatattcacaatttcttaaaaggctaaaagcttataccgtctaaagacggtggatttagaccacgcgcatagaaattaaatttaagtgataaaacttaccgaaatcataaatattttgattccgaaaagctatgtaaatatatttatgatttctagtgaagatatgcacataaagttttagcaactttgtaaatatgtcaatctaataaatggaattcttaaatcggttatatatattacaattataggatgtttttgaaagattattttgataatggtaaaatttttagaaaaaatataagctttaaatgtaatatatgctataataaacgtatataaatataaagttgaaaatttattatatttttatacggaggtggtaat

SEQ ID NO: 34 - DNA, 55029 bp, Clostridium beijerinckii
aagttggacaaatatctaactatggaataattggaatatcgagccacaagattacaaggatacttttttgctttttttcataaccatatttacccataaaatattctagcttttcgaactcacgttaaatagatatatatgtttcaatttacaatgcacaattgtagctgaaattcctgtaacatttttacaacatatatgtttaagttattaagctcatatctttactagaaatcataaatatatttgtaaccacaagggtcataatatggagaaaacatttgaaaattagcgtttgatttatactttgaaatatattctatactagaaagtagaaacatttttgcgcagcaggcatttaaaaatgagatgttaaaagtgctttattgtaggttgttccacttgtgcttgtcacactgaaagtgggagcaagcacgagtggcgacaacctgcaatttagcactttcagcgaaatttttatagtcctgcgaagcaacaatgtctttactttcggttggctatatgtataagtctaatccatacttgtgttatctatatagataagtcaattataagttagatttatactatgaaatatatctcaactagaaatgagtaatatacttttgtggaatgtttcattggtaattttgatggatgtgattctttggctataagttgttccaaatgtgctagttcaaaaagtgagaatcgaaaagtgatgctccaaattttacatttggtaagcagaactttccctgtgggcattttatattccgttcttcgaactttctctgtgagcgcttgttctttgaggctagcactttgggtgcaactttatggccttagaatcacccatcataattacctagaaactggaacaaaagtatgttattcatttcggcgagttatatgcataagttcaggtcttagttgaattatctatatatgaaagaaacaataagtaaaatttgattttgtattcactttcaagtgttttgaactggaggaatgatatgtggaaccagttaatgtaagaaaaaaggttgatatcctaataactatacttatagcatatttctttgttttatgtttaagctataaaatctttgaattagaaaattcttttgaaaattatattatgctcgaagttgtaatgataatagctcttgtaagttattatactaatgttactctggcgttggttgttactcttgcagtcgattttatttatatgagttacaaattatatttaaatttctggggaaatataaatattgatttttattcatattactggatttttctaattccaagtacagctattttaatgtcattagtttcaagaaatatttttgctcttcaaacagaaaatgaaagtttaataaatgaaaattcagaattagtcatgatagatgaagaaacaaatattaaaaatcagagagctcttttaatagagctgccaatatatatgaagcttagcacaagacataaaattcctgttaccttacttattgtaaagattaagtttgcagaaaaacttagaagtatattaggaaaagaagggtataagcttttgctgattcaggcaagtcaagttcttgaaaaaagtttaagagaggaagatattaaatatataatagatgataagacttttgggtttttgacaattactgatatggggggagctaaagttgtaaaggagagatttagagagaatattaataaatatgattttactaaaggatctcattataaaaaagtaaagctagatattcaaattggtagttatacctttgataattctataaaagatccgttggagctcattagactggcagagaaggaattggaatatgatatacatgaataaatgctttatttataaagtcataacaattttgatttgctttataggcgctgagtattttattacccccatgaaatgttatggagaaaacaacaaagtacttattttgtatgataaaagtaaggagtatggtagtgaaaaaaatttattgagtgctttagttaaaagtcagttatcagaggaaaaggaaattagcatatctaaaataaatatcgataatccaaaagattttcagcagtataatgaaatattcattttaaatataggagaagaaaatcatagtatagaggcattaaaagagaaattaaaatcatataacggaaagattaactggataaaaaaagcttcggaacttttagataaaaaggatttgaaattaaaagctgagacttatttatatcttgataatgtaactccatttaatgatttaaacaatttaatcgacgaagtagattatttaaaagataaggggattaaattttttatagaagcggcaccggtatttgtaaatgaaaacttgaaagccatgggcagattttcagaagccttaagatatgcacaggataatggaggaaaagtaatacttaagtttcctataattaattctaaaggagtaaatggcacagatacaggggggaaaataattggagataaacttaaagaggcctttaagaattatactaattattggatttatccagttggaataaatgctgatgaagaatttatctatagagaagatttgaaaaatattttagaaagcactaatactttatttctaaattacaatgaagatattaacattgatatagataattatgaaatcaaagcttataccaattttattcaaaaagttgatttaaacgactatattaataatgaaaaaataagcggtaaaaatgcaataaaaatagaaagtaactgcaatttagaagaatttaaaaataatattgataaagttttaagtaaagaaattaatcttattccaagtaataaaatgagcacttatataaagtttgaaagtgaaattaagaatgataatggaagagttttctttaacaatcaagaggtaactcaggatagatttattaatgcagaagaatatgaaaatgctgttaacaaaacaattaataaagaaaatccaattaaagaggatttaactattactaatagaagattggaaatattcagtggagcagctttaataatatttataggaatacttataataagcagaaatatagaaagaaaaaggttttttaaataatggtatgaatattttagattatttagttatatattcactcatagtaatatggataacaatttttatgaatgtgatattagtaatagctggatatatgtattattcaaaagtaaacaaggaatatatgtatgaagagcttgaaagctatccatttgtatcaatattagttccagctcataatgaagctgtagtaataaaaaagacagtaatttctttattagaattggattatccaaatgataaatatgaaattatagtaataaatgataattcaagtgacaattctaaagatgtacttgaaaatgtccaaaaaacttattatggtagaaatcttatagtgattaatactgacaatataatagggggaaaaggaaaatcaaatgctttaaacataggtcttcaaaaaagtaagggagaaattttggcggtttatgatgcagataatactcctgataaaaatgctcttaagtatttggtgcagactttgataaaagataagaaattgggagcagttattggaaagtttagatgcagaaataaggatgtaaatttacttacaaactttgttaatatagaaactcttacatatcaatggatggcgcaggcaggaagatggtatatgcttaaactttgcactattccaggaactaattttgtagttagaagagaagtgatggaagaaatgggaggttgggatacgaaggctataacagaagacacagaagtcagctttagaatttatagaatgggatataaaataaaatttatgcctcttgcagtaacttatgaacaagaacctcagactattaaagtatggtttaagcagagaaacagatgggcaaaaggaaatatatatgtagtaataaaaaatctgaaatatttatttggactagaagcaggagtaacaaaatttgatattctatattatactttggtttatttcttttttttatctgcaagcgtaatatcagactgtttatttttgcttggaggagcaaatttaattgaacttcatattggagggtatgagattattttatggtttatggcattattagtatttgtcttatcagtaatggtagcaatttcaacagaaaaaggagaattgaatgtaaaaaatgtattgattatatttttaagctattttacttattgcaaaatgtgggctatagtttcggtggctggtttttacaattatataagggatgttgtattgaaaaaggaagcaaagtggtataagacagaaagattttcttaaggaggagcagcatgaaaggatatatttcaaataaagtaatgaggaacaatgaaaagcacatctttggagtattattttttttcgtgtgttttattttttctacagcgattttgatatttaatacaggtgctgaagtatttgctgcatctgaaggaaataatatagaaacaactgaaagtataaaaacttatagtttaagtaatgacatatcctttaatggaactttttcaagtcatagtatatatttcaatgtagataaatggtgggaaaatactaaagctgaagttcaagtgaatttttctataaatcaattaattgataatagtaaaaattcctatataaaattatccgttaatggaacgcctttttattctcaaaaagtttattacagagcagattcagaggttcagcagttaacggtatatataccaaaggagctaataaaaactggatctagtgaattaaaaatagaagcttacttaagattatctgaggacccatgtgtagatgatgttaattcagctaattggtttgtaataaaagatggtactaacataaaaacaacctttaacaatattatttccaataataaaatatctgattttccatatccatttttaaaaaatcatgataatgatagtgatttagaggatttattaattataattccagatgattacactgattcagagcttagtgctgcatacatcttaaattcatatttacaaaaactaaatgataaatatgaaaataaaataagtataactaagtatggagattttcaaaaaggagaaaataccaataatatatttattggaaaatttaatagttttcctaatgagtatacagaagaaaatgatcaaagtgatgaatgtcttataaaaatatcaaattcattgtattcaaaaaatacaaatattaaaaacatgatgattttgtgtaatgatgatgacaacttaataagaggagttaaagcactgggaaaccaagagttaatatctcagttaagtggtgatacttataaagtaaataaagatttaaaggtagatacagttccagatactaaaagtggaaaaatcacttttgatagtatgggaattggagaaatacagttaaaaggtgcttttagaagagaagctggaataagctatagtattcctaaaaataaggttttttctgaaagcgataagcttaaaatttttatgagatattcagacaatcttgattttgataaatctttagttacagtgtacgttaataatacacctataggaagtaaaaaacttgataagagtaaggctttaaatgatgaattggagcttagtttaccaagtgatataagttatacaaactatttagacataaagattggttttgatttaattttaaaagatacatattgtgaaaaaagagaagagaatatgccttgggcccttgttacaagagattcgtatttatatattggtgataacgatacggaaggatattatttttcaagttacagtgcaccatttgtaaaagatgaaatgtttaatgatactgcaatgattgttccagatagtctaagttctaaagaaatgaattcattaggaaaagtcattggctttttaggaaaagatgttgcctacaacaatggagattttaaagttatcagtaattcaaatgtgacagctgatgataaaaagaaaaatataatagtctatggaacaccaaaaactaataaattgatttcagagataaatgataaattatggtttaagtatgatgaaagctattcaaaatttttatcaaatgaaaagcttcaattaacagaaccttttagctataagattgcaaacttccaatttgatatatcaaaatataacaaccaaaaggcaatgcttgtattaacctcgccagataataaagtattagaggactcactaaattatttaagtgtaacggagatgtttcaaaaacttaatggagactgcgcaataatagatgaagagggtaatattaaaacatataaaatgaaaaaagaaactacaaagccagtttatgaaaaggtagaggaattaggcggcaatgccaagataatgcttataataataggtttgtttataatatttgcagtaattgctatagttctatatttatataaaaacaaaagcaaagacaagagcgataaaggtaaaataggaagtagaagaagacgatacaataaaaaataatgaattatatattaagtcaagtttttattatataagtagagtggagcagtagatcctactatatgagaccaatataattatttttaagtaaatgttttcggggacctgatcgtatttgaataaaaatttaaatatgataacatagtaattgagaaaaataataattaaatactttataaactatatttgttgtaatgtacaattcacatttcacaatgcacaattacagctaaagttcttacaatatttttagaattacgatgaagaattatttttgcaacatatatagttttaccaaaaatagataaatggggtgatataatgaaatatgcattagatgtgcatactcatactatagcaagcggccatgcttactcaaccttaatggaaaatgcaaaagctgcttcggagaaaggaataaaggtgcttggtactacagagcacggaattactatgccacattctccgcatatatggtatttcaataattataaggtgctgccaagagaactttttggagttacaatgctttatggaactgaggctaacataattgattatgatggaagcttagacatggatgatttaacattagaaaaattggacattgtaattggaagtatacatgatgaagtttacaaagttggaaatattgcagaaaatacacaagcttttataaacgtaataaagagtggaaaagttgatataattggtcatcttggaaatccaggagttccagttgactttgaagaagtaataaagtgtgctaaggaaaatgatgttttaatagaaattaacaatagctcatttacaacatctagaattggaagtttaggtaattgtacaaaaatagcatcgttatgtaaggaacatgagactaagctaataataaatagtgatgcgcacttttgtactcgtattggggaatttacagaagctattaatatgctagaatcaatagaattcccggaagaacttataataaataatgatccaaaggaattattattgagattaaagaaaaaaggtagaataaaagatttagaagtagaataattgcaatagaaattaaacaatagaatgtatgataagctaaattcttatagatatccaaatttaaaattatatttatgtgtgggaaaaccgaaattagatacaaatttgttccagcggactagtgaaattttcgctggatagttctaagtggaaggttgaactcatttctgcatggtccaaaaacaagtttaggacaagcagaaaatggaacaaccttcaactaagaactatcacaactcaatttcaaatgccgctttctcaaacatgtatctaatttctagtataattcacaaagattaaagtataggtatatcttttgggttggatatctatagtatggatacccaatcataaactatgaaatatcctccagatagaaatgagtaatatacttttgtggaatgtttcattggtaattatgattgatgtgattctttggctataagttgttccaaatgtgctagttcaaaaagtgagaatcgaaattttatatttcgttcttcgaactttctctgtgagcgcttattctttgaggctagcactttggatgcaactttatagacttagaatcacccatcagaattacctagaaactggaacaaaagtatgttattcatttcggagagttatctgcagaagttcagctattagttgggttatgtatacattctattttttgactaatatttaattgaaaactttttttcgctatctaatactggaactatatttaaatctatatcggaaactttagcaaatccatttcctttttttatttcggaaacgaaagataagacattagtttctagtccttgaacctcaatttctacatttccgttcataagattcctacaccaaccagttaaatttagtttgcaagctgtaagttgaataaaatatctaaaaccaacaccttgtactcttccttgtactattgctgaatatctaatcatgtgtttatcctccaattcctttataaatcgatacttttgataaaatatgtttttctcatatcaggcctattaggtcaatttgctgatgagcagagaaaccaaatctatgatttggtgtgaattagttaagcagacattcaaatctgtgatttgatgatggccgcttactctgtgaatactcagtgagcgcatgtgagtcgagcttccaatgatgtaaaataggatggcaaatatacttgttatttatttgattgttcctagccatagtgattcatataacttaacatatatttcattatttatttttttattatatcataatacatctaaaaattagatgataatcacaaaagtatttaaaattttcagaatctttagtataatgtatatgtattagggaataatatgaattaattacactatatggaggtcttcgtatgattgaaagaagcgtagtattagttaaaccagatggagtagaaagaaatataataggaaatattttaagttgttatgaagataatggtttaaaaatagtagccctaaagcttatgagagctacaagagaaattgctgaaaagcattatagtcaacataaaggaaaagacttttatgaggaacttataacgtttataacaaggagcccactatgtgcattaatattgcaaggtgaagatgctgtagcaagaataagaaagattaatggagcaactagtccaacagatgcagaagaaggaacaataagacatagatatgctagaagtaagacagaaaattgtgttcatgcatcagacactgtagaaagtgctaaagaagaaattgctttatggtttccagaaatataaaatacggactttaaatgaatgaataattgaatattagatttaaaaaggcctacttagaatacaattagtatttaaagtaggcctttttgtgtgtggagaatatatagataaaacgaatataatctatacttatgcgtatgcatcaccaaaatgaataatatacttttgttccagtttctaggtaattctgatgggtgattctaagtctataaagttgcacccaaggtgctagcctcaaagaataagctttgaactagcacatttggaacagatggaattgttatttttttgaatgtgactagtataaaaatatggtataataaaatagaatagcaatgttaagtctgcaagggaggtaattaatgaagttaaggaaagcgagtattatagggggaataattttagtttgtctcatcataataatagtcataatactgtataatctgattggtccaggtgcaaaagatattagggcatctaaggattttatggctaggttatattcaattaatgcaataaatactgaacaaaatttagaatctataaaatatgaaagaagaaggacgctaaatagtcagaatgaattagttcatagaagtatagtaactcaaggttttggtatagatttagataaagataataatgtaataggttttgcaaaaaaagaaattccagcaaatgcaacaaaaattaatttacaagatgctagaactttagcagaagggtacttaaagaacatatatgatggagaagtggtcttaaagacaattaatagcaatgaggatgctaaaaagctgccatattactcattcatatatacaaagcaaaagaatggatatccgttttatttcgatgaaataaaattaaatattgataaagaaagtggatttctagatgggtattccaactctacaatgcaaagggaatgtaaagatcctgtaataaatatttctagtggagaagcaaaaaaaatatccgttgactcttttgaaaaatataataaagaaactgtagttaaagatgaaactgatttagtttatgcagataatagaatggaaaaagaaaaaagccaaatatatgaagtgtgttacattgtaactatagatggtaagaatgataaaggtgcaaatattagttggaagttttttattagcgctgagagcggtgatgttttaaatatattaaaagatggcgctgaaaaagaagttattacaaacaaatagaaagatagaggataatctgtaatttgattatcctctatctttttcattttatataaatttaaaatttagcaaatttataatatatttgagctatttaattcgttgttggtggatgctgagtgttactaccaggtccgtaagaattatgagtagtattcctgttaccaccagtgctggcattattagaatttgaattattattctcattattattttcagttttctgtgaaggttccgtactaccaacgacaggtggagctagtgcgtcattattagttgcaggaggagtctcggaatctgctggggcattacccgaatttgaattattatctgcagggtttaaattagccgaagatccgttattaaaattatatcgattagtgccagagtgtattgtgcaatttgaagttggttgtgttccatcgatgaataattcttcataaaccctgcttcctctaaggtcaaaattacagaaaagggttgaaagttcaccagaatccttacaaacactagcttttactattccgctaggctcttctatatcttttacctctaactttgcatgagctttagccattaattttccccaaacaacagcgcacccacttgaactaccatggagttctttaggattatcatatccaatccaaacagaagctgataagtaaggtgaaagtcctgcaaaccataaatctgtggaattagaagtagtaccagttttaccagcaacaggcatattgccccactttgcaccagtagcattgtattcatttactggtccttttaacatatcatatagaatatatgcagcttgtggtgaaaaaacttttgcttgttttggcgaagtattatcaagtaaaactttacctgtagaatcaactacttttgtatatagcataggctctgtatatataccgttgttaccaaagctgccatatgcagcagctaagatagatgtattaccaccgtccctatcacttggagagttattgaattgtcctaaagcaacagctgccattgatgacttagaagcagcattatactttagaccaagcttttcaccgtattcaataccagttttcataccgatcttatcttctgttaaaactgcaccagtattctttgaatgcgtaagagcatctcttgaggtcataagtcctgaatattcattaggggaatttagaggattataaggaccatcttttgctggagaatacttctttccgatttcaggaggtattggtgcatcatttataggtgttgcagcagttataattttttgatctatgccaggaccatataccgttaatggttttgtagacgatccgataggacgcaaatcattataagctctatttattgattgcggaccttgtttaccacgtcccccaaccattgcaagaacatgaccatttctgtaatccattattgttgcggacgcttgtaataaaggaacaccatctttatcgtagctttccttgttattaattcctaagtttttataattatctaaagtagattgggtaaaatcttgaagatctttatccatggttgtatagattttaagaccaccattaaccattaatttagatacttcttcatctgaatatttatatttttcctttaagtcttcttttacctgagacacagcaggatatacaaaccattcataatttaatctataatcctttttaattgatttaaatactagaccaccatttttaacatcgttagcggccttatcatattgagcgtcatcaatatattgaagcttgtgcatctgacttaaaacggtaagtgttctgttaatataaggacttggatccttttgattgttataagcgctatatgaacttggagcttgagtaattccggctagatatgcacattcaatcaaagataaatcaggtgtgcttttaccaaaatataataaagatgcagcctccactccatacacatgaccacctaggggaattgtgttcaaataagctgttaaaatttgatcctttgttaatgctttttctaaattaatagctaaataagcttcctttatctttctttcaatagaaacatcattagttaaaattgtgtttttaagtaattgttgagttagtgtagatgctccatgtagtcctttttgtccagtaacaaatctctttgcatctaaaaaagctgcacctacaattctctgaatgtctattccattatgttggtagaatctttcatcctcgatggatacaaaagcattttttaagttagatggtattttgcttgaatctataacgtaacgttcctcatcagtctgcatattatccataaagtccccagcactatcatatatactggaaggttggtttaaagttaatacagcatcgacatttagaggaggcgtagtttttataatagcaaaagcataacctgcgcatactactaacattgcaagaaaacaaaatataaaaccaaaacatatgcccttaaaaattttttttgatttctttttcttctttttagatggctttttttttcgtggggcattgtttggttttttcacgttatcattaattgccattttatcctcctaaaattacaaggtatataatttaataatattctatatcattatagcataattatagtatgattaaataaataactcaataataaaggtgttgacaatgcaatattatacaagacgaaaaacgcataaatacatatcatttatagtacttattatagttattattgtcattttaaacataactgtaatgttttttgatcaaagggtcatgccctctgtgacagaaatagcgacaataatggcaaagtcccaaacattagatataataaataaaaaaagtgtagatattttatcaaaagattttaagtatgatgagatggtaaaaattgaaaaagacaaccaaggcaatataattttaattcaagcggatactggaaaattgaattatatagcagctgaattgtctacagaatgtaataaagaattaagtgatatgaagaacaatgcaataaaagttcctttaggctggatgagtgataaaagtgccttttataatgttggccctaagataagtgttgagatagagcctataggaaatataagtacaagttatgaatctaaatttgaaagtgctggaattaatcaaactaggcataagatatacttaaatgttacagctaaaatcaggcttagacttccactaaggaatcaagatgctgaggtgagcacacaagttccggtttcagacacaatcatagttggaaaaataccaaatacaactcttggatttcctacaaatgaacaaaataattagcaattcacaatttacaattcacaatgtaagaagaaataagacaaggcttcaccttatcttatttctttttaaattgaattcttaactatgctatttagaattttacataattctctacattttaataatatggggtttccaacaatttgctcaataatattcgatttaataagtaattctatccaatactcggtttcatttgcttcttttaaagctatattcattttaaatttaaaatcagacttactaaaaccacgaataccctcttttacattagctccaatgcttgttccagatcttaataattgtttagataaaatatactcttgtttatcacgaatcaagaacttgtataaatttatgatatcaagagcaaaatcaaaagatttagtgacgataatattagagtctatttaaatcaccatcctaatttttttagatatcataattattgacaagttaaaaagatttaaacaatttgcaattaaataataaagttttttgggaaatttaagaacagaaaattaaaaaaatcccgaagggatttttttaattgtgaattgtgaattgtgaattgtgaattgtgaattgtgaattgtgaattgtgaattgtgaattgtgaattgtgaattgtgaattgtgaattgtgaattgtgaattgtgaattgtgaattgtgaattgtgaattgtgaattgtgaattgtgaattggaataaaaaaagaaccgtgaggttctttttttattcccaattaaatacgtaaggaacatttctataataatcaccgtagtttaatccgtatccaactacaaatacatcttcaatttcaaaacagcagtaatcaggttgtatatgtacttttctacgagaaggtttatcaagaagaacacaagtctttacagaagctgggttcaaaccttttatgtaattataaacgaaatccattgtaattccagtatcaactatatcatcaactataagaacgtcccatccttcaatattatcagagatatcattaactactttaacagacccagaagatgtttcgctatgtccgtagcttgatgtagtcataaatcctattttagcatctaaatctatagctctagctaaatcagcagcatagataaaacttccacgaagtaaagataaaatgtaaagttttttacctttataatcttcagcaatagtttttcctaattcctttattcttgtattaatttgttcttcagaaaaaagaatgttacgtttcttatcttccatgtttaaaaaactccttttatatttatttttcaaatgtacacatttccttaaaaatacacagcttattattaacatataagttctaaaataatataattcattctatttggtttacaataactgatagtttgaatttatttttgatgaatttaattttttagaatacataatatattatgttgcaattcacaatgcacatttcacaattcacaattacggctaaaattcttgcaatatttttagaattatgatgaagaattatttttgcaatatatatgattacagataaaatactcataggtatttataaattgttgcatatttttcaagttatgtgataatttactctaaatttataaaatgtatattgtcaagtgtagattattaaagttataattaatgaattaatagtataaaattatatgaaagttgtcaagatagggatatgaggaaaatagcgagttaaagatgtaatgaaaagttcttatgtgcaacatacaggctcttttctaatatgtatattttgcgtcaggaaagtaggaaggtttaacgcatagagaactatcaaggtaaacctaacgatgcagtatgacacgagatagataaacatactgttttgttattttcttaaatatcccttggctaatgtgaggtgtttattaatgatatatggaaatattgaaggaattagaaaatctttaatagaagagttagagaatatttattctataagaaatttaaaggatgaaatatgtaatgaagaaattttaaatattatttctagagtttctagttttattgaaagagaaatcagtgtagctataaatagaaaaggtaatgtcacatctgttgcaattggagattctacatctgttgaggttccaataatagatatagatgaaaagagattatcaggtgttagagttatacatactcatccaaatggttattgtaatctttcagcgctagatttaacagctctattaaaattaaagctagatgcaattatatcagtggctataacagatggtaatataatagatttttctttgggaatgcttagtttatataacaataaattagaaacagaagaaaaaagtaatctttctttaaatgaaattatgtctataaatattttagataggataagatttatagaaaatttaattaagaacaatgatgtcatagaggaaacagaagaaaaagcaatattagttggttctgatacaaaagaaagtctagaggaattagcagagcttacagaagcctgcaacatacctgttttaaaaactgtattccaaagcagaagtaaaattgatgcagcatactttattggacgaggtaaagtgttggaaattgcttctatgaggcaggtagaaagagctaatgtaataatatttgatgatgagctttcaggatctcaagttagaaatttagaagctgcattaggagccaaagtaatagatagaacaacattaatattagaaatatttgcaacaagggctaaaactaaagaatcaaaaattcaagtagagctagctcagttgaaatatagattaggtagattacagggactcggaactatattatctagaacaggtggtggtataggaactagaggacctggagaaaagaagcttgaaacagatagaagacatataatggaaacaatatatgatttaaaagatgagcttaagaaaataaaaagaactagagaagtacaaagagaaaagagaagaaaagaaaatattcctaaagtatctttagttggatatactaatgcaggaaaatcaactttaagaaatacactttgtgatttggcagcaaaaaatgaaaataaaactaaggaaaaagtatttgaagcaaatatgctttttgcaacattagatactacaacaagagctgtaactctaagtaaaaaaggagtgataactcttacagacacagttggttttgtaaggaaattaccacatgatttggtggaagcatttaaatcaactttagaagaagttatattttcagatcttctatgccatgtaatagatgtatcttcagatagtgcaatagatcaatataatgctgtaaatgaggttttaagtgagcttggggctatagataaagaaacaatattagttttaaataaaatagataaagctactgaagaacaaaaagcgcgaattaaagaatttgcagtaggaaattttgatgtaatagaaatttcggctaaagaaaaaataaatttagataaattgctaagtttaattgaggaaaaattgccatataattatagaaaagtagagtatttaataccttatgagaaaggcgatattcaatctttcttacatagaaatgctagaatacttgaagaagaatataaagataatggaacatatatggtagcagaagtagatgatgaagtttttaataaaactcaggaatacgctaagatataaggttaactgattaaatataataataaatatagttcttccgtaatatacttaaataagaattgttataggagactatagtttatggaaacaagtggaccattaaatcaattagatcctagaagcgcaagatccctaagaactgctcagagggcattgaatcagggaagtacaggtgctaatgcgactgatgccgctggtaatgaaaatgtatcatcggatttaaataatgaactaagagatatgcagaatcaagtattaacgcaattatcaaatatgagtacagcaatagcacaaataagtgcagctcaaactaatgttgcttcaattagagtcgagcagataagtttaacttattttactagagaggtacgtcctttacttgatgcattatactttatctctatatcatctttaaatatagcaggagttgcacaggtaatacaaagtaatacttttggtgagagaaaagaactaagggaatcattggagcttgtttatgaaatgaatcacgaacttaatcagatattagagtcattaagcaggcgtttgaagatttacatacatcagataaagaaaatggataaagattgtccgccatttgtgaatagaacagaagattcttagatattatatttaagaatctttttttattctttaggaatttatattccaataaaatctgtggataatttaaaaaaggttgattgactagtttttgtattttaaaaagaataaaaaagaaatcttattcgcctgcataaaatgttcttatatgcagcagagctgctatttctgatgtgcagatttttctcacatgcgttcgaaaaggcagatgcgtgaaaaaatctacacatatgaaaagagtgcgaagcacaatacggaacttaaccacagtcgcctgcgattttgttcttcgaatattatggatttgagtagtactgtaaagtagtacctttaaataaatatttctttacgttataatgttagtaagtttgttataaagtaaaactttgattcagatgtgattaagctttatctagaatttaattgtacttatgccttaaaaggcaagatctcaagaagcttgcaactgttattttttaattaaaatgaataaatgctttaggtgatagccatctgataaacaaagtatacaatgtcttagtaaaagaaggtgaaattaagtgtcaaaatccatattagaatatcagaaatcctctgaaaagttaataaatgtattgaagattaataaaaaagtgttagctatatttgcatttggaagcataattagcggtgatctttgggaggaatctgacatagatttattcattgtatataaggaaatatttgataatgttagagacatatattctgaaatactaggggtaccggtacatataaaggtcctaaataaagaaagctttttagaactatacgaaagtaatgggaataagggagttataaggaacttactaatatcttctaaaataatattttcaagagatgatgaaattgagagcatttttaataaagccaaatatagtttagataaatacagagaaacttggaacttggtgtatttaggtaatgttataaaagatattagagtaactaaaaagtatttgcaaaacaatagtgtttttacatcttatgaagttttaataagagctctagatagttttgctaagttatatttaaatttaaatggatacactgtaagtaaagacgcagtaaaaatggctataaacttaaataataaatttaatgttatagttgataatttgtttaatgataaatgcgcaaaggaaaatatacaaaacgctgtagattatatcgagaattttctagatgaaaatataaatgaggccgctaagtctttactggattatttatatgaaaaaaatgcatttttaagctcctttgaaataaaaaacagtgatgagttcaaggaatttaatataaaaatagaagatatactaaaggaattatacaagagaaaattaataatgaaagatactaaaaatttggatttgccttctaatgaaaagttagtcagagagaatgtgtattcatacaagagttatgaggcacaatcaaaaaaatagtcttacaatcaattaaaggagagttttatggatatttataaagattttacgtttaaagataatgatatccctaagtatattcaagtagctaattatataaaaagtttaattgataaaagaaagataaaagaaggagacaaacttccaactataagagagctgtcaaaaaaattaggcgtaaacaatgtcactatagttagtgcatacaataagcttaaatcagaaggttatgcctatcaaaaggtaggaagcggtagttatgcaaaaagaaaagaagttgcttcaaattttagaaaagaatattcaaatgcattaaaaaagatatccatgggagatttaactgatgtaatagattttactggggagactacaggggaagtgttattccctattgatgatttaaaaggaattataaatgaagttttagaaagagatggagcaaatgcgttactttcagacaacagaaatggatatactaatcttatttatactataaataaagtattttggaataataaattaaacgatgaagacataataattatatcaggtgctcaacaaggaattgatatagcatctaaaggaatattaaatataaatgataatataatagttgaaaagccaacatatgtaggagcattatcagtatttaaatggagaaaagttaatttgtttgaagtgccaattgatgaagatggaataaacttaaataaatttgaaaagatattacagaaaaacgaaataaaatgtttttatacaatgagttattttcaaaatccaacaggagtaagttatagtatagaaaagaagaagagaattttagaccttgcagaaatttatgatttttacataattgaagatgattatttatcggaacttatatatgaaaattcattagaatatgtgccgtttaaatggcttgataaaaatgatagggtaatttatataaaaagtttttcgaaaatatttcttccaggaataagattaggatacttagttgcaccagaagtattcagtgaaactcttcaaaattcaaagcacaatacagatataactacttcaagtttaatgcagagagccttggaattatatatttcgagtaataagtggaaaaagaatattaaaaatctaaatgatgaatatataaaaaggtatacgcatttaaaaacaattctagatagtgaatttaaagatatgttaacctacaatgatccaaaaggtggattgaatttttatataactttaaaagatgagtttaagattaatactaaagaactttttataaaacttagaaagaaaaatgtatatattactccaggggctatgttctttacatcacaaaatgatggacaagattcttttaggatagccttttatcaaaccgataaggaaaagattgagaaaggtatgaaaatacttaaggaagaattaattttggctaaggaacttagatatgacaagttaaattaactagtgagagattttatcggatatctagtagctgtaatattcccatattctattaaagtgggagataacagtggcacgcgacactagataagttcaactaaccttcagtgggagagttaccatcaaggggcacctaaaaactccctctgaggctaagtttcacttcatgttaatattcttaagaattttagaatatatattttaaacaatattagaatatatattctgtacaatatatattcttcagaatatgcagtaaaaatgcagcataggaaggtatcgtaatattctaattatttaagtatgtataaaattgttttaaatcaatatgcgtactatatattctgatttgagattgaaaaggagctagattgatatgtcgtacattacagtaaaagactttggtgaagatagatttgaagaaaagaagtcagagtttattggttatgcaagaagagtggaaaatgaagaggaagctaaagcttttataaatgagataaagaatatgcacaaacaggcaaggcataattgctcagcatatataatcggaaaagacatgaatattcaaaggtactcagatgatggcgaaccacaaggaacagcaggaataccaattcttgaagtgatgaaaaaaagtagagtgacagattgtgcagtagttgttacgagatattttggcggaatacttttaggggcaggtggcttaactagagcctatacaaaaggtgccagcatcgcaataaaatcagctggagttgtagaaaaggttgaaggcttaaaattaagttttgaaatggaatatgatctatttggaaaagttcaatatacatgcggtcaaaattcttggcatatagaaggtactgaatacagcgataaagtagttgtcaatatattagcagaaaagctaatggctgaagatatagaaaacgagattgtagaagttactaacggaaaagtgatagttagaaaaagtgaagaggacatatattttaaagagggaactagattatatttgaaaatataaatagtattttagaattatggttcgttgcttatagatatccaactttaaaactagacttatgtggtaacttgccgaaatcataaatattttgattccgaaaagctatgaaaatatcgctgaaggttctaagcagcaggttgtatccactttagcatgctccaactttcagtttgacaagctaaaatggaacaacctacagctaagaacctttaacagctcattttcaaatgttttctccacaaatatatttatgatttctagctaaagataatcatttatatacagtaaatatggaaatatgttcacagaataagtctaattaataattggaatgtctatagttacgtatttgaagctcagcgagatacttcgtaaaagaatgagaatacaagctaattataaaatttattattcataattaactactactggagatttttatttcaaagtgaaaatatagttttagcaataaattttttataacatgcaacttaggtttatatatgccataatgataaatttgcatttaaattctaatggattagatccaaaattgtgttaaaaagctagaaacttggctgtaatataatgttatattttaataaagcttatagagaattatttggtgataggataattgtgaacttatgtaaaatgtggtataatagctgttggattttgtattttaaagaaaaaatcattaattaaatgaataacttgtaataagaatcgttacaaatagatattatatatattgttgacatgaagctatatttaaaactttagtaagttaagtgctaaaataagatcaagatgtaggggcttaattgcaatatatatttatagaaatatagataattattacgaataaagtaaggaggaaaacatatgtcaggacactcaaagtggcataacattcaagcaaaaaagggcaagacagatgcaaaaagaggtaagatttttactaagataggtaaagaaattgtgatggctgttaagaatggtggagctaatcaagatacaaatgcaaaattaagagatgtagttgcaaaagccaaggcagcaaacatgcctaatgatactatttcaaaagcaattaagaaagcatctggtgaattatcagcagttaattatgaaaatatagtttatgaaggttatggacctagtggagtagctgtaatagttgaaactcttactgataataaaaatagatctgctggaaatgtaagaagtgcatttacaaaaggcggcggaaacatgggtacatcaggttgtgtatcatttatgttccaagaaaaaggtgaaattgtcattgaaaaagaagataaagacgaagatgaattaatgatgattgcattagatgctggtgctgaagatttcgcatcagaagatgaagtatttgtagtaacaactgcaccggaagagttcggaacagttagagaagcattagaagcacaaggcattgaattcttagaagcttcagttaagatgattccagatacatacacagcaatagatgaagctgatgctaagaagttccaaaagatgttagatttacttgatgacgatgatgacgttcaagaagtgtaccacaacgctgaattccctgaaggatgggatgaataggctctgaaagcattggtattgctaggattgaactgataagaacattgactctaaaaactaaataattaaggtatacatccattatggtttatgtttaatggtgtatgttatgttaaacactttctgttattaacagggggtgtttttttgttattaagagatttgctaaaagaatttattcttgaactagagataagaaattactctaaaagaactttaaaaggttataaaaacaataattcgttaatgtttacctatttagagaaagaatttaatattactgatgtggaggatgttaagccagcacatataaaatcctatgttaaatttttacaaagacaaggtagaaaaacaacatatataaatggaattattaaatgttttagagctttctttaaatatataacagatgaagaaataattgaaaataatccaatgttgaaagtgaactggttaagggaaggaaaagtaataataaattcatttgatgatgatgaagttaatagaatgatgaaagtctatacaggtagcgattatatgaatattagaaataaatgtattttagcaatattatttgatactggtatcagaaacttagaattatgttccataaagaatgatgatgtaaaagaaacttatttaacagtaaagcaaggtaagggaagaaaagatagaagagtagctttaagcccttatgtaagacgtataatcattagatatgtgagatgcagggatagctattttgccaatagaaatgttgatgaagctacgccatttttcttaagctatagatttaaaccattaacaattgaatcagttgaaagagtgatgaaaatagcaggggagaaagcagaaataagaaaagatatacgttgtagtcctcatactgcaagacatttttatgctattagtcagcttcgtaatgggcttgatgtatattctttaagccgttgtctcggtcatgaaaatatttcaataactaaacgttatttgcaaggtttaaaagatgaacaaatagttgaaatgtcggttaaaactagtccacttatgaatctaagaaagtaggtgtaaagatgcaggtagatattatatgggatagagttgtaaatggttatgcaacaagagatattaccaatattgaagtagatgaatactcggaaattatcctttgtcttaaaattcgattagaacaacttgaagaaaaacttatagaatataaacaatctgaagataaaagattaaaagtatttatacctaagagagaaaaagaacttttgagattaaagaatcttattaaattaatggaataaaacgaggtgttatttatgttagagatagaaactcaatttggctgttttgctcatttcaaagatttgcttttattcatgcaagaagaacacttacaagagatgaaaataatggaacttagatattgtttcagtgaaatatttggaaaaggtatttatacattaaagcaaataaaagagatagtggagggtgattaaatgttaaatctagttataccaacaaataaaacaacattacaacgtcaaattaaagcgttaaaatatgccttgaaaaccgatacgagtgataaagataaacaaatacaccttgaagctttgaaatgcttagaagaactattaaagacattttagataataaaaaacaactaggtactttggcgagcatctagttgcctaaaacttaatatgttttataattcatacctccaaaaaggtacttaatcctgataaattaagtctaccacaattttgaaaaaaataaaagagggtatggcttattaagtttacccaattttaggtaagctttacttgttatgcactaaggcaagtataaaatatcttaggggtgatatgaagccgatagcaatgaaaattcatagggattaaaataccttaggagcaatgccgaaatctccttaatcatacggtggtggaataacaatagagctaccttatattggacagggttgttagtgtctagtagcaaatataaggcttgttgatgaaactcgtaaacagactcaacaatgaaaaaagtcgtgaaaaatcggctttcttatatccaaaatctgaaaaactcctcaacaatattacttaattagcctaaagtcaagtgtagtattgattaaaatatgctttagaagtcaataatcaatcatatatattatgcagagaggtgagcgtattgataggattgattttaggaaaactaatagtagaatttatagtagttgtatgtatgctagttatagtatctcaattgttgaggttgtgggcgaatagataatatttaggataaacaaaaggataacttattgatgtataataagttatccttaattaagatgttggttaatttttgctatcaaatttctctagtgaatctaaggaatttaaaacaaattttaatctactctctgaataatcttgtatcctagaattaatttcattaataagttcatctctataactaggattttgagatttatgagtagagaggttgataaaatacggatttatatatagactatcttcataaagatagtctttaagcctttcacaatttgttttagacgatatatgaaaataactcgaagatttgttgataatacttaggttaaaattaatagatatatcatttctgctattattaatatttaaatatttaaaaaaatcaccattaaaaatggtactggaaatcttttggaacatttcttcgcaattattctgattcttagtatgtagtaagtaactaataaaaagttctttatacttaataggtttctttttcttagagtgataaacaataccatgattttctagttttgataataatgtttcataatcataattattataattagaatttgaaatattgtttaatatatttttaaattgttctaatgaagttggattgtatttcaaaatctcatcgatttgctcattagtattactcatataaatgtcataagcattttgcatggcgaaattgctaggtaaatcaatatactgattactatcttcaattaaattgatacaagtatcttttaattcattaaatttattaatcgttttactatttatattgcttgttatagtactacaagtatgacaattacacttggtatattgaacatctctataaccaccagcttttgatttatctgataaattaattttgtaggaatgtccacatgtattacatttaaattccaatttactttgatcataatcaaaaatagcaactgttgcataacctttacaaagataacaattagtagtacaagctataggagttatatgctctttaaaactatcttttattttaaagattttttttataatcatcatattaacattgtgttttaatttactattaggattcatatacttccaatatatataggtaattaataagttagtcaattttgaattacagtttatttttaaggatagctcatgagctgtttgattatttatattttgaaagttattttcgattaattcaagcttattaagaccattcattgaaattattaattgcttttgtttatttaaaaaatcttctaaaactaagttgatgtagtcaatacatgatatagattcgttagtaatagggtttttaaataatttgtgtaggctaaatttagttttttcaatatcttttaataaatcttctatccacattaaaatcacctcagaagtaagtataacatcattttaaagatgaagaaattattactttaattcttataaaaaagcttgtatactatcagtaaaaactaatgaaaagaggataaaataacaatggataatgaattattagagaaattattaaagcttagtgaagaaaatggagcattgaaaaaagaaaatgaaatactaaaaaaagaaattgaaaaattgaataagaaatatgaaaagtatagagttggagaaaggttatttgggaaataataatcaagactacctagtataataggtggtctttttttgtctgaaacgttggataatgagttggtgaatacccagtgcctaacaaaggtacaaaattgtactcatgtaaaatcccacaaagccaattttggagaggtcgaacgtaaaaattatttgaatatttccgtagaaaataaagggattaaatactttttgtagaaatatacaataattgagtaatatttcggtaaaaggtgttttaagtatgaaaattaataaagcgttatacaagaatggaaatatttcaaaagaaatacaagctataaagcttactaagaatgaatattataagaattatagagggaatttgttttgcacggaagagaagtgcaaagcaaaattaagttttgttgaaagaaaaggtaatattaagttttttaggacatttcctagtactccacatataaatggctgtttgaatgaggttatatatgaagagataggagaaaaattaagagaaaagcaatttgtaagtaaaataaatttatcaaacaaacatattataaataagttagaaagtgcatttaccagatttaataaaaaagataatgaaacaggaacaataaatgttagtgatggtagtaaaaaatatattaacaataatagttctaaaaccaaaggtaatgaagcagaattatttgatgagggaacagaaagcaaagatggaaaagagccatatatcataacaagaatgtataatgagatagaaaaagatgatgatacccgaataagatgcattattggttatgtacacaacatgcaattaatggataagcatggatatattaatttgactcctaaaaaagtcgatagtgttaaagttcattttgcagagtattttgttgttaataatgaaactgaatttaataatatgaaaattattgaatcgtacattaaacatatgaaactaaataagaaacaaataatttgttgttgtattggtaggataaaatacgttgaatcaggtataaatataattcttgatcgatatcaagggtttacattaaatgggttaaaatactatgaaattgtagggtatatgaatgatttaaaaagtaaataattaattaaaggactcgtcataattggtgagtccttttttagtgtgataaattattcttccatatattcaactatatcttcaactttgcacttgaaaaatttacaaagaatatctaaatgctccttagttatatgtttatatgtgtcattcatgtaagcaccaagggtattgggtcttattcctgttgcttcagaaagttctttttgacttatatttatttctgccattttaattctaagtttcatttttatactcattaattttcacctcaatagcattatatcataaatagttatgaaatataataaaaagttaaaaaataactaaaatagttattgacaataacgaatttcgatattatactataaacataaggtaaataaagttattaaaagaaaaaaatgacttaaggaaaggagaaaagcaaatggcaaaaataattgatattcttactgatttattattaaaaatcagaaataacttcatagataagcaagtatgccaagaaggtgaatttgattatatggatgcgatggctaaagaatatgaaaactatagtttatagaaagtgatctaataaaactttgaagatgtaaaaatgattaaaaaattagaggaagagaataggtgttaaacatggaaaatgtaaaagttaatagtgttaatagtgaagttggtatgagtttaaggaataggatttctaaagaagataagtttttagattttacttgtttcttaatgaatatgattgaaatggacgaggatgcaggatattcaagtttagaaaattataagcttggggaagattgctttgaaagagaattagtaaaatatgcttttaacgagaatagcatttgggaacaatgtttcgaagtagcaggagttaaaaatttaaatgagtttgaaattcaatttaagaatgtacatttctgtgagggggtaatacagcagtagttgagttaaatgattgtaataaatttgttgcattaagattataaggagttttttatttgtatattgtatatcaatttttggatatctaaaaggtgtccaagcgtaggtacgcaatatataacattaaaaaggtggacatgcgttcgccttacagttgtctaatattcttttaaatcataaattttatgtggaagttaattttgcataatgggtagttcaaacagaccaccacaatatatagtggtatcgaagttgtggaactaatagttctattttaggaaggtgcacagggtatcaattttttaaaggatcatgggttatgtaaatgcattgtgcctacacatttttttacatttaaagaaaaacgaagtatatttttattagaagggtttttatgaacgaagaacaattaatagaagaataagaggattcggtgttccacacctcacctcactttttatggaaacaaaataaatgattaaggaaggatgatagagtttatgggacaaattaaattattaaaaattggacaagaaaacttaaatgcagtaaatcaaatgataagcaaaactattaaagaggcaaattatataaagcaagacaaatacacatttttatttaaagcattagaaacatataaagacaaagaacttgaagaaaatgaaattatattagatgttattaaagtaacattatctaatgatgaaaaaacagcaaaatcacaatggtttgaaggaatagaactagaagatatgagatattttggttggtttgcaactccaggtggaatgaaacaagaaaacgaaaaagaagatgaaaagtgtgaagctttctttattagagaagatataaaagagtttacaacttggtttgaaaatataatatcattaaaccagtttaagttgctaaatgataaagaaatatatgtgaacaagcaagttttaagtagaattgcacttacaacaagtatattaataactgagattaacatgcctaatataataatactacctaaagcaactattgatttcagtagaatatataaaactgttgttccaaacgaagttgaagtagaagttgtaaatgaaaaaacagatgaaataacattagagaaacaaattgaatactcattagaagattatgattttgaaggtgaaattgatgtatttgatggaggtgggatagcaacacctgaagtatttgaacagattggacaaactttaaaaagaaatgatattgattttgctgtaattagaggatatggaataggaataaaaggacttataacaagatttgatattataaaattcttagatgtgttctataaagaagatatggagttttgtaaaaaagagaatggaaaatattatttgatggatatgtttggagcatggagagaagtagctgataatacattactcttaaacgagtcaatggttaaattagcagatttatttgcagaagaaataaaagatgcacataaaaatataatagcaactcaagaaacttatggaatggacttaataaatgaaaaactagaaaaatacaacaataagacagatataaatacatatgaacttttaaacaaattatacataactaaggttaataagtttgagtctgaactaaccgattatagaactctatgctatcagttatttaacgctttagcattaacagataaagaatatcaccaaatagcagaccaagattatcaactatataaaaaattagttagaccttatgaaataaaggataaggattcagatataaaagaatttgaaataaattcagattatatcaatctatattttagaaatattacaaaagctactgagattgaatatgacgaagaaaaccttgctgaatatgatatagaggaatttgaagaaaatgctcttaatcatacagataagactgctatgttaattcaattgaataaagataatgttgaacttaaaacaacaaaaatgcaaatttcaaatatgattgagaagaaagttaggcaattagcatgtggaaaaataactactaaggctcagtattgttatattgctatagacccaatttcatacatgaactttgctatgactagagaacaaggagacaatggattgaaagatggtcaattctataatagaaaatgtaataatggagatattagaacaatttatagaaatccattaatggcattttcggaaatacacaatgttgaatttgtaagagataatttctttgataactatttttgcaaatcgtcagaattaatctactttaatcaaaaatctgatatatattctcaaattggaagtggggattcagatggagatgcagtaacggtaatagatagcgagataattagacatggagttgttgaaactgataagccatttttcttctcggctgatggtaagaaaataccatacatttataatgatgaagcaaaatttgaatgtagttggaaaccatcgggtaacttaataggttcagtatctatacttgcaacagttgtgaatacatatagtcaaacattgccaaagtactatagtcctgatagtaataaattctattactatgatgaagtattagaaatactagcagaacataattttgaaggaattactaaggattctgattatgataaagttgttgagccagctattaacaaattaattgaagcaggtcatttgatgtattctaattcaaagaacatggacgatgaaatagttagagaacaaataaagaaacaatttttagaagatagtaaagatatttactcactattatacacatcaagcttggttatagatacacccaaaacaatgaatattattgatagagatatgtatattaaacctatagaagacaactataaaaaatctaaaggtagcaatattaaaccatatttcttacaatacaaaaaatataaatgggaaattggaaagatggaaacatattattctagtccacaaacatttatggatagagcagcaaaaataatacaaaagaaaatattaaatacattggaaaataataaaaaatcattttcagataaagcaaaacaattgcaaaaacaacttgtaaataataaatatgatgaagataaacttcaagaatgtaaagaaaaaatggagagattttatgaggaatactcaaaagaatcatctgaaattagagaaaagcacaagtttaatagagcagaaaaatctaaacaattaagagaattagatgcttattctattttagtagctgatgatgctagaaaacaatatgacacttatacaattgcacaaactttagctgaattagataaatgttcagaagcatttctaattaatttattctttagtcactttttagatatagacaagcttaagcctagtatgaaaattcaatttgtaccagatgaaaacggagatattgagtatttatataagaagtatagaaagcttgaaaagttagttaattttaatgataacactgctcaaaatgtgcatctaaaagaattagaaagactaaaggtaattaaagaagtgcgttttgattgtagagaaaatcctgatatggttaaagaaattacagataaaataaaagcaggtttgaatgaaaatggctattatgaattagagttaaatggactaaaggtatttgaggattttgctgaattaattgaaggaaaagataaattaagaattgatggtttcatgttaaataagaataataatgtagcaattacagctaaaagttttggaatttattattatgtatagggttcgtggcttctagccacttcccacttttaatggaaattgaaattaaggaaggaatgataattattatggaacaaaaagttaaattcgataaagagtatgctactcagtggcttaaggaagtagattatttaaaaacagttggaattgagccaacttttgataaagagataaatggagtaaagacatataagtacacaaaaaataaaaagttgtttgaagctttagcaaagtttcataattaataaaatattaaagatgaaggagggcgattgagaatgggaaaaaaactgttaaacttaattaatgatttagaatatgatactaaatatttacaacaaaaacaatccaatggagacacttggctagatgctgacaattataggtgtaaagtctttaatctagaaagagttacatatacagcagacgaaattgtttcagtaacagatgaattagaggaaatagcaaacaaagtaactgaatcattcaaaaatacatttatagatagaggtaaacaagctactgaagaacaaatatattttgccaatgaaactgcaaagattgtgctaggaaaatttaaagagaatataatttgtattgatcctgctccatgtggttttggtaaatcaacaatcaagcttgagcttatgaaatatatgactaagttatatgaagatgggttatcaactacaggtgtaataattggtggagacagattagatgatttaagacaacttcaaaaggatttaggagaatattcaaaatacacatatcttttagaaggttggaacgaaaaagtttgcttagataaaaccattaaaacagttgaaactggaatgtgtaagaaatgtactttttggaattgtaaagtaaaaaaacaaatgagtgaccaaaaggaaaaaccaatactattagtaactaatactagattaaaagaacttggtgctgatttttgttcaacttatatgaaatatgataaaggtgaaagaaaaatattattaatagatgaaaaaccacaaatgttcaatacagttgaaattaataaaatattattaaataacattgattctgcaatttcaaaagcagaataccaagataatgaaatggatgaaaaaactcaactatcaaagtactggaaagaaatttctgaattggttgaaagtaaaatgattccactaagaggaaagtataagagatttataatatcaaatagttgcaatattccagtatgtatgaataatcatgaatttatgaagctttggaacaagtacataaaacacaattttaaaagagaattgcaacatattcatgaagtattaactaaaggtggcttttatgtatgcgaatctaatacagaatttataagtacaataggctataacaatctaagggaaatgtataaatcatttgaaaaagtggttatatttgatggttcagcactttatgatccagaatatctaggactatatgattatgataaagaaaaagatattgataatagtgatatacgttttttatatattccaaatacaagaacatataataatttatatataactataaatactgctcataaattaactaaaactgaatttaaaaataaaaaatatttgccttatgcaatatcaaattatattaaaaataaagttaaagtaggatttcatggtagaagttatgtagttacatatcaggaacaagcaacaattttaagtcaattacttggaacagatactttaaagagacagataccgagagcaaataataaatgctattactatggaaatactaaaggttctaatgaaatggacgagtgcacaagaatgtttaatattggatgggatacacttccagattatcaaattgctataaagtacttgagttgtgatattaaacaatgggaacatatattggaattatgcaaggatacagaaaaagctcaatttatatctgatatatttttaaagaaagatagaagggttgatgaagttggaaatagaacatacactggtgaatataatcaatattgctttggcttaacttcaattgatgaatttcaatacttagatatggtaagcaaattttatcaagaagtacatagaacaaagttaagagactacaactatgataaagaaataaaagtatatttatttcaaactaaaccattgatttatagtatgcttaaagctttattacctgaatgtacgattgaaaaacatgtagataaattaagtgaatttcaaaaggctaaagatgatactagagaaaataaatgtaaaggctatgataaattctttgaatggtttaattcttgggatggatcaattataaagtcaaagaaactcaaagaaatacttgaagtagataatgagcaatttaaaactttaataaagaataagacaataaatgaaacattttctgaatttgatataccgaaaaaaggattctatagtatgattaaataattttaggggtatttcctatatatagtatatatataagatttacccctaaaaagcaaaaaagtatattattctagtaagagttaataaaataaaatggttagttaaaaataaataaaaacaattttcaattaagattagttttggcgacgtaaggagacaaaaatcatcttagttgaatccccttgataggggggaggggcgtagaattatgaataagaagtcctgaaaaataaatcacgattctataaattatatcagaactatggacaaggaaaagaaaatattaactttgacttattctctatttgatttgttataggtcgtgtccgccctgcgtccacttcccctttttgtggaaaatgataaataaaatatattatatgtgaaatttacagaagaaaaaaatatatcattattttattattttctaattggataatttaataggcagtatggctgtctaattcctttcttttatataatttattttgtttaaagacagattactttttgtagtctgtctatttaattatccaaaaccaagtgatgatacttggaaagtctttgtacggaattactcaaaaaatattattatggttatgcctgaacccaaaggcgagaaggagaatgtaaaatgagtaaaaaagtattaacaaacaaagaaatattaggagctattcaatctaccttaaatgatagagaggaatgggaacttgagaatggctgctatatgtacaatctaaagaaacaaaaagataaaattgtattacagatttttgaagaagaaattgatggtgtatatgatagtttatatgcagagtttattacagatgtatcagatgattcagttcaaattattaaaggattaattactgatatttatgagagcaccttgaattataaacaacaatttgctagacagacaccaagtttctataagaggaaaatcaagagtattgcaaactggactaataaaaataaaatggacaaagttcaggaactcacaaagcagctaactgaaagatttgttgaagatagaatagttttagatgatattactaatctaaaagatattgttagagatttatataattgcttatctcaaatcgacagttcatggaaacaaaaagaaattagagataaattacttaaaagatgtaaagaactcaatatacaaaatgttgggtgttcatatattgaaaatgaaataatagcttatagacatgcagatgatagtacaattatttctaaagctagaattgttatagatacagcttattgcaacattaataattctataaatgaacttataaaccaattaagaaaggtggcttaattatgttagaagatttagtagcagttacaggaactttaaatagagtacatagaattagtggtgttggtaaaagaaagatacttagagaatcttttggattaagggataaagaaaaatgttgggaattttataacaatgtacacaatatgatggttggagttaaaatacaagattttttaaatgtatatccaatgaagaaaatctttgatggagataaatatggggagaaagattactatagtagtaaacaatacgtagatactttattatctgttacagatacatttaatgaagataatgtagcagagtttttaatggaaactttgttagatgaagttctatttgaacaagcagcaataagtatgatgatgggagttagttataaattagaagaaaaaacaggtgttggtgcttttgatatgttctttaactatggagctagaagcactaataaagaaacaaattatttaaaagtagttagataaggtggtcataattttggctaccttatattatacttttttaaaaataaaaatctataagtattcacttaattataacacttgaaacaaaataaggcaatataaaaataaaataaattataaattgaatgggggattttaattatggtaaataaaaatattgataaaaataaacaattagtatatgcagtttgggttaatgatggagatataagttatgtgtatttgggaagtggtaaacatgaaagacttagtgggaatggtagtaaattaaggagaaatgtacacgataataagacactacaagaagcatacaatatagttaataaatttcatgttgaaacattagaattcaatatagaagatgatgagaaagctagagatattgaagaaatgtatatcgagcattttaaaagaattgataatgtaattgtgtgcaataaatatccaacatatgcaagtgaatataaaagaaaattggatgaagatgatgttaaatttattagggaattaatagctaaaggtaaaactaataaggaaattgcagaaagatttaatgttgatccatctactataagtagaattaagacaaagaaaagatggggaggtgtttgctaatgatagatttaatactcattttaggattaggtataatagctttatttcttagtgcaaggattgacatattacaacaggagaataaaggattaagggatactataaaaagagatagagaatggtttgaagttgataaacgaacatctgtagaattagctaaagtaaatgaacgatttaaaatatcacgagaagaatatgtaagaaagtgtgaagaatttgaaagacaatgcaaagaatatactaaaggtataaaataatgaaaagaattaaaaagtacatagatgataatggtgagagttgggattcaaaatcagagttccaattcttttgttatcttcaagaaaatagagataaattaaatatcaaaaaaattgataggcaagtaaagtatatattgcaagagccttttatgttgggttctaaaaagatacaagccattacatataaaagtgattttacattagaaatgaatgataaaaaaatagtaattatagatataaagccaccagtaaagtcgatttgggatgctaagtttaatttgaaatggaaaatgatgatgaatttacatagggactatattttcaagatatatgcttggaagaatagagatattggttggatagaaataaaataaaagtggttttttgttaattttatatactgtatggaatcatataggttatatgtaaaaaaagtttctatttgatatatttttacaatcctcatataattatgttatatagggggagttaaaatggaggcgactgtaaataaaattcaggaaaacttagataataatttaacagaagaacacacaaaagaaggaataagtgcagcttatgtaaaagcaatagccaactatgctggttttaattttgagcaaccagtaaatgattatgggatagatggaactttttctggaattaaagtgagaaaaaaaggtggggaaaaaagactactatcagatggttgtaaattagattttcaattaaaagcttcaattaatgtaaaaatggaaaaagatttgattaaatatagtttggaatcaaaaaattataatgatttagtagatgatgaaatatgtactccgagaatacttatagtatataagcttccaagaaataaagacgaatggattaaagttactgagaatggaacaatgtttaaggattgtgcatggtggtgctacttgtcaggtctgcaagagacaaataataaggaaacaataacaattgaaataccaagaaatcaaatatttgatgataaatctttgaaggaactaatggggaaagttaagaaaggggaaatagtttgatgtttaatttaaatcaaattaatgatacaactatagaaacctttgaaaaatacttgattaaaaatttatgggtagaagatatagaatttccaaataaaaaaattaaactattcagaaaaataattgatgatgaagaatatagcttgtccttaccagcaaaaagtaattttaaagattcacataggaaaattaatgaggcaatagagatattagctgaattaaaagaattatcaaatcaaaaattaatctctgaagtatggaaagaaagtaataataatgtttttatcttaaataaagaaattgagactaataaatcacaaaaagatattttaagctttagaattatttctaaattatcagatgaaggaataattcctttagagtatggatcaaatattgttgagggattaaaaaaattaattttatccgctatttttaatgaggaacatccacaaccacacttttttagaacaaataaaaattcgcacgaaaaattatcaaggtataaattaggtcaaacagcttttggaagctatgtgtttaatgtagaaattgataattatatgcatgagcaactacaaataaatgaaaacgagataattgaaactttgccagaagaaagaaaaataattaaaagaattcaaaatggtatttataatattagagaaaaagatatggatactttatttgaaaatggatataaaaaaggactaaatgcaaatatgtgtgatgctttgttaaactttaatctagagaattatgatgtgaaaattgaatcaaaggttacatggtcagatttattacctagacctgatgatattaaagaaaaagttatattagaaaataaagatttttacaaggttaagatattatcagagaaatataaagaagtgaaaagtattgaacaaggaataagaggcagaatcattaaattaattaataggaaagattctcaaggcaattcagttgagagaaacatagttatgcagacagaggttgaaggaaaatctaaaaatgtaaaaatagaactaagtgatgtggattataaaagggcgtgtgaggctcataaacaagatcaagaaataacaataagcggtgaattactaaaggaaggaaaaacgtggatgttagtgaattataaagatttaaaaattatataattattttttagtattaaataaggagtagatattatggtaaaggaagttgatgtaagaaagaaatattctcatgaattaaatgaaatgtattatattttaaaaaatttagaaaatgacagatattatgaaaaaagtggtgctatgtctgatggatttttagcaactaatattcaaaaattcagaaagcagtttgatgaattaattaataaaatcgaatatgataaagattctgttgatgaagaaatatttaaagctattgataaagcaggaatttaaaagttaagaactctatttatttagggttctttttatgtaataaattgcataaatatggtatgattatcgtggggggataattatatgtttaagaataatacaattataaaacacatcaaaaatgaaggagttaaaatagataatgatattcaaaatattaatacaaagctaattacagcaataaaatcacattatgaaaatgaaaaaaaagaggatttaaaattaaaaagaatttctttggaaagtaaaaaagagcattgtaaagaatttaattggatagcagctataagtttagcattttcaatagtagctattattggtacattatcactaaacttgaataataaaataggtcagtcatatggaatagcacaaaattttattgaaaaacacgatgaacttagtaaagagatagatagtagcagtgaaatattatttaaatatacggaaaaatatgaaaatgccgaaaaagtaaatgacgcagctgaaattgaaagattagataacattccagaagtaaaaaatgctaatagaataataagacaagatacagaaaaggaaggaattttatttgataattcaagaaaacagttagaggatattaagggaacatggataaaatcagtatatatagttactatttttagtatctttattattgtaatagttgtgaccagtatagcaaaaattatattaaataaaaataaagaaaacaagaataaagcaatagatatattgataaatgttataaatgaaaggctagaagaaattaaaaaagaagaagaagccaaaaaagaaaaagaatcagaagaattaaaaataaaaaataataacttattgattgagcaattaaagggaattcaaaatgttataaaagaaaataagagtaataatgatattatacaaaaagcatgcaataaaataataagagatatattttaggtgggaattaattctcgccttttattatgcaaaaataacattattaatttataaagacgggagtaatatacaaagttttcgtgttaatttggattctgcattaggtgctagaactatgttagagcatataaaatattaatattgtaagtttagcaagttatgatcttctatagattgtaagtttgtaacagaaaagtgaggtgataataaatgtcaaagaagactttaacagaccaacaaatggaagctataaatctattagttgtaggaactatgagtaaattgcagatagcaagttcaattggagttagtgaaaaaaccatctataattggttgaataataatgaggtttttaaggagcagcttcaaaaatcttcagacctttttacagaatctaaaattttagacgcaaaaaataagctatctacacatttagatatggcaatagctaacatagctaaaatagcacaagatgaatcgaattctaagagttttgaagccaataagtacataattgacaggaatcttggggctgtgacaagtaaagtcgaaacaagtctaatagataataagctaaataattccaatgatgatgaaaaacaatcttatcttgctacattggaacaggattttgaatctaataatgtaattgaattagacaaagctaattagtatattatatgatttcagttcttaaatgtcacatctataaaagtatatgattaggatagaacagtatatataaattttatctagttacttggagattaattatactataaaactatcctaatcatgtatcaattcttttggtacttttagagaaattaatagaagaacaaatgtttacaataaataggtaaagctatcatattaattaaagttgtccatcatgtaccaacaatataataattagtgcaatagttagtgtaccaatgtgcaccagtaataatgtatatagagtatgtagtataagatcgttatatattgtataaacattattgtactggttggagagttaaataagtataccctcgaactgagggtatttataaactagctgtggtcttttaatgtatctaatataggttgtatattggaaaattgaccactcatacctgaataatgactatctaaatcaaaaataaatgttattaacttgatatcctttattttgttttttatggaattaatgttattttccaatgctttaatctgttcctcagcaaattgtaaagtgctgttttcttggatttcatcaacaattaactgcttatatttactataaaattcttttgccatatctatactaaatactttgcaatcttgcagagtttgtccaacataaaagtgtattccataaccaaaatcaccattaatactgaatattattttgccatctccatatacagcactaatatcaccactatttactgatatattaaaatttttttctttaaagtaatttttaaaatctgcaattgcttgattttccatagtaattttagtactataagttaatttatcaaattccttatatagatctgtacattgttgattaagtaaaacccatttatctttaagttcttttattttttgttcttcgtttacctttgaatcctgagcatctttaaacttatcccaatccatattatcactccttaaaattattgttattgtaagaatagtctaccattaaacataattcgtgtaaatatatgtaattaatgttagtgtagtattaattcaacattatatttaaatctagatctgtcaaaagtttacaaacgctgagttttttagttcatttagggtatactacaaacaataacaaacttatatcctttaaagtggcatttcttggttgaaaaatacttaaaaatagttcgtaaaacaaattgacttcaaacgaactgaatgatataattaactcataagataaataatctatgaggtggtaaatatgaacaaaacatatttctatatacgtgtgagttccaaagatcagaaccctattcgccaagaagtaaaggctaaagaatataatataccaaaagaacaggtattcattgagaaggttagtggtaagaacgtaacagatagaccagtattaaataaccttatgggtgcattagaagaaggtgataagttaatagtagatagtattagtagatttgcacgtaataccaaagatcttataggattagttgaacagttaaatcataaaggtgttatatttaaatctataaaagaggaaatagacacaacaactccaactggtatgtttatgctaacaatctttggagcagtagcacaattggaaagagattatattaaggatagacaaatggaaggaatagcaatagcagttcaagagggtaaatataaaggtagaaaagccatagaatatcctaaacaatgggataagtattataagatgatgaaagagggaactattaagggtgttgatgtaatgagaatattagacttaaagaaaacaacattctacaagttagttaagcagtatgaagctaaataatgtagaggattatattaatatatagtccttttattatgtaattgattatatatagggtaggataaaattgtccaaggggattaattataatagtgcctttattatctatacgttatcattgtaacttgtatatataactaacctgtagagggacttagtagcaaagaacattaactattatgagtaatagaagaatgaagaaggacaatagcaattatatattattatcttactgtagagggacgtaatgaataacacatgaagtataaatgatatgatacttaaatagatcaattacattcattatataatatatccaatgaagagggacataataagagattgtttgttattaatcaattagttagtattatatttataaagaaatgacattgattgacaatgaataagaataacactcaacataaataaatatttttttataaaagttttcatttagctttataaatcaacaaaaaatataaaaatatacccaccacgattctaagtttttttctcggaggtcgctccatctaccaacataaaatttcttagcaatttctaaaaaatgacctttcaaatggctatatatcaatatttcctacatcaagagattcaccaaaatgtaaaaaaataaatatgaaaattattaaggcattactgatatgtaatgtctatttttataccccaaattaaataaaaaggagagatgacatgatttattatgataacaaagaatttgaacaagaatttcaatatgaattatatataacacacaagttcttaagtaaatattatggcagcaagaaagctatgaagtttatgaaagaaggagatataaacaaaatagcttacgatttagctgaaagggacataacgtatttttgtttgtactatctttcagatatgtttgtagttaaagataataatgtagctagacaattatctccatcacattatgatatgtggaaactattaaatgatacttttgttgaagataaatttgacaagataaatatagtagtttcaaggggatttgctaagacaactgtgtgtgatacagcttgtgctatatggttacattgctatagaaaatcaatattcacattattaataggtaaaaaagaagatgatgctgtggcttttatggacacaataaagaaagtattcactgagaatgaaaagatagttactaactttgggttaatgattgataaaagacttaaattaaatgcaacagagattgaatttactaaccattcatatataagagcaataggaagtggtacttcatgtagaggacttaaatatggtaaatatagaccatcagtagtaattgcagatgatgcacagagtgaaactgacgtaataactgaatcagctagggaaaataagtatgacaaatggtgtaaagaagtagaagaggtgggagataaggcagtattcagaaatggaaagaaaattcagtctgctactaagattatatcaattggtactgtattacatatggattgtttaattagtagacttgctagaaacaatgattattatactttcttaagaagggcaatattacttgaagatggacaaactgtagatagtatttttgaatcacctttatgggcagaatgcaggaaactatatttcaatgatagagatgcagattcaaagaatacagcaaaacagttttatgaaacatttaaaaaggatatgaaatttcctactctatgggatgaaaagtgggattgttttacagacttagcagttaagtattgggaaaatagaatgtcctttatgtcagagcttatgaacgatgctagtaatataggagttaaatggtttaaaaccattattgatgaatcagcagagtatcttagtggtttatcatacagcaaaactatgttatgtgttgatccagcttcaactactacaaaaacatcagattatacagctatggttgtgggttctcaatgtgatactgatagatttacttacataagagatattgtaatgaggaaattagaatttaaagattattgtaagacggtttgtgacttattagaaaagtatcctgaaattgaatttgtgtacatagaaaaaaatacatttcaatcggctgatgtaacagcaatacaagaattaatttctaagaatccagtattgaagaatagaagaattatttttataaatgaaatgcaaagaaagaacaaggatgaaaagatagggactattattgataaggttaataatggtcaaattagatttaatcgtgaatgtaaagatagtgcagaagcattcaaacaaatgaaagaatttcaaggctgttcactatcaaaacatgacgacttctgtgatattgtcagcgagtgcgatattcgattaaagaatttaaaaacaggtatggtaactctattaaatagaagttgccttttttaatgcaaaaaattaaagaaagagaggtaatgcaatgatttatgataggcaaattgccatgttattatatgaaaagtatagcaaggataaaggtgattatacagatgcaaattcttattatgatggtgattcagtagcacagagtaaatatccagtaaatgaagaaagatgcaatagaaaatttggaacaaatcatgttaaatttatgattgatgaggaagtttcctatatgacaggaaataaattatcgtacattagcaagagtggaaatagtcaagttgtaaaagatattgaatatactttagataatataaattcatgtcttgatacagagctgacaacacaatttttaattaattcagtagtatatgaattatattatatgtatgaaggagaatttaaaataaaagtatgttctccacttgaaagtataggatatattgatttagaaaataatgttcaattattcctatatatgtataagaaaatgcttgacgataaaacttatattgatgtttttgacgacaagtatatttatcatatggatgaatcttttaatgaaatagcacctaggcaagaacattattttggaaggtgtccagtaggtattgctattatgaataatggtacaaaagatactatttataatgcaattcacggattacaggatgcatatgaatatacgttgatggattggtctaatgaaataggggatacacgtttaagttatttaactatgacaggttgccaaatgtcagaggaacaagcaaaaataatgaaagaaatgggaataatatctacaacagatgctaatagtaaaattggtttcttgataaaagatattaagccagagtttttgaaatcatatagagatattattgaagaagagatgtataaggtaacacatcatttaaaaaatcaaatcgctgtccagtcaaataccagtggttcaatgttagccacaaggctgaactgtcttagaattaagctaactacacaatatcaatgtctaaagaattgtattagaactagattacaatgtctatttacttatctaaatttagtagaaaataagaattatgattatagagatattgatgttaagtttactcttaatttgccaaacaatgatcttgaaatggctcaaatcttatcacaacttactggtaaattatcaataaaaactggtttgtctcaattaagctttgtaactaatgctgatgaagaatataagcaaatgctagcagagcaaaaggaaattcaagaaaattcagcaccaccaaaattaaattatgataatgataaaaacagtaatacagataatttagataatgtaagtgaggataacaatggaaacgaaggttaatttcacacaacaagaagaaattgagtttatcagaggtttatatactaaatgtaatgaagatttagataaagtttttatgttacataaggaaaataaagacaagctattgcaagagttagccttaattctccttttatataaaattaataataatgttatgaacttaagctattcggagaaatctgaaataaaggagaagtttgaaaagctaatagttaaatttactggtcgacaagtgaaattaactgatagtgttataacatctattttaattcttactgtaaagaatacttttaaattctatggttataagtataccttagaagaggtcaaggatattgtaaataggaaatacaaaggaaaattttataatgaaagaattataaggaatgaaaataaagtagctgcttatcttaatgataaagttcaaaggtttattaatggaaatattgatgttaatactatcaaagataatattgaaaaaacctataaacaaaataaagataatgtaataactttagcagaaacagaactatcacgttcagaaaatctagcatttttattatttgctaaaagcattggaatagtagaaattattcgtaatgaagtgcttgatagtagaacgtgcgatgagtgtgaatccatacataatgaagtatttaatatagaggacgctccagatgaaatacatccatgttgtcgtggatttaatactatattatattcggacagggttgaagactagcctaattagtcttattttttatgttcaaaattaaaattaaattttaaggcacttacttggggcgttagcaactcgtttgggcgaaaggggtttttgtaaatgttaaaaaaagaatttttagaattagttaaggatattgaagaggatggagaaatagatgaaactatattatccaatggtttttcaaaacaaattaaggatttagatggtttgaaaaatttacttgatactaatgagttagtaaaaggaatttatcaaaaagaattggatagtggcgttggaaaaggagttactaagtataaagaaaatttcaataagaatgaattacctaagctagttgaggaaggtataaaagctaaatccaatgaggggaaatcaccacttgaaattaaagttgaggaacagcaaagagaaattgaacaaatgaaagctgaaaaagttaaagcagaaatgtctagcaaatatactaaggacttatcaactaagggacttcctactgatttaattgattttgtattaggtgctgatgaagatacaactaatgcaaacattgaaaaaatcagcaacatattaagttctgtaactgatacaaaagttaaagaaaaattgaataattcaaactatgttccacctaaaaatgattctaagacatttgggaaaccaacttgggatgatgttatgaagggaaaagcaagttacgaagattttaaaaaatcacaagaaagctaattaatgaaggtcttgaaatgatatagagcctattaattagcttttttattatgtctttttataaggctgaattagacgttaaagaaaaatgcctactataaaaaaataagtgaggtaattatatatgagtattgcaagttttaaaaaatcagtttgggaagaagctttaataacagaatttagaggggtatctgtagctaatttaattactactgctccaacaaaagttgaaggtaacaaggttatattcaatatcattagtggtggtactataaaggactacacaggaacagttgaatatgatgatgttacaacagcacctatcgaattaaacttagacattaagaaatattttgcaataagtttagatgatgttgacgctgttcaagctgtagcaccagtattaatgcaaacagcaaatgaaaaagctttagatttaaaggaagttcaagatggtgttgtattcaaagaaataagtacaagtattccttcaactaatgctataggttctgcaactacaaagaagcctattactacacctactgacgcttataattatttagtagatttatcaactaagttatctaaaaagaaagtaccaatggttaatagatttgctttagctagtgctgaatatatcaatttaatggctaaagatactagattcgctgataacttcaacgtattaccaaatggtattgtacaaggtgctactgttgcaggatttacattaatccaaacagaagatgtacctgctggaatggttttagctttacataaatcaggtgtaggatatgctactcaattagataaagttcaagctattactagagagggttcattctctgaagctgtaagaggattacaagtttcaggtgttaaagctttaagaactgacgctttagcaggtctttattatgatatagcaacagtatagtttaatcggagaggtttttaatctctccttttctgaattaattattataaaaaaagaaggtgaatattaatgacagatgatgagtatgaattaactgcaatttgttatattagacgttatttaaacaaggatgatattactgatgaagaaattaaaacaaaatattcaatagtagtaaaaagaatagtaatgaaattaaaagaaatagatgatttaccagtaggtgttttatcaaccaaatctaatgatgttagtacaacttatatggaaaataataataatgtaatgactaaggatataacaatgttgttaccagttccttatataagattattttaattataaattaaatgaataggaggtgagaagatgtcaaatccaattgataaaatgtataaaatattgattaagcaaaatggagtttcaggaaaagttaatggagttgagtgtaagtttttattaactgaatgtcaagattcaaatacaaatggtactgacctaatgacaatatctacggataaacctttagaacaaggatactttgttaatattggaactgatacttatttagttattgataaaaaacatgaaacaattgcttatcaaagctataatataggaactattcaaaagaccaatcatcttaataaatttgttagtaatgaagtaatatatcaaattcctagtatttgcactaacattactaagggaaaattaggcatgatttacgaatcagcaggtattacagaagcaaatggtgtttggtgtttcataactcaattaaatgatatatctaaaaagattaagacaggaacaagatttattataaatggtgaagcttggggttgtacttctttagattttacgacagatcaaggaatattatatgtaatattaagaaaaggtgctataaacgtagaaacagacgatatgattaatgaagtggctgatggacttagtttgccgacatatgctattacattaaatagtacatcacaaaacttatacggaacatatacattccaaatattgcctacttgtactagaaataacgtggctgatacgtcagcagtagttacttatacatcaagtgatagttcaattgctaccgttactaatagtggttttgtaactgctcaaagtaaattaggaagtgcaactatatcagcagaatataaaggtaaaatagtaactatgactataaatgttgttgcagatgtatatagtattgatttatcaagtaattcagctagtatatttgttgatgaaacatatcaaataaattccgtttgtaagaaaaataatgttgtggtttcaagtcctcaattgacatatgtgtcaaatgatacttcaattgctactatagatgataatggaatgatttcagcaataggacaaggttcttgtaatattatatgtggatatgcaaatgtaacagctacctttaatttaacatctaatgctaatgtttatacaatagatttatctgaaacaagtaaatctataattcaagatggaacatatcaaattgaagctacttgtaagaaaaatagtgctatagtaagtaatccagttattacatatagttcaagtaatacaaatatagctagtgtttcagcaacaggagaagtaacaactttagcagtaggaaacgttgatataacttgcagttaccaaggagtaaatacggttattagtataatagttgaagcaaaaccaattgttcatacttatactataaacttagagcctacagatagtgtttatcaaggctcaacttatcaagttaatgcaatttgtaaggataatgatgttacagtagaaaatccaatagtaagctatttaagtgataatacaagtattgctactatagatgcaacaggattagttacaacagttaatattggtacttgtaatataacagctacatttgagggggttagtgataccttaagctttgaagttaaaaagataccacacacttatacaatagctttagattcaagttctcaatcattatttactggaaatacacatcaaattattgcaacttgtactgataatggaagtgcagtaagttcaccagtagtaagtttcgtttcaagtgatacaagtatagctacagtaagttcaacaggattagttacaactatagcaagtggaacagccacaattacagccacatatgagaatgtaagtgcaacattatcattaactgttacagttgagccagtagcagtttatacagaaaattggagtcaaactacaacaattaaacaatacgttacatcaacttatactgtttattatagtaccgataatggtgtaactaagacatatcctgctatagattatgtgcttgatagtgcaggggttgcacttggtacaaaaattacggtaacacgcaaatcagacaattctttctctgtgaagaataatacaataacaacattaactacttgccatgtttctataacagaacgtgcaacaggtaagttattatcaaatacattattaacattcaaatcaggaatttaattatagggttagtcaattttgactagccctataatttttatagagaaagagagtgatgtataaaatggtcataggaattgatatggggcatccatttaattgtggtgcttttggcattatgtcagaaacagatggcaatagggcagtaggaaaattattaatagaaaaattagaatcattgagacatacggttgtaaattgtacctatgatattaatgtaaatgaattagcaaacagagtagctttagcaaatgcacaatcattaaattattttatatccttacatatggatagttttgataatgcaagtgctaatggtgtaacaatctatacaactgaaaattcaagtgctaaaaataaagctaatgaaattgtaaatgtagtagcaaattcatgtggatataataacagaggatggaaaagtgctaatttctatgtattgaaaaatactaatgcaccagcaatgctgctagaaatgggatttgtgactaatcaagatgattgtaatagatttaatgcagaagatatagctaatgcaataataaaaggattgactggcgaaagttctactgaagatgaaaatggttatatagtaacaaattatttacctcattcatcaggagattatgatggagtagatattaactatgtattaagttactttcagaatgtaaaatgttatgtcagaggtaatgaaaagggtatttggatagaaactcagtatctgagtatggacaaatgtaatgaattaaagagtactctaggatcatggttttatgagattaaatattaggagatgatataaatgttaaattatttagaaaaattcaaaaatactgggactatactttcactagtgggcttgattggattattattaattcaatttggagttgctgtagatatggaatggttaaagaatactgctaatattgtatgttcaattttagttattttaggtatttgcaataatcctcatacagatggattagatttacctcaaattaggtcaaatgataataaaatagagtagggggagtaatatggatgaaagtacagtacaatctattttgcaacgcttaactaaaatagaaactctattagaagtagacgttaaaaatttagaagatagagtagataaagactataaaaatatggatgttaggattagtaaaattgaaagtaataatacatggctttggagaacgatagtaggtgcaataataggagtagtaattggagcagtgacaataacatttaagtaagtacatatggggtaataaagaatatttctattctttattacctaatttttttctatttagtatatttcaacagttttttttcatttatctcaggaaacttatcattagaaaaaacattgt

SEQ ID NO: 35 - DNA, 53170 bp, Clostridium beijerinckii
gagttatataatacagaagttatatattaaggaagcaaaaaaacatattttctataagaattattaaaaaatagaggtataaaaagtaaactttaatatattaatgaaattaatagagaatataatgtaattatttggtatgaatactaaatgctttgggtaaatctgctaaagaaaatggactgttaatttatcaatgtattgcaacatcaaaaaaaaaacttgcaataattgagaggattttcattaaaaacaattaaaatttgaaaatacatgaaggagagtagctgtttcgttgcaaaaaaataaaataaatcttgtatagatttattaatatatgatattataaatatacagtaaaaatgttaatttattaaaaatatgctttaagtaataagaaaataatataaatggggggactaaaatggcacttagtaatttaaaaactaataaaaaagttattatagtagatactactcttagagatggtgagcaaacagcaggggtagtttttgctaatgaagaaaaaatagtaatagcagaaatgttaagtgacttaggtgttgatcaactagaagtaggaattcctacaatgggtggggacgaaaagaaggctataaaagagattgtaaaaagaaatttaaaaccgagtatcatggcatggaatagggctgtagtcagtgatatagaacaatcaatagattgtggagttgatgcagttgccatatcaatatcagtatcagatatacacattcagcataagcttaaaacatctagagaatgggtattagaaagcatggttaaatccgtagaatttgcaaagaaaaatggtctttatgtatctgttaatggggaagatgcatctagagcagataaagactttttagttgaatatattaatgcagctaaacaagcaggtgcagatagatttagatattgcgatactgtaggaattatggagccatttaagattagagatgatattaaatatatatatgataaaacaggatttgatatagaaatgcacactcatgatgattttggaatggcaacggctaatgcggtagcaggtattaagggtggagcatcgcatgttggagtaactgtaaatggtcttggagaaagagcaggtaatgcagcattagaagaagttataatggcattaatgcttgtttacggatataatggtgatggaataaatacgcaaatgtttagagaagtatcacaatatgtatcaagagcatcaggtagagagcttccaatatggaaagcaatcgttggaactaatatgtttgcacatgaatcaggaatacatgcagatggagcaataaaagatcctaagaattatgaagcatttgatccagatatagttggtcttgaaagacaaattgtcataggaaagcattcaggaagagcttcaataataaataaatttagagaatataatagagaacttacagaggatgaggcaaaaggaatacttgaacttgtaagagctacgtcagttagattaaagagaactttatttgataaagaagtagttcaattatataaagagtatcatagacgattagaagaaagaaataagcaataataggggggcgtaaacgtgggagataatttagtttataagattttaaaaagccacattgttgaaggtgaattaaaggcaggagagcctatagcattaaagattgatcaaacgttgactcaagattcgacaggaacaatggcatatcttcaattagaagctatgggaatagatagagttaagacaaagaaatcagtagcatttatagatcataatatgttacaacaaggttttgaaaatgcagacgatcataagtttattcaaacagttgcatctaaatatggagtatatttttcaaagccagggaatggaatctgtcatcaaattttcttagaaagattttcaacaccaggagatacattaataggttctgatagtcatacaccaacagctggtggtgttggtatgcttgccatgggtgcaggtggattagatgttgctcttgctatgggaggtggagcgtacaatattaacactccaaaagttgtaaagattgaactaactggaagactaaatagaatggttgctgcaaaagatgttattcttgaagttctaagaaaattaacagttaaaggcggcgttggtaaagtatttgaatacgctggtgaaggtgttaaaacactttcagttcctgaaagagcaactataactaatatgggagcagaacttggagctacaacttcgatgttcccaagtgacgaaagaactttagaattttttaaggcacaaggaagagaagaagactttatagaatttaagccagatgcagatgctgtatatgacgaagtagtaacaattaatttaagtgaattgacaccacttacagctaagcctcatagcccagacaatgtagctaaggttagcgaaattggtaagattaaagttgaccaagtatttataggaagctgtaccaactcttcttatgaagatttaatgaaagttgccaagatattaaagggaaataaagtacatccagacgttagtttggtaattggaccaggatcaagacaagttatggaaatgatagctagaaatggagctctagcagatataattagttcaggagcaagaatacttgaaaatggttgcggaccatgtatcggtatgggtcaatcaccaggaactgatgcaatttcgcttagaactgtaaatagaaacttctttggtagaagtggaacattatcagcacaaatatatatagtaagtcctgaaactgctgcagtttcggctataaatggatttttaactgatccaacagaagtagatgtagatttaacaatagatatgccaaaggaattcttaatagatgattcaatgattttagcaccagcaccaactaatgttgaagttgaagttgttagaggacctaatattaagccattcccagtaagtaagccattagcagaagaattagctggtaaagtattaataaaggttgaagataatattacaactgaccatattatgccttcgaattctaagttattgccatttagatcgaacataccttatcttgcagaatattgcttcaacacagttgatacagaattccctaagagagctaaggagtttaatggtggatttataattgctggaggaaattatggacaaggatcaagtagagaacatgcagcattggcaccattgtacttaggagttaaggctgttatagctaaatcatttgcaagaattcataaagcaaacttaattaataatggaatagttccaattgaatttaagaatgaagctgattatgacaagattgagttaactgatgacttgaagctggaagacattcaagcagctttagaatcaggaatagttaaagttaagaacttaactaagggaactgagtttgatgctacagttgatttaacagagaaagaaattgctgttattaaagaaggcggaagacttaattatgttaaagcaaatagttaattataagataaagagagtgaaaatgcagggtctttaagactctgcatttttttatacaaataagcatgtaaatgcttaagggctataattcaagttcaagataggtgtaatatgcaggtgatttgtaaatgtgattatacttacgttataattaattatctaatagaatgtatataaatagattgatgagaaagaagtgtaagtttaatggaaaagactataagattagcagggatagcatatgagagtttagttaacgggcctggtataaggagagtatttttttcacaaggctgtaagcataactgtaaaagttgttttaatcctgatactcatgatttttatggaggagagcaaagagatatagatgaattaattaatgatacattaaataatgaaattataaagggagtaacatttagtggcggagatccgtgggaacaggcagataaatttgcatatatggcaaaggagtttagaaaaaaaggtttaaatatttggagctatacaggatatacttatgaatatattttagaaaataaggattcgagattaggctggagtgatttattaaacaatattgatgttcttgtagatggaaaatttgaagaaagtaagatgtcggatggacttaagtttagaggttcaactaatcaaagaataatagatgttaaagaaagtataaaaaaagaacaaattgttactatagaactttaacattaatataagatgtttttaaaaatatccacaaatgtgtgagtataattaaaaaagttgtggattattatttgaactatgtggataaattttggagtaataaaataggcccatatatcacaatataagttatattacttatagtgaaagttaggtgaatgaagcttgattttaaataaagaattttataaacaaggtgcattaattttagcgaaggaacttttgggaaaagttattataagaaaggttgacggagtggccttaagagccaaaattgttgaaacagaagcgtacataggagaaatagataaggcatcgcatgcttataatggaagaaggactgaaagaactgaacctttatttagagaaggtgggattgcttatgtttatttcatttatggaaaatactattgttttaatgttataagtggattagaagacaagggagaaggagttctaataagagcattggagccgttaaatgaatttgattatcttgcaaaaaaaaggtttaatcaaaattatgatgaactttcagaaacaaagaaaaaggcaattacaaatggaccatcaaaactgtgtattgcattttcaatagataaatcggaaaattataaaaggttatacgaggaaggtgatttttatatagaagaaggagaaaaagatacgtttaaaataatggaaacgaaaagaatcggaatagattatgcagaagaagcaatagattttccatggagattttatatagagggaaataaatacatatcgaaaaagtaacaaactttcaatgtaattcccattgagcatttaatttaaatacaaatttttactaaaaagaaataaagagtaatatatttaatacgataaatctatcataagatatttttttataggagatagatttatgattgctagagtaattaatagaaattttagtatgtataaatataaaaagaggaaagcatctttaaaaataaaagttactaaagaaaatattatatcgtttagtgaaatactcgagaatgtacaaatgcttaggaaaaaaggaattatatcagtatcagatcttaatagaaatatatctaagtctataaaaaaatagtaatataaagatgacagtacatggattaattaagacatgtattgtcatctttgtattacttattttctttatcaacattgattaatttatctgaaatgataaatctaggtctgtgtttagcttcattatatatttttccgatatattctcctattacgccaagagataagagctgaactccgccaagtacccaaattgaaagggtcaatgaagtccaaccagtaactgtacggcctgaaattttaactataagagtataaattagggctgcgcctccagcaaaaaatatagtaaaaccaaggagggttattaatcttattggttttatgctaaaggatgtaattccgtctaaggcaaaggcaatcatcttttttagaggatatttagattcaccagcaaatctttcatgacgttcatattcaacaactgagtatttatatcctattaatggaatcattccgcgaagaaataaattaacttccttatattgacttaacccgtctacaacacgtttgctcataagcctataatctgcatgattatagaccatgtctacgccaagaatacgcattaatttataaaaacctaatgcagttgttctcttgaaaaaggtatcagtttctctagtggatcttactccataaacaatatcgcatccatcataatatttttctacaaatgcatctatgacatctatatcatcttgtaaatctgcatctaatgatatagtcatatctgaataatttttagcaaccatgagcccagcaagtaaggcattctggtggcccctgttccttgaaaggttgattcctgaaaatatattatttttagaatgaagctcttcaattatgctccaagttctatcttttgaaccatcattaacaaaaagtattttgcttttattagatattaggttatttgaaatcatagtcttaatttttacgagcaatcttttactagtttcatgtaaaacttcttcttcattgtagcaaggaattacaagatatagtatatccttcataaaatcgcctccaatgattagtataaccaaataagttaacaatattattcaattgtaatcttaatattcattattttataattcatatcttatatttgatataactacagaggtttcgcttattaaattaatttcagtgttaaccctacctggtctagaacttttaagaatttttacaataggtcttagtgggaagttaggtatagtttcttgcacaacagctatgtcaccattacttagatcaactaaagttccttttgagaaaggaattacaattttgcagaatatattaacaatttcatagtcaaattttttgcctgcattagacattaaatattcaagaacatcacttggaaacattgctcttttattaggtctaccggttgataaggagtcatatgcgttagcaatgcttacaattttacttaaggtacttatctcatcattagctagcctattaggataacctaatccgtcaggtctttcatgatgctgtagtgttattattttgctattagcgctcagattataagagtctgataaatatttatatccgagtattggatgctggtctaatattgtaacttcttcatccgttagttcttcctctttcataagaatttcctttggaataaatgttttcccaacatcatgaagcaatgctccaatacaaagatattgaagttgtctttttggaagcttcaatgcaattccaaggactagtgatattacggcaacattcacagaatgagagtagatataattatccatgcttcttatgtctattagtgaaagtaagacacttttattatttagaacattttcaattaaatcttcagccatagactcaatattattgaaatatactgattccttttttgaaaacttatcagcaacagtaagtctatttatatttgaaaaagcttcttttattgttagaattgctttttgtcttaattcaggtttaataatatcttcaatttcatcagaactaaattcatcaattatatatattgataaaatatttaaatcctttatcttaaaaataattctttcactaaggaccataccagctcttactaatactctaccatcagaatcgtataatgtcttaccaataactgtattcggttttacacattcaattggaattaatctcatattatcttctcctcaaatgttggttatagtacaatttacaacataattcttagttaaatgttaaacataatagtagtatatcagtaaaattggcgtatttatagtattatgatgaaaaaatatattattttgtttaacatatttaaaaaatagaactaactactagttagaaaacaggtctgataattagatttttatacaacagatttgatataagatactaaactcataattgataataaattaagtattttagcagatttaagtatatataagtccattaactttttatattaataaatgataattttgttacttgatatttaaattgtgttataatattatagattacaaataaaaatatcaaagggggctttttcaatgtcaagagtttataatttttcagcaggaccagctgtattaccggagtcagtcctaagagaagctgcgggggaaatgctagactacaaggggacaggcatgtcagttatggagatgagtcatcgttctaaagcgttcgaagaaatcatcaccgatgctgaaaaaacattaagagaattaatgaatattccggataactataaggtattattccttcaaggtggggcatcacaacaatttgcaatgattccaatgaatctaatgaaaaataaagttgtggatcatattattacagggcaatgggcaaaaaaagcagcgtcagaagcaaaaatatttggaaaagttaatatattagcgtcttcagaggataaaactttttcatatataccagatttaaaggatttaaaagtttcagaggatgcagactatgtttacatatgtcataacaatacaatctatggaactacgtataaagaattaccaaacgttggggataagatattagtagcagatatgtcatcagatttcttatctgagccagtagatgtatcaaaatatggactaatatttgcaggagtacaaaaaaatgcaggaccagctggtgttgttgtagtaataattcgtgaagatttaatcacagaagatgtattaccagggactccaacaatgttaagatataaggttcatgcagacaataaatcactatataatacaccaccagcatatggaatatatatatgcggaaaagtatttaaatgggttaagaataagggtggactagaagctatgaagaaaattaatgaagaaaaagcttctattttatatgattttcttgattcaagtagcatgtttaaaggaactgttgtaaagaaagatcgttctttaatgaatgtaccatttgtaacaggttcagatgaactagatgctaaatttgtaaaagaagctaaagcagtaggatttgaaaatctaaaaggacatagaacagttggtgggatgagagcaagtatatataatgctatgccaattgaaggtgttaaagatttagtagaattcatgagaaaattcgaagaagacaataagtaatagaataaaaatcaactaaatttaaggagataatcagcttttggttatctccttaattaattttataaataaaattatactaatatctgaattataatatgtattatgtatagataatcaatacaatatatacaattttaaatattgttagtacatgtaatgtttttataagcgaatattagattaattgccatataaaagacatataaaagaatactcaagtatagattacagatgaaataaattttaaataaatctatagaagtataatagccatataaagatattcaagcagaatacaaggtggaaaaatttaatataaatatgttttggattagttcataaatcttaatttgctaactaacttgatagaattttaaatgcaaagttactattgcaatatatatattaaattaatcattacataatatcaaaaaaggagctatcgaattaatcgatatacccctctttattgataatataaaattaacagttaagtaattagaactcgcttgttccaggagttctagggaatggaactacgtctctaatattagtcattcctgttatatacataattaatctttcgaaacctaaaccaaaaccagcgtgcttagtttctccatattttcttaattctaaataccaccagtaatcatcttcagataggtttaattcagtcattctatcttttagcacatctagtctttcttctctttggctaccacctataatttctccgattcctggtaccaaaagatcagtagcagctactgttttttcatcatcatttaatctcatatagaaagctttaatatctttaggatagtctgttacaaatagtggctttttaaagtgttcttcagtaagatatctttcgtgttctgtttgtaaatcaatgccccatgatacatcgtaatcaaatttctttccacacttttgtagtatttcaacagcttctgtatacgtaactttagcaaaatctgatgaaactacgtgatttaatctttctaataaacctttatcaataaattgattaaagaactctaattcctcaggacattcatccataacatatttaataacatatttaagcatattttcagcaaggtccatatcatcttgtaaatctgcaaaggcaatttcaggttcaatcatccaaaattcagcagcatgtcttgtagtatttgaattttcagctctgaatgttggtccaaatgtatagatatttctaaacgctaaagcaaagcattcagcatttaactgaccagatacagtaagattagtctctttgccaaagaaatccttgctgaaatctacacttccatctttacttaattcaggagttttaggatcaagtgttgttaccctaaacatttctccagcaccttcacaatcgctaccagttattattggtgtgtgagtatacacgaaattttgatcttgaaagaacttatgtattgcataagcagcaacagagcgaactctaaaagttgcagcaaatgcattacttctaggcctcaaatgagctattgttcttaagtattcgaaagtgtgtctctttttttgaagtggataatcagagtttgacataccctcgataataatattcttagcctgaatttcaaaaggttgttttgcttcaggagtagcaactaagataccaataactgaaattgatgaacttataggtaatttagatatttctttgaagttatttaacttatcgtcaaaaactacttgaatatttttaaagaaagaaccatcattaacttctataaatccaaaagcgttagatgatcttaaagtttttatccaacctgatattgttatttcctttgataagaaatcatcagtatttctgtaaagacttctaattaaaattgattttgccatattgcatgacctccattttataattaatcttgtgatcaaaacatattattaatgaaaaaaatttttcactattttaaaatatcatttatgtaacctattacccttgataataaatagattttacaatactttttttgtgaatgcaacttaggacctgtccctaaacatataataaaccagtgccttagagcgtctgagtataaataatacgtgaaataaatatataaactacgaatatatgtaatttatcataaaaaagctttattttttatagtaaaattataaaaaataaagctttttttatattaagagtatttatttaacatgcttgtctattctaagccgttttcaaaactctgaatcaattcttttggaaagtttaacattgtcatatctttaactatccttttatatgcgtaggaaatttcttttatctgaactttcattccatcttccttactgatatttaaaatacaataagtgctatttggcctaccaatcttaggctttccaacactgccagagtttatatataccttatttttaaaatccttcattccaggtatatgcgtatgtgcacaaattaatacgtcgttagaaatggagttcataacttctgaagtattatctccgtcctttaagagatattcatctattttatctggacttccatgaacaaataagagacttttattagcaatattcaaggttaaagttgaaggtaaattagcaagaaatagtctgttttcttctcttaattctttaactgtccaaggaagagaaaaagcattaataggagtttctcttatatatgaatattcattatcaactacagaactatcataatttcctcttatgcaaagaatatgacgtctcctgatcatggaaattacttcgttagggtgaggaccataaccaaccaaatctcctaggcaaataattgtatcaactttctcaatatcaatatcttctaaaagattaataagagcatagacattagcatgaatatctgaaattattgctattttcatgagcattcctcctaagttatttagcaaattaagtatttaggattttaggtatttttccccaacaataactacatcaccagcacctactgttaatagcaagtcaccagaaactagttttgattttacgtaattaagtgcttcatcatgtgagtgaacattgatacatttcaatcctttatttcttaatgcatcaccaagttcgtcagaagatacaagtccagtatttctctctctagctgcatagatgtccattagtataagttcatctgcatcattgaaacattctgtaaattcatcaaatagggcctttgttctagtataagtgtgaggttgaaaaatacaataagtcttattatgattcatttgtttagcagtacttaatgtggctttaatctctgtagggtgatgagcgtagtcatctataacagttacaccatttaattttcccttatattcaaatcttttatgcgctcctttgcagttcgataatccttcaataatacagtcattagaaatattaaatataagagaaacacaaatcgaagcaagggcattcaatatattatgcttacctggcacatttaaagtaatattgaataagtttttacagtccttatacacatcaaaagtggcacaaccatttgtattgaaatgaatatttttagcagttaaattagcattgtcactaaatccataacttagagtattgcaatttgtctcagacagaatttcatttaccctttgatcgtcagcatatccaacaagataaccatcttctgggataagtcttgagaattgtaaaaatgtatcagcaatttcatctatatctttatagtaatcaagatgatcagaatcaatatttagaattattccaacgtaaggtgggaattttaaaaatgaacgtttatattcacaagcttcagttaagaaatattcactattaccaattctgaaatttcctccaattgcatctaattcaccaccaactaagatagttggatctaaattatcagcaagtgttatatgagaaagcatggatgtacatgtagtctttccatgagttccagatattgcaacactgtatttatgccccttcataatttgccctaagaattcagctctgtccattaatgcaatatttttttccttggcttctaaaagttcaggattatcagatgggattgcagcggtatagactactaaatctacattattaatattctctcttctatgacctatgtaaatttcagcacctgaagatcttaatttatcaatgattgcagaatccttaaagtcagagccagatacactataaccactatttaataaaacagcagcaagtccgctcatactaattccaccaatgccaatgaaatgaatttttttatctttatcttttataaaattgaaagacaaatgatcaactcctttttaattaataaaactaaatgttattataagttccaaaatttgagtatagaatttttagttttatactttaactataattatatacatttttcaaaaaatcaaccatagtaaaaaataaatacacaatattttatgcatatttagcgagtttgtgaacaagttataaatataaattaactttataactaaaaatattgatattaacttgaaattagcataaaatatgaatattaaagcgatttaatataaaaaaaattcgtgtgggtgattttatggagaagtttacaagaaataatagggtagttgccataacaaaaatattattagaaaacccaaataaaatattgggattaaataaattttcagaattactaaatgcagctaaatctactataagtgaagatattgttgttgttagagaaattctagaaagacttgaaatgggtaaagttgaaacaattgcaggagtagcaggtgggataaaatacattcctcaaagtggcgaagaagagaagaaagcttttgcattagaattatgtcagcaattaagtgatgatggaagagttataccgggaaatataatatatatgacggatctaatgtatgatcctaagataataaataaagcaggagtcatgctttcatcgtgttttcaaggaaaagagattgattatgtaataacggtagaaactaaaggtattcctttagcttatgaggttgctagaaatttaggcgtacaattagttattgctagaagagatagtcaagtaacggaaggtcctacagttactataaactatgtatcaggaagcaatggaagattgcaacaaatgtctctatcaaaaaagtccatgaaaccatcaagtaaatgtatattcattgatgatttcatgaagggtggaggaactgcaataggtattaaggacttattgaaagagttcgatagcgagctagtaggaataggagtattagtcgataataaacaaattgaaaaaaaattagtagacgaatatgtttctattgtagagttaaaagctgttgataaatcagcaattatagggatacaaccttcaaaaacattttcttaaaattaacagaaaattttactctaaagatgccgcgtaattccaaatacttttaattcagtatacatataaatgaacattaaatttgtagataggcccaacaagaaaaatattgattttatggtaaatatttattgttacttcaagttgtcgtgaatagaaattgttctgaaattcaaataggacaatcccagaaatttggtatttgtataagattacacaaaaaaataaattttataaggatttatcaaatataaaaaaggaatttagaaatttgtggagaaattatataatattaaatatttttaaggcaactgggaggggtggagtaaaatgcaaataacagatgttaggattagaaaaattgcatcagaaggtaaaatgaaaggaatagtttctgtcacatttgataatgaatttgtagttcatgatatcaaagttatagaaggacaaatgggtttatttattgctatgcctagtagaaaaacaccagatggagaatttaaggatatagctcacccaataaatacagaagcaagagaaaaaatacaaactgcaattttagaagcttatgaaaaagcagtctcagaagaagttgtagaaggctaggattttaacaaaaggaagttttaataacttccttttgttttgtcataaagtatttctatagccaaatattaaatgtactaatgggttgaaataagagtagctttccaatataattaaattgatatgaatatttaaccgattattgtaagtaaataatcgtgttaatataaatttataaatgaggtgtggtatataatgtataaatgtgcactggttttagcagcgggtcaaggtaaaagaataaaatctgatttacctaaagtattgcataaagtatgtggtaaagaaatgctaaaacatgttatagattcgataagaaaatcaggaattgatgatatagatgtaattatagggaaaggtgctgagcttgttaaagagagaacattagatagaaatgttagttattcaatgcaagctgaacaattaggaactggtcatgctgttaagtgtgctgaagagttcttaaaggataagaaaggagtagtcgcaatttttactggtgatactcctttaataaagcaatcaacaattgaaaggctatttaatgaacatatagaagcaaaaaattcagcaactatattaacagcaatagttaatgatcctacaggttatggaagaatagtaagaacgaatgacggcgtatcaaaaattgtagagcataaagattgcactgaagaagagcttaagataaacgagatgaattcaggaatatattgttttgatattgagctacttgtagatgcgttaagtaagataacaaataataatggacaaggtgaatattatcttacagatgctataggaatattaaaatctcaaggtaaaaaaataggtgcagtcgtaactgaatatgaagaaactataggagtaaattcaagagttcagttagcagaagcagaagaaatacttaagaatagaataaatcttatgcatatggaaaatggagttactctaattgatcctagaacaacatatatagggattgatgttgaaataggcaaagatacaataatatatcctaataatattttagagggaaatacaaagataggtaataactgcttaatttatcaaaattcaagaattgttgatagtaatattggtaatgaggtagatgttcaagcttcagttatattaaatagtaatattggtgataatactactgttggtccgtttgcgtatataagaccagaaactacaattggtaagcatgcaagaataggagattttgtagaaataaagaaatctactattggagatggaactaaagtctctcacttaacttatataggagatgcagaagtgggatcggaatgtaatttcggatgtggtacagtagttgtaaattatgatggtaagaataaacataagactattataggagatcatagctttataggctgtaataccaatttggtatcacctgtcacaattcacgataatacttatattgcggcaggatcgaccattacatctgaagtaaaagaaggtgatcttgcagttgcaagagctaagcaaagaaatatcagtggatgggtagataaaaagggattaaaaaaataattttttaataataaatcagccaaaattttaaggaggtcttctcaattatgataactcatggaagaaatataaaagtatttactggaaattcgcactcacagttagctcaagatatagcagagattttaggagttccagtaggaaactctaaggtttcaacttttagtgatggtgaaatatctgttgatattaatgaaactgttagagggaatgatgtgttcatagttcaatctacatcttcacctgttaataacaatctaatggaattgctaattatgattgatgcatttaaaagggcatcagcgggtagaattacagcggttattccatattatggatatgctaggcaggataggaaagttaaatcaagagatcctataactgcaaaactggttgcagatttattgactgcagcgggagcaaacagggtcttaactatggatttacatgcatctcagattcaaggatactttaatattccagtagatcatttacttggagcaccaatacttgctgagcattatatatcaaaaggattagtagatcaagatgatgttgttgtagtttcaccagatttaggaagtgtaacgagggcaagaaaatttgcggataatttacatgctccaatagcaatcatagataagagaaggccaaaggcaaatgtttcagaaataatgaatattattggtgatattgaaggaaaaagatgtatattaattgatgatatgatagatacagcaggaactattgcaaatgcagcgaatgcacttaaggatttaggggctaagaatgtatatgcttgctgtacacatggagtattgtctggccctgcaatggacaggataaatacttcagcaattgaagaattagtactattaaatacaattccgttaaaagaaggtaacgataatagcaaaattagatctatatcagtagctcctttatttgcagaagcaataaagagaatttatgatgatcaaccaataagtaagttatttgaatgtcaacaataaataataatttaaagagtttttaaataaataagatattgaaaggaatgtatatttactctaagtaattagggtaaatatatattctattttttatagttaaataaatttattttattaagtcaatattaagattgtaaacgagaaaagttttatgatttaattaaaataggatctattaaataattattatacttatatatttttagaatatttattataattaaaggataattttgttttctataataaatagtatatttatgttatattaggatatgaatgcttatgcaatagtaataaattaaggaggaaagaagaatggatggagttacaaccaaggttctgattgtggatgacgatgaaaacattagtgaagttatagacatgtatttaaaaagctctggatataatacaaagatagccttgaatggtaaagaggctcaagaattttatttagaatataatccagatattgtcttgcttgatgttatgataccgtatatagatggaattgatattctaaaatggatacgaaaacagaaggaaactccagttataatgattacagcaaagggggacacctttgacaaggttttagcactggaaattggtgcagatgattatatagtaaaaccttttgaacctaaagagttgttagccagagtaaaagctgtattaaggagatattcttcagagaatattaaaaatgaagtaataaaattaagtgatttatcaatagattcaacttcgtataaagttatatataatgaagaagaaataaaaatgccaccaaaggaatttgaactattatattatttggctaataataaaaataaagtttttacgagagagcaattactttgtgaagtatggggatatgattatccaggagattctagaactgtagatgttcatataaaaagattaagagaaaaattaagtagtggagaacagtgggaaatccaaacagtatggggtgttggttataaatttgaggtaaattaaatgaaaaagagtggaagcttacttcaaaaacttataataacatttatagttattttgactattgttttagtttcattagcttggttattatctatatggtttagaataacatattttactgaaaagaaggtgcagtttcagaaagatggagagtatatatccgaatctataaaaacatacaattctaacaaaaattcattggaatatgataaattacaggctatagtggatatgtcaagtgttggagcaaatgctgatattactgtttctgataagtttgataatatatatatatactccaaaacttcaagtactaaggagatagacaataaaccagagaatctagataatagtaaatattctttattggatggaaagccagtagagtatattggagatcgttacacctatatatatccgatattagaagatgatgagtttcaaggatatattgtcatgacagctcctttatcaacaataggtaaacagttgcatagaatatatcttattgtatggatatcggcattaggagcaatggtatttgcatctgtagttttatcattagtttcaaagaaaatattgattaatcctttagctgaaataaacaaggcagccaaaaggtttgctaatggagaagttaataaaagagttcatatagaatcgtgtgatgagattggtgagttggcaagctcatttaatataatggcggagtctttagaaaaggttgagaataatagaagagattttatatcaaatgtttctcatgagttgagatcaccaataacttctataaagggatttattgctggaataatagatggagtgattccaagggataaagaaggatattatttagacatagtatacagtgagataaaaagacttacaagattaattaatgatttactagatttatcagccattgaatcaggtaaattaaaattcaatatgagaaagatcgatataaatgagttaattagattatgtgttataaataatgaacaaaagataagagaaaagcaaataatgttaaaaatagatttgaaagaccagaattgttatgtaaaagctgatgaagataagacaatgcaagtcataactaatttattagataatgcaataaaatactgcggaaataatggaattataagaattagtacatattccaagggttctaaagtatttgttgagatatataataatggacctaaaattgcagatgaagaaataaggcatatatggaatagattttataaatcagataaatctagaacaaacaaagttagtactggactcggattgccaatagtaagaatgataattatgcaacaaggtgaggaagtatgggtcaagaatcatcctaatataggagtcacatttacattttctcttacaaaatataaaaataataagattagataagagcgctaaggaggacacaagtatgtttttaatagtaggtcttggaaacccagggaatgagtatgagaatacaagacataatattggttttaaagttattgataatattgcaaaagagtataatattgaaataaacaggcaaaaatttaaaggtatgtatggagaaggttttataaatggaaaaaaggttatgcttttaaagccaactacttacatgaacttaagtggtgaaagtgtaagagaagtagttgatttttataatcttaacaacgatgagatactagttatatatgatgatataagtctagaagttggaaaattaagaataagagaaaaaggaagtgctggagggcataatggaataaagagcattatagcacatttaaatagtgaaattttctcaaggataaaagtaggggtaggacaacctaatggagatttagtaaagcatgtattaggtaaatttacaaaagaagaaactgctattctaagtgaaagtatagaagcgtccacaaaggcggcggcggaaataattaaaaatgatgttaagacagctatgaatcagttcaatggattcaaggcgagtacaacagtttaaggaaggtgcatgggatgagattaaaagggttattggagcccttggaaagtagtttagaatttcaagacataatacaagggattgaaagtaaaagataccctattggtatatatggtgcatctgaatcaggtcgaggatacattataagtggaatatttgaaaatactaacagatcaattgtggttgtaactcaaagcgatatggaggcaaaaaatctttatgaagatttgatattttatactagtgaggtatattattttccagtaaaggaaatggttttctataatattgatgctatctctggagatttgagatgggcaagattaaaagtaataaatgaaatattaaataataagaaaaaaataatagtgacatcaatagaagcttttgctgcaaaatatactcctcataatttatttttggaatacagcatgaaatttaaagaaggcgatgaagttaatcttgccgatatatcaaagaaattaattcaatcaggttatgaaagagtggaaatggttgagggcaaaggacaattttcacttagaggaggcatattagacgtatttccaacaggttcaacttatccatatagagttgaactttttggcgatgaaatagaatcaataagaacttttaatacagaatctcaacgaagtattgagaaagttaaaaagatagatattttccctgcaaaagaagtaatagtttcagaagagatgttagaggttggaagaaataaacttaaggaagagtttaataaaattgctgaaagtgataaagatagtgaaagagtagaaaaactaagaaaaatattaaataaaaacttagaactactagaagagacttcgtcttttgaaacaatagatagttatcttccgtactttaccaaagaaacagaaagtctttttgattattttaagaattatttatttatagtagataatgttcaaagatgtaatggaaaattagaatcaacttatttagagtttgaagaaaatttcacagctttttctcaaagaggagatatatttcccgggcaaggaaatttattaataaataaagaagaagtattagaatcatttgaagatgaaaagattgcttttatcgaagcattgacaaaagtttctggctggctaaagccactatcaataataaatgtagctcagacaacattaaataactatcaaggtcagctagatttattaattgatgaaatattaggtaaaaagaatttaggatataagacactaattttatcaggaactcgagctagaggggaacgtttagttggaacattaagagacagagggatagaaagtgtctacaaggatactgttgataaaattgagcatggtgaagttgtaataacttttggtaatcagttgagaggatttgaatatccacaatataaagtatgtataatatcagataaagaagtatttggtgcggcaaagagaaaattaaaaagtagtaaagcaaagaaaaagggaatttctaaaatcaagagctttgcggaattaaagccgggagattacgtagtacatgcaaatcatggtatcggagtatacaaaggaattaaacaaatagatgttggagggcataaaagagattatttagatattgtttatgataaaggtgataaattatatgttccagtagatcaattagatttaattcaaaagtatattggaagtgaaggaaagtcacctaaagttaataaacttggaagcgctgaatggcaaaaagcaaaagcaaaggcaagaaaatcaataaatgaaatagctgaagatctagttaagctttacgcaatgagaagtactgtaaaaggacataagttttccaaggacactgaatggcaaaaacaatttgaagatgagtttccgtttgaagaaactccagaccaattaacatcactagaagaaataaagatagatatggaatctgataaacctatggatagacttttatgtggagatgttggatacggtaaaacagaagttgctataagggctgcatttaaagcagtaatggatggaaagcaagttgctcttttagttccaactaccattttagcagagcaacattataaaaatataaaaaatagattttcagattttccgataaagatagacatggttagcaggtttaggacagcgaaacagcaaaaagaaatacttcaaaaggtgaaggaaggtaatttagatattttaataggtactcatagattggtatctaaagacattcaatttaaagatttaggcttattaatagtagacgaagagcaaagatttggagttaagcaaaaagaaaagattaagggaattaagaaaaatgttgatgttttaactctaagtgcaactccaattcctagaaccctgcatatgtcgctaagtggagttagagatatttcagtcatagaaacaccaccagaagaaagataccctgtccaaacatatgttgttgaacaaaatgatcagcttataagagacgcaattcttagggaaataggtagaggcggccaagtttacttcgtatacaatagagtggaagatatcgaaaggatggctaagtatgttcaatcgttagttccagagagtaaagtcggaattgctcatggtcaaatggcagaaagacaacttgagaaggaaatgtttgactttatgtcagaagagtataacgtattagtttgcactactataatagaaactggaatggatattcaaaatgtaaatactataataatatatgatgcagataagatgggactttctcagttatatcagcttagaggtagagttggaagatcaaatagaattgcatatgcgtatttgctatatactaaggataaagtattaacagaagttgctgaaaaaaggcttaaagcattaaaggatttcactgaattgggctctggttttaaaatagctatgagagatttggaaattagaggtgcaggtaatatgatgggatcttctcaacatggacatatggcctctataggatatgatctgtattgcagaatgcttgaagatactgttaaacttcttaaaggtgaaattcaaaaagaacctatagaaacaaccttagatataaaagtagatgcctttatatcagaaaattatatagaagatgaaattcaaaaaattgaagtttataagaaaattgctgcaattgagggattagacgattatagtgatatcaaagaagaactagaagatagatactctaagataccagaacctgtgtataatttaatggatattgcttatataaagagtagagctaaatctatattcattgaagagataaaagaaactccaaaagaattattgttcaagtttgcacaaggtgaaagtgaatataaaaatatatttaaaatattgatggaaaaatataagaatagcgtagtattaaagtttggttcaaacccttatttcgcatttaaattaaaatatattaagaaggaaaataaattggagtttctgaaggaagttttcgatgacataatattgtaacaaatctatgatataaaagaaaagtagaagaaataaaatagtgtaaaaaatttgaattataaaagcaatattgatatactaatgttatgaatttttacagtaaaaaacctaaaagaataatatcgtccgacaaaaattaatttagcttttcaaatttcgttttataattatagaaagttttgtttaagtagaatttgaaaagtgattttagcttgtctaaattatatatatttatgtggaaagttattttttagtgggtttaaatctagaataagcgaggggaaaactttgaaaaaattaaaaaaatttgttgcagctttagctatggtgacaattgcggtatcagctatgggttgcaaaatgattgagaaaacaccagaagcgatacagaaaacagttcttgcaacagttggaaatgaaaaaataacaaaaggtgatttagataaagaaatggaaaagtatactgcacaactaaaacagcagtatggagataattatgaaagtaatgctcaagttaaagatcagttgcaacaagcaaaaaaacaggaattagatagcttagtaactcaaaaagtagtattacaaaaggctactgagttaaatcttaagccatctgatgatgatataaataagcaagttgatgatcaaatagctcaaattaaatcccaatattcagaagaaggacaatttgaaagtgttctagagcaaaatggattgactgaagatcagctaaaagatgttgtaaaaaataatgttataatgcaggctgttcaacaagatatagtgaaagatatagaagttactgatgacgatgttcaaacatattataatgaaaataaggattcaaaatatacacaaggagctggagctaatgcatcgcatattttaatagctgaaaaggctagtgatggatcaatagattatgatgcatcattaacaaaagctaatgctataaaatcaaaattagattccggagctgattttgcgaaattagctaaggagaactcaacagatgcagcaaccaaagataatggtggtagtttaggatttgtagcatacaactcaacacaattagttactgaatttatggatgggtttaagaatttgaaagaaggggaaatttcagcgccagtaaagagtcagttcggatatcatataattaaggctactggattaaaagactcacaagtaactccttttgaacaagttaaagatcaaataaaatcatcattattacaacaaaagcaacaagatgctttaagtgctaagattacagaatggaaaacagacctaaaagtaaaaacttatgaagataaattataatactaaaatataattaggtatctattaataatttagctatttaataatgaaagttaggactactttgaaatatctctgattattcaaagtagtcctatttttgtttctactatatgtattacattgaaataacagcatttatattaacaaaaaaataattaatataaaatttgtctataagtgtataaaatttctagaaattcaaataataatagtgcaaccaattaatagagttcaaaggaggttatataaccaatgaaggcaacaggaattgttagaagaattgatgatttaggaagagtagtaataccaaaggaaataaggagaactttaagaataagagaaggagatcctttagaaatttttaccgatagagatggtggagtaattttaaaaaaatattcaccaattgaagaacttactaacttttcaaaggaatattgtgaaagcttgcaacaagttataggtcatgtagtactaatagctgataaagatgcatttgtttcagtaagtggagcaccaaaaaaagactacatagaaagaaaagtaagcagtgagctagaaaagataatggacggaagaaaaactgtattattaaataaagctgataacgcagtaataccattacataatgatgacgatgaaacagagtacactagtcaagttatatcaccaatcatagctgaaggtgatgaaataggagctgtaattattctttcaaaagaagatggagagcttggcgaagttgaaacaaagctagttgagacagctgcagcattcttaggcaaacaaatggagcaataatacttataaataaccacattatgaaaataaaaggaataatacctccaaacttacaataataattaattagtaacatgtaagtttggaggtgttttatgaaaaaacaatccctaataagagggagcataattcttggagttgcaggaatattaacaagatttttaggtctattttttagatggccactaataatgttaattggagatgagggaattggatattatcaaatgtcatacccgctgtatatgttttttatagctatggcttctggagttccagttgcaatttctaagatgatatcagaaaagaatgcaacaaatgatatatatggaagctttgaagtaatgaaagaatctgctattttaatgacaataatagggacaggcacaactttagcgttattcttttttgcaaaaccaatagtattatttttgaagtgggatacaaaagcgtattattcattaatcggaatatcatttgcaccaattgtaatatcatttgtaactatatttagaggattctttcaagggctgcaaaatatgactccgtcagctatatcacagataatagagcagattggtagagtcatattcggtgttggacttgctgtatttttactacctagaggcatagagtactcagcaggtggtgcagcatttggagcaactgcgggagctgttcttggaggagcttatttatactcgaattataaaagagtaaagaaacgttatgccattaaaaaaataaaaagcaatccagaaatattaaatactatattaaagattgcaataccaatatcattaggtactacagtatcaagtattatgaatttaatagattccattttagtaccacaaaaactattagatgcgggcttcacaaatgtacaatcaactgtattatatgcgcaattaacaggtaaagcgtctgtaatcgtaaatattccattaactctttctatggctatttgtacatctctaattcctatcatagctgagaatttcatacttaagaagcagaaagagctaaaaggcaaaatagatgcatctatgaaaatggcatcagtaattgctattccgtgcacttttgggttattctttttagctgaaccagtaatgaagtttatatttccaggtaggtttgaaggaatagagatattaaaatatttatcattaacaattccttttataataattactcaaacaacaacagcaatactacaaggaacagggcattatataaaacctgttattaacctcctgattggatgtttgattaaaattgtattaacatgggtattagttcctatgcaaatgtttaacatatatggtgctgttttggcgagctttggagcttatttaacagtaagtattttaaatataatgatgatgaaatttacactaagagtaagacttaacttatacgaaatattaataaaaccttgctatgcatccagtattatgatgttaattgtattaataagttataatattttatataagaatacaattagtaatggaatatcttgcttgacatctatatttttgggtatgatagtatatattataatgataattgtattcaaggtatttaatgttgaagaaataagagatagatttaaaagaaagtaaaaaggagagaaattctaatgattaagatagtgggattaggaccaggaagtaaggatgcattgacaataggaacaataaatgaactcgaagcaagcaaacatatatttctaagaacggaaaagcatccaacagtagattacctgaaggaaaaaaatatcgtatttgatacttatgataatatttatgatagtatagataattttgatgaagtatacttaaatatcgcaaaagacataattaataagcataaaaatatgactgatttaatttatgcagttccaggtcatccattggttgcagaaaaatcagtatttaacttaatagaactatgtaaaaaaaatggaatagaatataaagttataccagcagtaagttttatcgatgcaatgattgaaagccttaagattgatcctatagaggggttaaaggttatagactcttttgacataagtaaccaaattttagacaaaagaataggaacaattgttacgcaggtatacaatcaattgatagcatcagaagttaaattaagattgctagaatgctataatgatgaaacagagatttattatgtaagagcagccggaatagacggtcaggaaagcataagaaagataccgttatttgaactggatatgcaggaggacatagattatttaacatctatttatataccaaaggatttaaaaaacaaaaaagactttaatgactttttagacataatagaagttttgagaggtgaagatggatgtccgtgggatagagaacaaacccataagtctcttaagaaggctttaatagaagaaagctatgaggtaatagacgcaatagatcaagatgatgataattcgttaatcgaagaattaggagatgtacttctacaagttgtttttcatgcatctattggaaaagaagacggatatttcgatataggagatgtgatagaaggaatttgtaataaaatgataagtaggcatcctcatgtatttaaagatgctgatggattgaattcatcagaagatgtattaataaagtgggatgagttaaagaagaaagaaaagggatataatagtgttgtagatgaactgaaaggaataacaaagggactacctgcacttttaagagcacataagattcaagaaaaggcaagtaaggttggatttgactttgaaaatatagattttgctgtaagtaaggtaaaagaagagttaaaagaagtaattgatgtatataatacagaaaatgtggagaaaatagaagaagaagtcggagatttaatattttcatgtgtaaatattgcaaggtttctgaaagtagacgaagaaatagcattaaattatactatagacaagtttataaaaagatttcagtatattgaaagagcagctaaggataagaatattgaattaacaagtatgactttagatgaaatgaatgaactatgggaaatttcaaaaaacttaggttaataggtaatttaaataaaggaattttctagtttatgaagaataataattttataaagaactactttgtaacgatttattggattatttagttatatataggaaaagaaagcgtttttctatagacgggtagctgaagaggttatataataaagaagtgcaatttagtacataaagaaaacagttagaaaatatgtaactggattttaaggaggatgttattgtgaataaagcagaattaattactagtatggcggaaaaaagtaaattaacaaaaaaagatgcagaattagcattaaaagctttaattgaaagtgttgaggaagcactagaaaaaggagaaaaggttcaattagttggatttggaacttttgaaactagagaaagagcagctagagaaggaagaaatcctagaactaaagaagttataaacattcctgcaacaacagttccagtatttaaagcaggtaaggaattcaaagataaagttaacaagtaataaaatacaagttagacagagtaaatatgaacccgagttttctcgggttcttttgaatggaggagaaattgtgaggctagataaatatttaaaggtatcgcgtattataaaaagaagaactgtagcgaaagaaatatgtgagagtggccgtatattaataaacgggaaagtagcaaagccttctacaaaaataaaagaaggggatataattgaaataacgtttgctaataaagtattaaaagcggaaattgctagtgtagtagaacatgtgagaaaagaagaagcaaaagaaatgtatattatccttgagggtgaagaagataaagagtagaaactatatagtttatctactctttatctatatatggggattgaacaaaaaagatttatgttaagtgaaattatcataaataattccacttaacagcttttaagaaataaattccactatacttaacttattaaaggttctaaattctaaaatgcaaaatacaaacatatattgtataagaaaaataaatggaggaatttttaatggagaaaagagtggaaaataaagtagaagataataaatcaagtttatctctagagaatagaaaaaaattaactttaagtggtgttatagaggttataagttttgatgagcaaaaaatagatttaacaactaatctaggaaatttaactatcaagggagaagagttaaaaatgaacaagttggatgtgcaaaatggtgatgttataattgctggaagcattgcatctatggtatataacggaaagatatctaagaaaagcaatgaaagcataataagcagattgtttaagtaggaatatagtatgcctttaggattgaatatgcagattaatcttgttatatgcagcttaattggaggtgttataacgggaatattgtttgatatatatagaggaataagaggattaaactctataaagatattaacaataatagaagatatgctattttgtgtacttattgctttgattgtttttacctttttattatatactaattatgcatttttaactccctatgtatatattttcataattatggccattatattatactttaaatttattagtaagtatttttataacagcgagatgctaattgcaaaattatcttataagttgattagaattttattgaaaaatttattatatccattaaaaataattgcatataaaattactgataaaaggaaatgataaaaaattacttgaataatactaatatagtgtttacaatagacttaagagaatttgcaaaatagaggttcttatagatgaaaacgaagttaatattaaagcggacaataattactggatttattattttctttgtctttagttacattaggcaaagtatgacaatgaatagaattcaaaaggaaattgacagtaaacaagttcagttaaatgaaattaagcaaaaaaacgaaagacttcaagatgaagttgataaaattaattcaagctcatcggattatcttgaaaaattagcaagggaaagacttgggatgattaagcctggtgaaaaagttgttaatggtgagataacaaatcaaaattaaatttcaatttatagaaaaacttataaaactctggtaatattatagtagctaaataattaaatttgtattctaaattaaagagcatctgcacagcagatttgttcttataaatttatatatttttaaatttaaggaggagtcttttaaacatgaccttaatggcaggaaacatagtagagggcacagtgataaacatcacaaactttggagcttttattgaagttgaaggcaaaactggattagttcatatttcagaagtggcagattcttacgtaaaagatattagagaacatcttagtgagcaagataaagtgaaagtgaaagttatctcaattgatgataatggtaaaatcagtctttcaataaagcaagcaaatgttcaaagaaaatcggttaaaccagcagagattgattggaaggcacctgataagaagaaaactactaattcaggaaatttcgaagatattatgtctaagtttctaaaagatagtgaagaaagaatgcaagatgtaaagaaacatcaagaatttaaaagtaaaggtggaaaaaaaggctactaaaaatttttaaaatctttattaggaaaataaatataaaatttgcttgataaatttcaaatgtagaatagatttgtagagaaatttttatatttgtttacagtttattctgcattattaagattataaatggatatttatagtgcttaaaacttgtgatttactgattattgcaattaaaattttaaatatataagattaataaaaaaatattgttgacactaaaaagaatatgtattataattagctttgtcgttggcacttagtttataagatatgccgaagtggcggaactggcagacgcacaggacttaaaatcctgcggtggttaaacaccgtaccggttcgattccggtcttcggcaccatgtatatgaaaaaaataatatcgcggggtggagcagttggtagctcgtcgggctcataacccgaaggtcgtaggttcaagtcctgcccccgcaaccattgatatggcggaatagctcagctggctagagcactcggttcatacccgaggtgtcgtaggttcaagtcctatttccgctaccaatatgtgccgaagtggcggaactggcagacgcacaggacttaaaatcctgcggtggttaaacaccgtaccggttcgattccggtcttcggcaccatatatatgaaaaaaataatatcgcggggtggagcagttggtagctcgtcgggctcataacccgaaggtcgtaggttcaagtcctgcccccgcaaccataaatatggcggaatagctcagctggctagagcactcggttcatacccgaggtgtcgtaggttcaagtcctatttccgctaccaatatgtgccgaagtggcggaactggcagacgcacaggacttaaaatcctgcggtagttaaacaccgtaccggttcgattccggtcttcggcaccatatatatgaaaaaaataatatcgcggggtggagcagttggtagctcgtcgggctcataacccgaaggtcgtaggttcaagtcctgcctccgcaaccataaagtttagtaagctttgttatcaaagctttaacttatatgtcgtgaacttgtaggatacaatgaatatgccgaagtggcggaactggcagacgcacaggacttaaaatcctgcggtagttaaacaccgtaccggttcgattccggtcttcggcaccatatatgaaaaaaataatatcgcggggtggagcagttggtagctcgtcgggctcataacccgaaggtcgtaggttcaagtcctgcctccgcaaccataagacttaagcagtagctcaggtctttttttgtttggaaaatatttattatatgaagtataagataaaggcataatattatgaataaattcctagccagtgagaagaaaactttagcatctatttataatgctaagaatgagatatttaaagtttacttttctaacatggtgtttaaattagttatagatagaagtttaatatgaatgtagatgactacacttatgttaggctttttttagtacttaatattttgagtactgtaagttaacttgtcataagattgattaccgaatacgaattttggtcacttaagccaagaaaatccgagaataatcgtaaaaaatattattttaaggagtaattaaaaagtgtattcacgatttataattttatgaaaaatattttatatataaatttctaataaaatgagattaacgacaaattaattataacgttctaagtttaataattagccagatatcttgatttaccttgactaagtatgatattagatcaaaatgtaataaagaaaataatctattaaatcattagatattagagaaatatagatgaagttgtcctacgaaaactttatacgataaacaccttatgacatttatcgtaaggttatgatgctataatcaaattacattatttggaaatgaggcgagctaatgtgcagtatggattagggttggataagtatgaaggaataactagagtagaaaacttaagaaaaaagttatggatgaaaacatctatagtgaagttagggattattctaatttcaggaatcttgctcggtagagtaaatttattattaaatcaatcagatagtcttggtatagcgccaataggaattgcgtatttgatagctgtagttacaaaagagaataggagaaatagtttaactgtggcgataggaatcgctataggatatctaacaataagtagtttactgacagacggttatgtatatttagtagctgtagctttagttacaatttactatgtgtttatagcaccagctaaaaatagaaaaaaggaattagtaggttttgtaataattctaagtagttttttttgttatggtttactagttaataaatatgaacttggcgtaaatataactttatgtttaatacagacattaattgtattgcccatatattatgttataaagtatgcgttaaattctttggaagaggttaataccaattacttcttttcttcggaggaaatagtaagtattggaatatttttatgtttattagttgcaggaataggtaatataaatattagtaattactctataagaaatatatgcgcacttacattagttttgacgattgcgtatgtaggcggtgcaacatatggaactatgattggagtttctatgggtataatgcttggagttgcttcaaatgacatgatgtatagtgtagccttttttggagttggaggcttaattgttggcatatttaaagatactgggaaaatattttcaatactatcaggtataataatttatactgcattagctttgtactctaatgcagtaacattgaagttgggagttgaggttcttactagttctgttttattcttgtgtgttccaaaacctgtatttacaagtattgaaattgagataaatccatatagaaagaaagcatctttaggcgaaattcaattaaatgcaataaaggaggaatttacttttaaattaaaagagcttacaagtgtacttacaaatgtatcaagatgcttattaactaacaatgataatgaaaatttattgattaaatcgaaagggagtgcattagtagaaaacttggcagatagaagttgttcaagctgtgaaaataggcctttatgctgggaaagagagtttcatcaaacatttaattcttttcaaatgttaattcaaagtaaggaggagggcaaattagcaattcctatggatttgcaaaaaagatgtatcaaaaattttacacttttaaaaaatgcagaggggattgtaaccaattataatgtaaatgaatcaataaaggaaagattagcagaaggaagaaatatattatcatcccatataactaacatatcgtgtactttagataatcttcttaatgattttaaaaaggaggttagaatagatactgatttagaaagattgacgaaacgtatactgaataaaaactccatatattacaatgatattttttgctatatagataaaagcggtagggttaagattagattaagtgtaaataattgcgaaggagctgattattatggaaaaaacatagtttctctattgagcagtgctatgagaatgaaattatgtattggggatgatggttgtaaaataaatccacagacaaatgaatgtattataacgatagaggaaaaaccaaagtattatatggtgtcttatggtgcaatggaaccaaaaggtggagaaactcaaataggtgatagttatagttttggaaggacaagaaatggaacgtatatgacaattctaagtgatgggatggggtctggaccagaggctaaggaagaaagcaaagcaactgttgatttggtagaaaagcttattgaagcagggttcgatgaagatataacggtcaacacagttaattctataatgggaatgagattttcggaagatgaaaaatatgcaactttagatttaaatagaattgacttatataatggtaatgcaatatttgtaaagataggcgcagcacctagctttataaaaagaggccgtgatgtaatatctattaattctaagaatttaccttttggacttgtagatgaagtggacgtggaagttataagagaagtgctacgacctggtgatattttaattaatgtcagcgatggtattttagatatagataaatcaaactcgggagaatcaacttggattgaagaatatttaaagacaattaattcagatcctagagaactgtcagaaaaggtgttagaaagagcgaaaaaattaagtaatggaacaattaaagatgatatgacagtagtagtttcaaaagtttatttagatagctaagattatcatgcaataagttattaaaatattataaatagctgtttcaaaaatttaaatcgtaagttaaatttgaaacagctatttatatttgtttcatatttaagtaaataaataagattgtttttaagaataatgttatatttatatagaatgagttttgaactgttaaattgaagcaataatgtttacatttagaacatatatacgtaaaatataagaagcggaattgtatatgacataataataaataagtaggagtgttatttttgtatagaaaagtactgtcttatataaaagacaataaccttattaaacccaatgataaaattttgattgctctttctggaggaccagattctatatgtcttttgaatgttttatttgagctaagagaagaattaaatataagtatagctgctgcacacttaaatcatcttttaagaggcgaagatgcatttgaagatgagagatatgtcattaatacatgcaatgatatgggaataaaatgttttgtcaaacgtgtagatattaatgcttattctaaggaaagtaagttgtcttcggaaatggctgggaggaatgctagatatgatttttttgatgaaatcttagaaaaagaaggctttaataagattgctactgcgcataatgcaaatgatcaggcggagacagtcttatttaggcttatgagaggaacaggccttgaagggttgggaggaattagggcgtctagagatgataaaataataagacccattttatgcttgagtagagaagaagtagaaaactacgtaaaactaaagaacttaaatccaagaattgataaaactaactttgaaaaaatttataatagaaataaaataagattagatatattgccatatatgaaagaaaattttaatgaagatatagtacagactttgaataggatgtctacattattgcaaaaagataatgaattccttgaaaaattatccgctggtttatacaataaatattgtatggaatgtaatgattattttataataaaaaaggaaatatttaaagaggaagaatctttggttaatagagtattaaggcatgcgttaacaaggtattcaaagtctaattacgattttgaagttaagcatatatatgaaatatcttgtttggctcaaaagtactctggaaagttagtgcatcttccaaatggagtttgtgctgaaaatgtttatggagatatatacataaaaacaaagacaaaaaaatcagatataaatagtaaaaaagaagaaataattttaggtaaagataacatatatataaatacagttgagtttcataagtatgttattcaattttctataattaatggttataatgaaaattctataaacttaaagcaaggagatttcgttaagtattttgattttgataaaattaataataatatttcaatacgaaatagaaagaatggagataaaattattccactaggaatgagtggtagcaaaaaattaaaagatatttttattgatatgaaaattcctaagaatgaaagagaatgcatccctattttatgctttgatgaaaggattgcatgggttattggaattagaatctcagaagaatataaacttacaagtaaaagtacgaatatattaaaagtagtcgttcaaagaaaggaatattaaatatgaaacaagatatacaagagatactatactcagaagaaattttaagtaagagaattaaagaacttgcaagtgaaataagtacagattatagaggaaaagatttacttatagttggtattttaaaaggatcagtaatatttgctgccgagctaataaaaaacatatctattaaatgtgaaatagattttatggcagtttcaagctatggaagttctacagaaacatctggtgtcgtaagaatattaaaagacttagataatagtatagaaggaaaagatattttagtggttgaggatatcgttgatacaggagtaaccttaacatatttacttaaatatttaaaagcgagaaaagcaaatagtatagaaatagttgcattactaaataagcaagcgaggcgtaaatctgatttagatgttaaatatattggatttgaggttcctgatggattcatagtaggttatggaatagattatgctgaaaaatacaggaatttaccttttatagggatattaaagcctgaagtatatgaaaaatagaaagttcaaatttaattgtaataaaaatattcctatggtaaaattttaaatatgatgagagaggggggccttgaatgaaaaaatattcaagtgcggctgtatggattgtatgctcagttatgctgattttagcagcagttactatgtggcaaacaggaaaaggttctaatgagataacttatagttcatttatacaaaagtggaattcaaatgaaatagaaagtatcttagtcaaggaagacagcatgactatagaaggaaaaactactgataataaaagttttgttactattgctccgggtgaacttgttagttcgcttatagtaaatcagcctaaattagatgttaaagtcgtttttgagaaaccatctaataatgcaacgtggatagcaacattacttccatttatattaatggcagtatttatatttatattcctatttatatttactcaacaatcccaaagcggaagtggtggaagaggggttatgaattttggtaaaagcaaagctaaaatggtaactccagatacacaaacagttacatttgaagatatagcaggtgcggatgaagagaaagctgagcttgaagaaattgttgaatttttaaaattgccatcaaagtatatacagataggcgcaagaattcctaaaggggttttattagttgggcctcctgggactggaaaaacattacttgcaaaagcgatagcgggagaggcaggcgtgccattctttagtatatcaggatcagattttgttgaaatgtttgttggtgttggtgcatcgagagttagaagtttatttgaagaagcaaagaaaaattcaccttgtatagtatttatagatgaaattgatgcagttggaagacagagaggtgcaggcttaggtggaggacatgacgaaagagaacagacattaaatcaacttcttgttgaaatggatggattcggtgctaatgaaggtatcataatgatagctgcaacaaataggcctgatatattagatccagcgttattaagaccaggaagatttgataggcaaataattgttggagctccagatgtaaaaggtagagaggaaattcttaaagttcatacaagaaagaaaccactaaatgatgatgtgaagttagatgtgcttgctagaagaacaccagggttttcgggagcagatttagaaaatctaacaaatgaagcggcattacttgctgttagaaaagacaaaaaacaaatttctatgtctgaaatggaagaagcaataacaaaagtaattgcaggtcctgagaaaaagagtagggtaataactgaacatgataggaaattaacagcttatcatgaagcaggtcatgcagttgttatgagattgcttccacactgtgatccggttcatgaaataagtgtaattccaagaggtagagctggtggatatactatgcatcttccaaaggaggacacttcttatacatctaagtctaaattaaaagatgagatggttggactcctaggtggaagagttgctgaaagattgattatgggagatataagtactggtgcaaaaaatgatatagatagagcaagtcatatagctagaagtatggttatggattatggtatgagcgaagaaattggaactatatcatttagtacttcagggcatgatgaagttttccttggaagagacttaggtaaggggagaaactttagcgaagagataggttctaaaatagataaagaaataaagaaatttatagatgaggcttatgatagagctaataagcttctaaaagaaaatataaacaaattacatgctgttgcaaaagctttaattgaaaaagaaaaacttgatgcagaagaattcgaagatatttttgtaaataattaatacacaggctatttcaggcacaaaatgggtttgaaatggccctttaattttttatatgtagaatcatagaatatttatattaatacgaatattcggagtctatttatacttattattcgaaaaaaacttttattatgtatagtgaaatgatataataaattatattaagtatgattttgggtttatatttaggagggattttaaatgaaaagtgatattcagattgctcaagaggcaaagatggagccgataaaaaatgtggctgaaaaattgggactttgcgaagatgatatagagtactatggaaaatataagtgtaaaatatctttagatgtatatgataaggttaaaaataataataatggaaagttagttttggtaacagctataaatccaactcctgcaggagaaggaaagtcaacagttacagtagggcttggtcaggctttaaacaggattgggaagaaagccgttatagcattaagggagccatcattaggaccggttttcgggatcaagggtggagcagctgggggaggatatgctcaagttgttcctatggaagatatcaatcttcattttactggagatatgcatgctattacatctgctaataatttgttatctgcagcaatagataaccatattcaccaaggtaatgttttaagaattgattctagaagaattgtatttaaaagagtaatggatatgaatgatagagcgttaagacatatcattgttgggatgggtggaaaggttaatggatttgttagagaagatggattcaatataactgttgcatctgaaataatggctatattatgtttagcaagtgatctagaagatttgaaagaaagaatggggaatatagtaattgcatataatttagatggaaatcctgtttatgctaaggaactagaagtacaaggagctatggcgctactaatgaaagacgcgattaagcctaacttggttcaaacattagaaaatactcctgcattaatacatggaggaccatttgctaatattgctcatggatgtaattctataatggcaactaagcttgctttaaagttgggagatgttgccataacagaagctggatttggagcggatttaggtgcagagaagttctttgatattaaatgcagatatggtaatttagaacctgaatgtgttgtagttgttgcgactataagagcattaaagcatcatggcggagtagctaagacagaattaaatgttccaaatgttgaagcattaaaagatggaattgctaatttggaaaaacagatagagaatataaagaagtttaaaattacacctgttgttgcaataaataagtttgttacagatagttcggaagaagtggaattcattaaggatttttgcgatagaattggggttaaagtagcattgtgtgatgtgtgggctaaaggtggtgaaggtggaattgaccttgccaatatagtgttagatgcactagagaatagtgaatcaaattttgagcctatatatgataaggaaaaatctattagagagaaaatatttacaattgctagtgaaatttatggagcagataaagttaattatactccagcagcaaaaaaacaaattgatgaattagaaaagttcaagttggataaacttcctgtatgtatggcaaaaacgcaatattcactatcagataatcctagccttttagctaggcctacaggatttgatattacagttaaagaagtcagagtatcaaatggagctggatttatagtggttcagacaggtgacataatgactatgcctggccttccaaaggtaccagcagcaaataagatggatgtattaaaaagtggagaaataataggattattctaatgaatgcatatatgtgtatttaagttgaaaacagaagctagaaaatggtggtattaatctaaaatcacatttaaactcttgacaaattaaatataattgttaaaattatattgttattttttagtcaatttcaaaattaaggcagctcttcgggctgcttttaatttaactatattaaggtggtgctttctatgattttacttgttgatgcaggtaatactaacattgttttgggagtacataatggagaaaggtatatagctagttggcgtatttcaagtgaaggaaataaaacttcagatgagtatggtatacaagttatgcaactatttaacttaagtgacattgatcctaaaaatattactggagttatagtttcttctgttgttcctaatataatgcattctttagaaaatatgttaagaaaatgtttttgtcacgaacctataatagttggaccaggagtgaaaactggaataaatattaaatatgataacccgagagaagttggagcagatagaatagtaaatgctgttgctgcatatgaaatttacaagagaccagttataataatagactttggaacagctacaactttttgtgcagtaagagcgaatggagattatcttggaggatgcatatgccctggaataagaatttcggcggatgctttatttgaaagagcagctaagcttcctagagtagaattagaagtaccaaaaaatatgatttgcaaaaatactgtatcaagtatgcaatctggtattatatttggttatattgggcaagttgaatatatagtgaaaaaaatgaaacaagaaatgaaaaattctaagtataaggaagaaccttttgtattagcaacaggtggattagcaaatttaatagctaaagagactgatgttattgataaggttgattcggatttaacactagaaggattaaaaatattatatgaaaaaaacaaagaaatagagatttcccaaagataaattatatggaaattgagatttatacaagatgtaaggagtatattctacaatgaagatagggaatttaacctttgaaaacaatatatttctagcacctatggcaggagtaactgacatatcatttagaggattatgtaaggaaatgggatgcggtttggtttacaccgaaatggttagtgctaaagcattatattatggaagcgagaatacacaaaccttacttagaatagcagatgaagaaaaaccagttgcggcccagatatttggtagagagccagatgtgatggctagaatttgtgaggaatatttaaataacagggaagatatttgtataattgatattaatatgggatgcccagctcccaaaatagttaaaaatggagagggatctgcattaatgaaagaaccggaacttgcatacgatatcgttagaactataaaaaaagtttcaaccaaacctgttactgtcaagtttagaaaaggatttgatgaagataatattaatgcagtagaatttgcaaaagggatggaacaagctggagcagatgctattgctgttcatggacgaacacgaaaacaaatgtatcaagggaaagcagattgggacataataaagagagttaaggatagtgtttcaattcctgtaataggaaatggagatgtattttctccagaagatgctatcagaatgaaaagaactacaaattgtgatggaataatgattgcaagaggaagtcaaggaaatccatggatatttagacagataaataatttgcttaatggagaagtaattcaagaagtttcagataatgaaaaaattgaaatgtgtattaggcattacgaattagcaataaaatatgatggggaatttaaagcgataagagaaatgagaaaacacgcatcatggtatattaaaggacttccaagatgcacagaacttaaaaataagattaatactataaatgatagtgaaaaagttattgaagctttaagaaaatatcaagatgaattatagttttgtaagtataactagaattatttaattgtttcaagcatattattaatatttagaaaaatgtaatttggtttaataataaatctagtataaatatgagtattaatttttgtgtaaaaattataatttatgttttactaatttacttttatattaatatttaaactaggtttatttaatgtttgattcacagcaatcatagctatgagtaaagttgttccgaattagttgctaactaatggagcgaattgcttcaaattaggatttattgacatatgaaatgtgctgatttataataagttaaatgattttcagattaaaatatttttcaaattattataaatttgtaggtactctctgttaacgatataataagagattgcttaaaatatttatttaatagataatttatcaaaataaagattataatcaataactaaaataaataatatagaaggttttaaaggggagttaaagtatatgagccaatcaaaacaatatgttatgacttatgaaggtgttaaaaaattagaaagtgaattagaatatctaaaaacagtaaaaagaaaagaaataactgaaaagataaaaattgctttaggatacggagacttaagtgaaaattctgaatatgatgaagctaaaaacgaccaagcatttacagaaggaagaataattcaattagaaaatatgcttaaaaatgcagtggttgtagatgagtcagagattccaagtgatattgtttcagttggatcaaaggtaaaagttaaagattatgaatttgatgaagaagtagagtattcaatagtaggttctgcagaagcggaccctatgaattttaaaatatcaaacgaatcaccggttggaaatgcactagttggtaaaaaagttggtgatgtagtagaggtaacagttccagacggagttaataaattcgaaatactaggaataagtagaagttaattggaggtacagcaatgtcaacagaagaaatgagcatgcaagagttagagtctcagtataatgaacaggaaggattgagaagagctaaactagcagagctacaaggtgctggaaaggatccttttgatgtttataaagtcaacagaactcatacatcagaggaagttaaggcaaattatgatgcactagaaggtaaggaagtaaccgttgcaggaagactaatgtctaaaagagggcagggaaaagttgttttctcagatatacatgataaggatggtaagatacaactattcttaaagattgataaggttggggaagaaaatttaaagcaatataaaacttttgatttaggtgattggattgcagcaactggagaagtatttacaactaaaacaggtgaagtatcagtaaatgtaaatacttttgagttgacttgtaaatctttaaagccacttccagaaaaatggcatgggttaaaggatccagatttaagatatagacaaagagaagttgatataattacaaatacagaagttaaggatacttttattaaaagaagtaaaatcatttcagctataagagaattcctagatgctaaaagctttatagaagtagaaactccaattcttggagcaatagctggtggagcagcagcaaaacctttcattactcatcacaatactttagatatggatatgtatttaagaatagctacagagttatatcttaagagattaatagttgctggttttgaaaaggtatatgaaataggaagaaattttagaaatgaaggtatgtcagtaagacataatcctgaatttacagctatagaattatacgaagcatattctgattataatgacatgatggaaattacagaaaatatggttgcatatatttgtgaaaaagtaaatggaactactaaggttgcttatcaaggtacagaaatagactttaagccaccatggagaagaatcactatggttgatgctgtaaaagaatatgctggagtagatttcaatgaaataaaatctgacgatgaagctcaaactatagcaaaggaaaaacacttagaatttgctaaaccattaaatacagtaacaaaaggtgaagttttaaatgctttatatgaagagtttggtgaagcaaatatgattcaacctacatttgttacggattatccagttgaaatttcacctcttacaaagaagaagagaggaaatcctgaattcactgaaagatttgaaggctttgtatttggtagagaactttgtaatgcatactcagaattaaacgatcctatagttcaaagacaaagattcgaacaacaagctaaagagagagaacttggagatgacgaggcatatatgctagatgaacaatttatgagtgctcttgaaacaggtatgccaccaacaggtggaatgggaatgggaatagatagacttataatgttcttaactgattcagcttcaatcagagatgttatattattccctacaatgagaccgcagaaataatttgatacagttaaagtaaatagattatatttatttctataaaaggttctatatgtataaaaggcatatatgaaccttttattgttgttgatttaaaaatgaaatataagaaacataatttgaaatcaggaactctataataagttcagaaatattttattatctgcataaatatttataggaattagtatttcttctggataataagaaagaaaagctataagtatttctgaaaactacaaaagtaaataaaatataaaaaagacttgcataatctaaaaaagctgatataatagattaagtaatgacgttccgcgatagctcaatggtggagcactcggctgttaaccgataggttggaggttcgagtcctcttcgcggagccatttttttatattttttagaatagtattataagttataacatgtactttggaagcattgttatagcttttttattccatatgaatttatactaaatttaaatttgtgaacattgttactcttgatggcataagttatggaaatacttactcggagaatcacagtttgtaaagagaatgaaaaaatatattagcctgtcgaatttttctcacacacatttgaaaaagtagatgcgcaaaaatctacagtttcacaatcgcttgagattttattctttccaagttttataaagatgaattaggaatatataatatgtattaattctaaaatgtaaatgtaatttgataattttgatagtatagagatataaatttgatattttgctaaaaaagggttgcataatttaaaaaagctgatataatagattaagtaatgacgttccgcgatagctcaatggtggagcactcggctgttaaccgataggttggaggttcgagtcctcttcgcggagccatttttttttattttatttagaatagtattataagttatagcatgcattttgaaagcattgttatagctttttttattccatatgaatttatactaaatttaaagttgcgaatattgtaactcttgagggcataagttatggaaatacttactcagagaatcacagtttgtaaagagaatgaaaaaatatattatcctgctgaatttttctcacatacatttgaaaaatcaggtgggtaaaatctacagttccacaatcgcttgagattttgttcttttcaggctctataaagatgaattaggaatatataatatgtattaattctaaaatgtagatgttatttgataactttgatagtatagagatataattttgatattttattaaaaaagggttgcataatctaaaaaaactgatataatagattaagtaatgacgttccgcgatagctcaatggtggagcactcggctgttaaccgataggttggaggttcgagtcctcttcgcggagccatttttttatatttttttagaaaatattcagacttgacatataaaatgattttgttaaaattaatttataaattaaatacacatgttgaaaaagaaaagtaatttataagtcagttgaagagagatgatgtttggtggaaatcattattggttataaatgaatggagcttttgagtgtgaggaaatcgatgaagaaagatgggcttaagccaagaagggtggaaccgcggaattatatttcgtccctttgtgcttaaagccttttttattttataaaaatatatttggagggataaaacaatggcagtagaaaaaacaatggataagattgtggctctttgtaaaaatagaggatttgtatttccaggctcagatatatacggtggtctagctaattcgtgggattacggtcctttaggggtagaattcaaaaataatgtaaaaaaagcatggtggaaaaaatttgttcaagaaagtccgtataatgttggattagattctgctattttaatgaatagagaagtttgggttgcatcagggcatgttggaggtttttcagacccattaatggattgtaaggaatgtaaggcaagatttagagctgataaattagttgaagatcatatgacagaaaatggagcagaagtagcgacagctgatggatggactaacgaacaattgaaagaatatattgaaagaaataacatagtttgtcccaaatgtggaaagatgaactacacagatataagaaagtttaatcttatgtttaaaacatttcagggtgttactgaagatgctaaatcagaaatgtatttaagaccagaaacagcacaaggtatttttgttaattttaaagcagtgcaaagaacatcaagaaaaaaagtaccatttggtatagcccaaataggtaaatcttttagaaatgaaattacacccggtaattttactttcagaacaagagaatttgaacaaatggaattagaattcttctgtaagcctggaactgatttagagtggcacaaatattggaaggactattgttggaacttcttgctaaatttgaatgttaaggcagaaaatttaagaatgagagatcatggagaagaagagttatctttctactcgaatgcaacttctgatatagaatatttattcccatttggttggggagaactttggggaatagcagatagaactgattatgatttatctaaacatcaagaacattctggccaggatttaagctatttagatcaaacaactaatgagaaatatgttccatatgttatagagccgtcgttaggtgcggatagagttgctttagcatttttaattgaagcatatgatgaagaagagttagaaggtggagatgttagaactgtaatgcatttacacccagcattagctccgtttaaagcagcaatattgcctctttctaaaaagctatcagaaaaatctttagatatttatgcggagttaagtaagaaattcaatcttgatttcgatgaaacaggaagtataggtaagagatacagaagacaagatgaaattggaactccttattgtataacaatagatttcgatacattagaagatgagtcagtaacaattagaaatagagatactatggaacaagaaagaattaaaataagtgaaatagaaaattatatccaagcaagtttggaattttaggattatacctaaacaaaaactgattcaagataatttcttcttgggtcagtttatttttttgttgcaagtgttataattaaaataacgaagaacaaattttggcaataatatatacgatggatagagatttaaatttggaggataaatcatgaagaaagattttaatgagtttaaggaatttatagtgggtaagaaagttggagttgttggaattggagtaagcaatattccgttaatcaattttttaatagatttaggtgctgctgtaacggcttttgataaaaagagtttagaagaacttggagacgttgcagaaggatttaataaaaggggagttaagctggagcttggagaaaaatatctagataacttaaaagggtttgatgtgatatttaaaacaccatcaatgaggattgatagtgaagcattagtaagggttagaaaagaaggagcatatgttacttctgagatggaagagtttgttaggtatacaagaggaaaagtctatggaataaccggtagcgatggaaagacaacaacaacaacaattatttctaagttactagaaggtcaagggtataaaacatgggtcggaggaaatataggaactccattattttcagaaatagaaaacatacatgatgaagataaagttgtattagagttatctagctttcaacttatgacaatgactcaagaaatagatgttgcagtatgtacaaatttatccccaaatcacttagacatgcataaaagtatgaaagagtatatagatgcgaaaaagaatatctttatatatcaaaattcaaatggacttttagtagtgaatagagaaaacgaaattacccatggatttataaaagaagcgaaaggaaatgtgaaagagttcagttcaaaaagagaactgatagatggggcatactataaaaatgggatactctatcttgaagacaaggaagtttgcaaaaaagacgatatcgtaattaaggggatgcataatgttgaaaattatcttgcagcatttttagcaacaaaagacgatgtctctgtggaggtaatgaaaaaagttgctgaaacatttgctggcgttgaacataggtgtgaacttgtaagagagatagacagagttaaatattataatgattctattgcttcaagtcctacaagaactttagcggggcttagagcatttgatgaaaaagtaatagttattgcaggagggtatgataagaatataccttttgaacctttagcatatgaggggtacccatatataaaagaattgatccttatgggagcgacaaagcacaagatcaaagatgtttttgataatttagaaaatgaaaaaggaattaaaattaatataaatatggttgagtctttggaagaggcagtaagacttgctgaaagcatagcgaatccaggcgatattgtcactctatcacctgcttgtgcatcatttgatatgtatcctaattttatgataagaggtaataagtttaaagagatagtgaagtctttataagttcataatgcaagaaataggagataagtgtttagttataaatacttatctcctattttgcattaacttttagaagaaaaatctttgaagtatatattattcacatttatacttgggctatagaatatacctgaggtagtcaaataatattcatttataccctctgatatctctggtttagaggtagcggttgaattttttaagtctactgatagtgagtataagttatttgagtcactgccgttaataaaatatatggatttatctataatttttaactgaaatccattcattatggaaattctcttgcagcttaatgtagatgggtctagtgagtatagattgttgttatcagaagaattgaaaaaaagtaactgcccatcaaaaactataaagctattagctgtgtaatcggtaagcttttgtctattactaccatccgtttttattgaatataattttgagttatcacttaagttttgatacacaataaaatctccattaattataaaagagcctacactatcaggacataccaatgagtgttctgatgttgatgtattatatttgtaaatcctattttcgttatttttatttatgtagaataattctgaattagaagctattaaattatttactgaatcgtcattcaactttgtgtaagttttatcagaaatgttaaatgaagataaagcattattatctgaaccatttgaaaaataaatcatttgattaattaaggtcatattatcagcagaataatttgcaaaatcagtaacgctcttactttcgagaatatctttaggcaaaggagaaggaataattgaaattctattattctcatcgggatttggaaatattaagttgttaccattaaaaaggaatggacaaaagtatgaagagctactagttaagataaatgaattaggctcagttgcatccattgcttgggtattttgtacttgtattgatgttttggaagggggagctgtctgtgagttggatggcgaagcaatgttgcttgagcatcctataaaagaaaacatggtaaatggtaaaatgaaataaaaaattcctctattcataattaaaatctcctgaaactaaaattatatataatagtatttatagataaataggaataattaattattaagtaattaattatattctattatatattattaatattagagtagattcctataacagtaaaggcgttgttatatgtttttgcagggtttttatagaaaataattgaaataatacgattaacacttccacgtgtgtcctatagtgtaataaggagtatttgttaggaaaaggcatatatattattgtaattcttaataacaatggatgtagaggtaatattatataaaaaacatgatatgattatattcgttgtcacgagtaattgatggacaacagataagaaattagttaaaaagttttaaataattagaaaaaatattaaaaataattattgacaacgatagctaatgatgttatcataataaagcagtcaagttgactgagagatctttgaaaattgaacagaatttgataaatacatttaagtaaaccagcaatttttatttgagtaagctaagattaaactttttattgagagtttgatcctggctcaggacgaacgctggcggcgtgcttaacacatgcaagtcgagcgatg

SEQ ID NO: 36 - DNA, 50971 bp, Clostridium beijerinckii
ttcctttttcctgatcataatctgctatagttaaaggaattctttcacctttttcatcattttttataataataaattgtccaggctttgcagattttgctactcttggagcttctatatccattgaaaatatattatttgttagctcctttttgttcactattttatacatttacgttcctcctaatttaaccaagtaaacttgattcagatgatttttatattcatctgaatcttagcataatttttgttcttgcgagaatatactttatctataagtattatttaatatctttattgctaattgcaaattccatatagattaagatttagatacaagttctttgtctggagatactaatatcttaacatgtttcttcttttctggacctgttaatgctccgaatccttcttcaactatatcatctaaatgtattttcttagttacatatccttctgcttttattcttccatctttcatttgagccatagttgctgggaattcatgtctgtatgctaatgttccaatgattttcttctcagtaaatactaatacattaggattaaatttaacatcattttcccatatgctagttacaactaaagttccttcaaactttaagctatctatacctgtatcaaaacctatttgagctcctgtagtttcaaacgccacgtcaactcctaatccgttagtaagcttcttaacttcctctgctatatttacttcattaggatctaatactacatctgcccctgctcttttagcatactcttgtcttatagattttctttgtaatactattattaattttgcaccagctgcttttaagcactcaatagttgctagtcctattggaccagatcctagtactaacgcagtatcccctgttctaaaattaccaattctaattgaatgtaatgctactgccattggctcaactaaagcagcttgttcgtaagacatttcatttggaatcttatgtacgaattcttctgggaaaactgtatattcagcaagtcctccaccacttccacaaagtccatggaaacctaatgatgaacataaattatattttccttctaagcatgctggacattttccacatgcaactataggttcaactattactctatctcctggtttaaaattctttacattaggaccaacttcaacgacatctcctgaaaattcatgtcctaaaactactggagcagttgtaccacttaatgggtgaggttgtcctactggtataaatataggtcctcctaaatattcatgtaaatctgatccacatattccacaccattttactttaatctttacaccattaactgtaactttaggttcttcaatttcctctactctaacgtctttctttgcataccataatgctgctttcatcttaaaactcctccttggataaattgttaattaattcacatatatttattaagcaatttccatgccaagttatgattaagattatatttttttgcgttatttaggttgtttgcttgatataattttattttacctattatttatatatgatttcatatataaactattgaagtataaaagaaaaatgtatcaaaacgatacattttattttctcattttgatacacagatttttcttttctcattttgatacatctatatgatatttttttatctttctatataaagttgctctacctatacttaataatttagatgttagttgaagatttccatcacatttttttatagcatcccttatagcattctcttctaataaatcaagaggaattattttaatctcctcttgatttagaggttcctcattcaaagtttgtgtcatattattgtaatctaaattgtttatatctatattcatcatttcatcttcactcaagtaataatctcgttcaacaacattcttaagttctcttatatttccgtcccaatcatatttctttaacttatcaatatattccttacttacagttataatcttatttttgttttttatgtttagcctttgaacaaaatcatttacaagtacatctatatcatcttttctttctcgtaatggaatagtctttatttccattacacttaacctataatataaatcctccctaaaatttttccttcttatttcatttttcaatattctattagtagcaccaataactctaacatttagttgtttctcataagtcccaccgactctaacgatctttccattatctaaaaccctaagaagcttactttgaatatctaatggtagctcaccaatttcatcgaggaaaattgtccctccgtctgctaattcaaacttacctggatgcccttcttttgatgctccagtaaaagcacccttttcgtatccaaataattcactttcaactaattcgctaggtattgatgcacaatttacagcgacaaacggacctctagccctatcactataattgtgtattgactgagaaatcaactctttaccagtaccgctttctccttgtattagtatattgcagtcactttttgaagcctttttagcgaaggctatcatatttgccatctctttgcttgttgtcataatgtctttaaattcatattgtgctttatatccaacaaacttatttactagtttatgtacaatcttaacttctgtaaaagttattaccataccactactcttaccatttttatttaatggcaagacatttataacacattttattatgtcattatttatagaaaaatcccattctatattatttaaagatttatttttttcttgcaataatttttgaaagtctacaccatttagtacttcattaatattcatattcattgcttcttctaatgatatatttagaattttcaaagctcgtccatttattcttttaactttcatatactcattaataactatcatgccttctgatatagaatcaaatgttacattaagtaacttatacgaaatagcgagtgccatttgcttctgtattgattgtgccgcagcagttactatacctaacgtatgagaatgtgcattataataatttccagacatatttatacatccaattaaattatcatcttcatcataaataggagatgcagaacaagtccaagagtgttgatttaccccataatgttctgctcctatagtctgcactggtttaccaaggtataaggcagtccctatagcattagttccaactacattttctgaccataattcacccttaagaaagtttaattcctcaattctcttcattatatcgttatcgcctattacatctactatatatccatctttatccgttaaaaataatgcaaatcctgatcctcgaaccatgctataaatactttccataacaggcctagctacagatatgagttcattatttttattaattaattcatttatattagaatgtttaacatgacccttaccatcataaggatcaacaccatagttcatgcatcttatccatgaatcaccaatttcacttctaaccttaggattgacatttcctgtagaaataaagtctttccaagccttattaataaaatccacataattctccatatatttctcctatgcttacacaaagataaatttatcatttattatatcttatatgataaacttattaaatatatatgtcgaatttaataatatttaaatttgatgttagtttttgaataatataaatatatcactctcaacttactctaaaatttgaaaatcatttaatatccatacataattctaatccaaagtaacgcttatgttcatcatcaataaattttaaaggtccattataaagtattattcctgcatattttcccttcgttataacaataaaattattcaaattatggtctgatgatcttaaattaaattgaaattccctaagttctttttgaatagttttagtatccaatttcattatcccaagttctgtaatttcatcatctgataactttttatcgttatccatgtctccgattttaattaaagctgtcgctaagtctgttctaatttcactagcatcaactattttgccatcagatccaaaatgatttatttgaagattctcacttgatgttctttccgtctcaagagtatttaccgtttcactaagcatactgatatcagttttaaagtcatcaactgcgaggctactactattgatacattcaataaaattatagaaccttactatacttgtcaaaaaaataattaacaataacaggagaaaaagcatttttattagattaatttttcttataactatgctatctatattagacttataattataagacagtaaatttctagtatacattctttcacctatcctttaaaatctatttatttacattattaagtgtaatactctattattaattaaaacttgtttacgtgtaaaaagcatgttaaaactccttctgtttttgctgattttatatagataattcaactaagaccttaacttatgcatataactcgccgaaatgaataacatacttctgttccagtttctagttgggatatatttcatagtataaatctaacttagaattggcttatctatataggtatccaaacttagaatccaacttattagatgaatgtatttacaaatttactaaaactttaagttcatatcttcactagaaatcataaatatatttgtggagaaaacatttgaaaatgagctgttaaaggttcttagctgtaggttgttccattttagcttgtcaaactgaaagttggagcatgctaaagtggatactacctgctgcttagaaccttcagcgatattttcatagcttttcggaatcaaaatatttataatttcggtgaggtatacttaggctatgaaatatatcctaactaaaataataaggcttagaaatgcaatttaataacatttctaagccttattttaaaataaatattattcactaatctattcttattaatttagctatattttttgtctatgtactttatattctatatattctatttatctgattttttattcttttttgcagtatctttgttatgtaccttatggttcaacttattatcatcactatctatcttaattttcacctcttcggtttcagaagcttctactttatcattagcatctatatcttctttgcttaattttattttatcactatccttaacttttaaagtaccacacttagtatcctttttagcttttatatcttcgctatctattatttctatcactgaatcctcaagtatacgggtttggcatgccaatctatatccatcatcaattttttcttttcctaaaacttttaattcttctttagttggttcagaaagttttccctctataactttaataacacactttccacattttccttttccttcacatgagtcattaatttttaccttagcatttttagcagcttttaaaacctttttctcatctttaacttctacttcacttataaacttaacccttactgacattctttccctctcctttaaatcttatattgataattttaaattgacagttgtaactttagtaaagctaccctctaaaaattatatgattgtttacctctacaacttcccaatcaaaacttaaatccaaaattattactctaaatacttatctttattaaaattatatactttaaatcatgatactatacaaaacctactgggttctatgcctcaatagctcaatattactattttcaactttccctctatatttctttgcactaacaatgacataaatagcaaaccaaggtacttattttaaatgacatataaatgacaaatagagtcaccttttgttggtaactctatttattatataatccatatactcgatctatatttaaatcattaccatctacatcctccaactctaacactccagtttctcattttctttgcagtttgatcgctttgataagccttaatctcattctcagctttctttcttcttttaattatatccttaactgttttttgagttagttcttttggagtcatattatcccaccatcctttttatttttgaaataaaatttcatcattacataaagtcaatggtaaatatattaagtttgtacacattaattattttgtatagtattaaaatcacatcatttattctataaaacgctgtacttaaaatttatttatcttttactgtaattatacatcacatttctaatttttcaccataatgcgtataaattatatttaatataagcattaaattagtaaatttctttaaatacaacctttctaaatctatttatttctatcatacaataaaattgttaaatttctacacgtaaaactttaaaagaacgttaaaaatattatattggttactatactaaactaacattattttattattcataaaagtaacacaacattaacatacctttaatgctatcttagctttttataaatatactatatctataaagaatttaaccattctttgcttcctcaattaagaataaccttgtggaagttttctaatataaatatttaataaaggagatgtaaataaaatgaatactttaaatatctgtattgatatcgacggaacgataactaaggcttatgactggctagatatggcgaataaatattttaagaagaatataacggaagatcaggtaacagaatatgaaattcatgaagttatgggtataaaaaggcaggaatatgacgatttctataatagaaataagttcaaactccactcagatcaaaaactaagagatggtgctaaacttgttataactgcattgcatcaatttcataatatatattttgtgacagctagagatttagagctaaaaacactgactcatctatttttaagaaacaatgaaataccttatgataacttatttgttttaggtagccactacaaggttgacaaagcacacgaattagattgtaatgtttttattgaagataactacaataatgcaattcagttatcggaggcaggattcaatgttcttcttatggatacaaattataacaggaaacctataaatgataaaataactagagttaataattggaatgaaatattcttaattataacagaactatcttcacaaattaaagctgtttaaaaaaaagcctctccttaaaagaattaggataagcttttatcttaataactaatcatctatcagcctgtatccaacaccaacttctgtataaatatattgtggctgtgctggattcttctctattttccttctaaggcttgccataaaaaccctaagtgattgagtttcattacctaaagctgcaccccaaatttcattaattatgaaattatgggttaatacttttcctgcatatttacaaagtagtgccattattttatattctataggggttagatgtatatcctcgtcatctatactaacttttcttttattaaaatcaacaaccaatcccttaaccttaaatatttctgtatttttattttcagatgtatttgttacactgtgccttaaagaaactctaatcctagctaataattctccaattccaaaaggcttagtcaaataatcatctgctcctttgtctaaagcttcaatcttctgtctttcattttctcttgctgaaactattattataggtattttagaccactctcttacttttgtgataacattgattccatcaatatctggaagccctaaatccaatattatcaagtctggtttatgagacatagaaagcgcaatagcttcaattcctttctctgtttctatataattaaatccttgtgcttttaatgatgctgttatgaaatttcttatgggcctgtcatcttccactacaagaatatatggcttattatccatctatctttccctcctttggaatgttaaatctaaaaattgcgcctccttcatctttgttctgggcgctgattttcccaccatgtccttcaactatagatttacaaattgcgagcccaagcccaacacctcttcttgaatcagatattttatctccatttgtaaaaaatctatcaaatatatgtggtaatatttcttctgatattcctatcccatcatctattacctcaaatataacatcgcctacttcctcatatactttaacctcaattaaagcttccttaggagtaaacttaatagcattatcaaaaagatttataagaacttgctcaattaaatttccatccatagataacattataacatcttctggaactgttacctttatctcatgatccttcaagcgttttgaagttctttgaactgcttcatatacaacttcttctacgagttcaaggttctttttaattttcatgttcccaccttcaaatctagtcatgctgagtaaattttctaccaatcttataagccattcagtatcatcataaattccttggaaaagttcatctttagtatctttagatagaagttctcctgtttcaatgatagtacttattgctccttttatccctgcaagtggacttcttaaatcatgggaaattgatcttaaaagattacttcttaatctctcactttcaatttctaactttgaatttttctgagtttcagcgagaatttctctatctaaagcaatatatatttgactagctacagtctcgaaaatgaatttttgttctggttttaagtttccagtgatacaagagacacctaacacgcctaatactttattatgacttttcagaggcatataatatccttttgctccatagaaagtattagttcccgcacctgactctttatcatttaataatgtccaatatgcaacagcttcttcctctttatttagcaatgtccgatctttctcacctttagtagccgtataaataaaaggtgttgttaatttattttcttgaactaagtagcaaataactgttctttctaataatctagataaatattttatccctattcccacaacatcagctgtacctgttgcacttagtaactttctacttactctatataaaatttgtgttgtattctctcttgctaaagaattttgtgcttccctttgtatcttgcttgtgagagtaccaattgtaaatgtcactattaacattattgggaaagtagctaagtagcttttatcataaacttcaagagaatatcttggatcagtaaaaagaaaattaaataagaatatacttatgattgaacatataaatcctaaaagataccctctagttttcatatttactataattacacccagaataaaaatcatgatgacatttgcttcacgaaatcctatgtagtctataaataatgaaatcattgtagatataatcattattaaactagctgttaaaatttctttccatgaaatactgacccttactttttttctttttataatgttttctttttctttattaaaagttgaattcggtataacataaacgtctatatatgaattagactccattaatttatcaactatatctctagcataaattctaaaaaaattatttggttttttatgattttttcctattataatctttgtgacatttctaaattttgcatattgaattatttgttcaactatatcatcgctatatacagttactatctctccatccaactcttctgccaacttaaaatttgcactcaaactctccttatcctttttacttaagtttctcgactttgttgtttccacataaaatgctatccattttgaatgatgtgcttctgccattctccttgctgttcttataacccttgaagaagatggtgatgaagaaatgcaggctaatattgcatctactgttggcattacggtaatttgcccttttgacaaccttacgctttccacttcataatttactctatcagcagttcttcttaatgcaatttctctaagtgcaaataaattatttttagtaaaaaaattattaaatgcttttgtcgcttgttccttatcatacacttttccatcactaaatcttttcaaaagttcatctggttcaatatcaattaattctactttatcagcctcatcaaatattttgtccggaattctttctctaactgaaatatgggttatactttcaactatatcatttaagctttctatatgctgaacatttaaagtcgtataaacatttattcccgcttctaaaagttcctcaatatcctgccatctctttctgtgcctttgctcactagcatttgtatgagctagttcgtctactagcataatttcaggttttctaataagagccatatccaggtcaaattcttttaaggttatccccttatactcaataatcctattttctatactctcaagtccatttagcaatgccatagtttctggtcttgcatgtggttctatataacctatcactacatcgtagcccaatttcttcatatcatgtgcttccataagcattgcatagctcttaccaacaccagcagcatagccaaaaaatatttttaattttcctcttgaagacacattctcttctttttttatttgatttaaaagatactgtggatctggcctttcatttatatctatttaaatcactcctaacatttctttaattttatcttaggcacataaaagaaactaatagtaagacatactgttttattatttctttgattgcgccttctgcctaatgaaattatatatcgtctaataataatataaaagtactttcactactctactttagaataagtagactcttttcctaagtaatcataaaattctatattacttcctttaacttctccatttaaagatttaactctcatatagttttgtttatcctcatcaaaagttatttctattttattatcatttatagtatacttaccatacgtataaaatacatccttataagaattgtttattaccttgcatttaccattcgaattaagctctaaaatagtattatcagatgttttatattctccagcatatggattattattacacccagctatggaaatgattatgataatagctaaaagccctaaaaatactcttttcatagtaatccctctcattctataaaagtaaaatgaactagaatcccaaattactttatatttaaaagtgaagctatttccatattgacttttagaacatttactcttggttcaccaaataccccaagtgttctaccttcagtatatttattaactattttttgaagatctgcttcacttattcctgatgcttttgaaactgctggaatttgaatttctgccgcctttggacttatatcaggatctaacccagaaccagaacttgtaagcaagtctgttggtatatcttctttcttaactccaggattagcagctaagaaatcatttatatctttttcaactctttctctaagaatttcattggaaggcgctaaattttgtgaccctgagcccactccactatatactgcctttccgctttcatcgggtacagtatctgcttctgtataagtgttataatttacagctgaaattcttcctctaaagaaccttggatctgtgaaattttgtcctataagttccgatccaacttcatttccattaacagttatcatacttccattagcttttctattaaaaaccaactggcttattccagtcattaaaagaggatatataagcccacaaagtaccataaaagtaatacttaacagaatagattttttgattattttcatataaaaatctccttttcttattgaggtgcataattttttcttagctaataatcttcactatctaagttagccaatattaagaattctgactaacggagtaataatcatgtcaattacctttattcctatgaatggaataattactccaccgcctccataaataagcatatttctaagcaacatcatctctgctttcatcggtttatattttacgcctttcattgccacaggaataagtagtggtattattattgcattaaatataagagccgatagtatagcactatatggtgttgaaagtctcattatattcataatctgcatttcaggtatagctactgtaaatatggcaggtataatagcaaaatactttgctacatcgttagcaatactgaaagtagttaaagccccccttgtaatcaataattgttttcctatttcaactacctcaagaatttttgttggatccgaatctaaatctaccatattagctgcttctttagccgctgtggttccactattcatggcaagtcctacatctgcctgtgctagagctggtgcatcattggttccatctccagtcatagctacaagtttaccttgttcttgttctcttttaattgcatcaattttatcttctggtttacattcagctataaattcatctacaccagcttctttagcaatagttgcagcagtcaatggattatcaccagtacacataactgttttaattccgatttctctaagtctttgaaatctgagagcaagacctggtttaacagtatctttaagatatataactccgtatattttattgtttatgcaaactacaagaggtgttcctccaagttttgatactctgttaacagcttcatctaaatcatctggaataattcctcccatttcttttattctgtttcttatagaatcagaagctccctttcttatagcagtaccatcaggcaagtccactccgctcattcttgtttgagctgtaaactcaataaaatctaaatttttatactcttcttcattaattgttgcttcgcttcttctagcaagatcaactattgattttccttctggtgtatcatcttttattgaacagattactgaataatttattaaatctaatttccttacgttgtcaactggtataaaatccgaggctaatctattaccaaatgttatagtacctgtcttatcaagaagcattgtatcaatatctccgcaggcttctacagcttttcctgacatagctataacattgaatttagtaactctatccatacctgcaatcccaatagccgataatagaccaccaattgttgttggtattaaacaaacaagaagtgctattaaagttgaaatataaattgaaacacccgaataattagccattggataaagtgcaactataactataagaaatataattgttaagctaacaagtacagtattaagcgcaatttcatttggagttttttgtcttgatgctccctctacaagagatatcattttatccaaaaatgactcacctggtgttgctgttatctcaatctttagccagtcacttacaacctttgttcctcctgtaactgatgcaaaatctcctccacgttctttcataacaggtgctgactcaccagttattgcagattcatcaacagaggctattccttctacaacttcaccatcattaggaattatatctccattttcaactaaaactatatctcctttttttaattcatttgcatttatgaccttagttgttccatcagcattcaacaattttgctacagtatctttacgcattttctttaaattctcagcttgagcctttcctctaccctcagctacggcttccgcaaaatttgcaaaaagtactgttataaacaatattagagctacaataaaattatatattcttaaattacttcctttatctccaaataagcttggacaaaatgtaagcaataaagttataacaaatcccacttcaacaacaaacataactggattttttatcatatatttaggatttagtttcttaaaggactctataatggattctctcaatatatctcttgtaataaatttagacttttttcttttatcactcatactatttttctccttgctttctacttcataataatcaattccacaatgttaaatgctctgctattggtccaagcgctaaagcaggtaaaaatgttaatgctccaattattaaaacaattgcaattagagttaatgcaaacattgtattatctgttctaaaagttcctattgttgttggaattgttcttttggccgctaaagagccagctaccgaaagaagaattataattgataaatatcttccataaaacatcactatacctgtggcagtattccaaaacagagtattatctcctaacccttcaaatccagaaccattatttgctgctgaagatgtaaattgataaactatttgagttaacccatgaaatcctgaatttgatattcctgcaattccctctggcgatattaatgccaaagctgaggacatcaatattagtaatgggtgaattattatagctaatgctataagcttaatttcttttccttcaattttctttgataaaaattctggtgttctgccaaccataagtccacataaaaagacagtaagaatagcatacatcatcatattcataaatcctacgcccttacctccgaatacaacattaagcatcatattcataagagcaattgctccacctataggtgttaatgaatcatgcatattattaactgttcctgttgtgaaggacgtagttactgtcgcaaataatgcagattgtcctactccaaatctcacttctttcccttccatattccccataagttgatttaaccccacatgtgctaatgctggatttccagccttttctgcataataacatattggaagtgctattataaatattccagccattgctccaaatatggtccagccttgttttttatttctaagcattaacccaaaagtataaactagtgctcctggaagtatcatcatagatagtatttcaattaaatttgatataggtgttggattttcaaatgggtgagccgaatttgccccgaagaaacctccgccgtttgtacctatatgcttaattgattcaagagctgctaccgggccaattgctatatcttgcattttaccttctattgtagtaactgttttagttccagataaagtttgtggtacgccttgacttaccaaaagaattcccactattattgatagtggcaataaaactcttgttgtaactcttgtcatatctacaaaaaagtttcctattaactttcttccaattattcctctaataaaagcaatagctgctgaaaagcctgttgctgctgatgtaaacatcataaaaataatcactatcatttgactaaaattagaaagtcctgattctccactataatcttgaagatttgtattagtcataaaacttataattgtattaaaagatagactttgttccattccatttattttatttggattaaaaaataagaatccttgagctctaagcattatatatcctataaataccattgcagcattcactgctataatagaaaaaatatattctttccaatccatttcgtcatctttacttattccacatatcttgtagataaagttatcgattttatcaaatagcttgtctccaatgattttatgaccagtgctaacataatatagatactttccaactggtactactattatcataaaaagtagtaaagttattattatttgtaaccactccataactattcctcctagttccactactaataattttaaaatttctctggattaaataatgcataccctaaatatccaaaaagtaaaattataattacaactaaacttagcatttatattcccccatttattttcttttacttgttagtttgttttccacaccaattagcaaacagtatgatagaaaaaaatcctacaaataatgatgtcaaaaaaataaaatctagcatcatcatatttctcctttcgtcattcatatctcatatataaatattactagctataatataaagattggattaagacttttttcttctgcataaagattgtataaagatttcgcttatagaattttatatttaatatcttccatgtccataatttaatataaattattactaaatgtacggcttatcagaaatatgtatacttttcctcagttttcaaataataaatgagataaataaattatgattttctataaaaatagaagaggaggattagcctaatgcaaaaagtcacaaaaacaatggacggaaatcaagccgcagcatatgcttcctataattttactgaagtagctgcaatatatcctataacgccttctacacctatggccgagggggttgatgaatggtctgctcacggaaagaaaaatatgtttaatcagccaattaaggttgctgaaatgcaatctgaagctggtgcagctggcgcagtacacggatcacttcaagctggtgcactaactactacatatacagcatcacaaggcttgctgcttatgataccaaacatgtataagattgctggagaacttttgcctgcagtatttcatgtaactgctcgtgcaattgcaactcacgcactatcaattttcggagatcaccaagatgttatggcaactagacagaccggatttgctatgcttgcatcaagcagtgttcaagaggtaatggatttagcatgtatagcccatttaagtgcaattaaaggaagagttccatttactcatttctttgatggttttagaacatcgcatgaataccaaaaaattgaggtacctgattttggagaagtaactaaactcgtagataaagctgctttaaaagctttcagagatagagctttaaatcctgaacatccagttgctagaggtacagcacaaaatcctgatatctacttccaaggaagagaagctcaaaatcctttctttgatgcagtgcctgatatagtagaaaattacatgaaggaattaaaaaatattactggaagagaatatcacccattcgattactacggagatcctgaagctgaaagagttatagtagccataggttcagtatgtgatactataagtgaagttgtagactacttaagagaaaaaggcgaaaaagtaggtatgataaaggttcatttatacagacctttctgtgataagtacttctttaacgttttacctaagtctgttaagaaaatagctgtattagatagaacaaaagaacctggtgcacctgctgagccattatatttagacgttactaagcttttctataataaagataacaaaacagtgatagttggtggacgatatgggttagcatctaaagatacaagaccgtctcaaattatttctgtttttggcaatttaaattcagataagccaaaagataattttactgttggtatagttgatgatattactaacacttctctgcctgaaggagaaataattgatactacaccacaaggaactataagctgtaaattctgggggttaggatcagatggtacagttggagcaaataagagtgctgttaaaattataggtgataatacgaatttatatgctcaagcatatttttcttatgatagtaaaaagtctggtggtactacagtgtcccatttaagatttggaaagagccctataaaatctccttatttagtttataatgcagattatgttgcttgtcacaacaaatcctttatctataattttgatgtcttaaaggggctaaaaaagaatggaacttttgtacttaactgcccatggaataaggatgaaattgaagataaattacctgcagcatataagagatatatggcaaaaaataatattaaattctatactatagatgcaattgctattgctggcgaaataggtcttggaaatagaattaatatgataatgcaatctgcattctttaaacttgctaatgttattcctgtggaagatgcagttaaatatttaaaagattcaatttcccacttgtatggtaaaaaaggtgataaaatagtaaaaatgaatcatgatgctgttgatagagggatagattcattgaacgaaattagtatacctgaatcttgggccaatgctgaagatagtgataaaccagttaaagacgaaccagactttgttaaaaacattcaacgtcctatggcaagacttgaaggtgatgaattaccaacaagtacatttaaaggaatggaagatggtactttccctcttggaactacagcctatgaaaaacgtggtatagctgttaatgttcctgaatggcaaacagataagtgtatacaatgtggtcaatgtgcatttatatgtcctcatgctacagtacgccaattcttagttgatgaaaatgaaatgaagaatgctcctgaagacttcattacaaagaaggctgctggaaaaggtctagaaaactacggttatagaatacaaatagctcctctagactgcactggctgcggtaactgcgctgatgtatgtcctgctcctggtaaagctcttataatgaaaccggctgaagaacaaatattagagcaagctgaaaactgggaatacgcaatgaagcttacacctaaggaagacttgattgatagaaataccttaaaaggcagccaattagttagacctcttctagaattcaacggtgcttgccctggatgtggagagactccatatataagacttctaacacaactttttggtgaaagaatgataattgctaatgcaactggatgttcatctatatggggtgcaagtgctccttctatagcttataccacaaatgctgaaggaaaaggtccagcttgggcaaattcattatttgaagacaatgccgaatttggatatggtattttcctaggtgttaaacaaataagagaaaagctagcagatttaatgaatgaaggattagaatcacctgattttagtgacaacattaaaagtgcattccgtgaatggcttgataactttaatgatggaaacgaatcaaaaatagcttctgctaaagttttagaagttctaaaaaattctaataatgaaattgctaaagaaatattagaaagaaaagattatttagttaaaaagtctcactggatactcggtggagacggatgggcttacgatataggctacggtggagtcgatcaagtgcttgctatgggtgacgatgtaaacatatttgtaatggacacagaaatctactctaacactggagggcaggcttcaaaatctactcaaactgctcaagttgctaaattcgcagcagcaggtaagaaaactagaaagaaagatttaggacttatggctatgagttatggctacgtatatgttgctcaaatagctatgggtgcaaacatgaatcatgctattaaggtaatagctgaagctgaaaaatatccaggaccatcaatcattatagcttatgctccatgtataagccatggcataaaagttggtatgggtaacagtataaaagaagaaaagaaagctgttgagtctggatattggcatctatatagatataacccattattaaaagatgaaggtaaaaacccattcttacttgaatcaaaagaaccttctgctccatataaagacttcttgcatggagaaatacgttactcatcattaatgaacgtattcccagaggtagccgataaattatttgatgaagcagaaaagaatgcaaaagaaagatatgaaacttataagcgcttagctgatatgcaatattagtaaaaaaattccaaataatacacatgtaaatagtaaccaaaataaaaaaatccccgattttccggggatttttctatagataatttgaaaatcaaaagttatattccactagaaataagaagcatgttttgtggagtgtttcattggaatttttatggttatgattcttgattagaagttgttccaaatatgctagttcaaactcgcttttgaggctagcattttgggtacaacttctaatcttagaatcgtccataaaaattccttagaaaccgcaataaaacatgtttcttatttcgtgatggatatatacttacttttgatttgtatctacatattcttttgcatttctaacttgtacttcgctaggaatgttcacattagatacaggttgtgcgtcttccatattagcccatgctgctgcatcatgcttttctattggcgtgccaacgaacttttctttaaatttatttgtcatgtgtaaacctccttttactatccaaaattattctaataaatttagatcagtaatagtatttacttaaaaatgaaaagtatgactagagttgatttgcaacatcacaattatttaattacacattggattaaactgtaaataaatttggaatacaatcttcagaaataatacaagttctgatatgagactttattattatatataaagaaaattttcttaattaaatactcatattttttattttaatatttccatatgtgttttcggaagtcttataagtagatttcttacactatattcaatacagtttttctcaatgctgacttcatctttttcttttagatctagatttattctataacttctgctaataatattaaatgtaccaagtaaatcaaaaaatccataccctatttctctattagggtatctatatgtcgagttgcttctatcggcacccaaaatcaaatatgctataactttcgctgaaaacatggttttgtcatttccattaacaactccccactgcaacaaaagtgcgcaagccccagaaattatcgcagcagccaccgagctaccagatacagttgtagttccccctcctacttttgtagttaatacatctatccctaacgtcgctaaatctgggttatttatatctacattaacatttggaccttttccagatgctgcaagcaacgcattatcatttccataataagctattgttgctactcccctagctgtagatggtattgttagtgtagtaaatggatctgcttgaagaaatcttgtattctctggtaatgttttctgaggcggcagccaaatgtgatatcttccatcagttatataatctcctcgtaactgcaatgtccatattccagcttttatgctatcaaaatttatggctattgcttcatggcctgtaaaatattccggaacataatatttcacagtcattcgagtcttaaaaaatacaaaattaacattttgtatttcattggctttcgctttaatgaatttagatgattctccattaggcgaaattacatttatagatgccctattaggttttattacccaaattgtaaaggaaaaatatttcatttcctttgatattcttaattctatagaaactatatcccctgtttgctttataattcccgaagcatgaccttctgaagcgccttcatttccaacaccagctactgtaattagtcctctaagccttcctagcgatgctatataccttgaaattaaattattaccatcatgactaccttctgttgttccaactccaatatatataaccattggtctattaagacttactgaaactttttttaaataatctattgccgctaagacctctgaatcattatatactggtgtatatggaataccatttgctatgagctcttccctgaattccatggactcataaagttttacaaccacaaactcacatccagaagctatcccttgaacatcggcattatacccccttgctccaatgataccggccatttgagttccatgcccaacttcatctcttgaaggtacaattaaatatgcatcctgtttatttctataagccttgactgcattagtaatctcttcattattaaaggtttttcctatgtaaactgaggtatcatcagaatcaggaacagtttgatcccaaagacttattattcttgaagtatcatcttcccttataaattcttcatttaaataatctattccagtgtcaaccatgcctataaggacacctctaccatttaagtccaagtaaggattaattttaattgcatttatattatctacacttgacggagatatatcttgtaatacgtacttacttctaggatctatgtaaagaatcgatggtacatccttagccaatctaactaaatcttctggtgaagcagatacaaccgcgatagtatcagtaattacatctccacacgcataagatactttgtctatttgacctctaaaatctcctctatattgaactaaataattaggcagtcctccataatataaactacacttcttaaaactaggcacagcaaactccttagtattacttatatttaatagtatttagctaaagtacaaattattcattatgaaaatataaatatgattaaatggccttatcatatttataaaaatgcgacccatactaatatttataaatattagtatgggtcataaatttattaaaagtatagataagacaatcatagactatacttagactatgaaatatcctccaaccagaaatgagtaatatacttttgtggaatgtttcattggtaattttgatggatgtgattctttggctataagttgttccaaatgtgctagttcaaaaagtgagaatcgaaattttatatttcattcttcgaactttctctgtgagcgcttgttctttgaggctagcactttagatgcaactttatagccttagaatcacccatcagaattgcccagaaactgtaacaaaagtatcttattcatttcggtgaggtatacgcataagtatagattataattagtttatctatatatgttaattagctagattatcactatttctaaataaaaactttacattaagcattttatgagttctacttaatccaagcaccattagatcctagtctatacccaccaatagtggtattgtatgccatagctccattactatataagtagtaatactttccagacacatccttaatccatcctgtttgcattcttccttccgaatccatatagtaccaattaccattaactagctgccagcctgctttttttgctccgtcgccacccaaataataccatgtacctccatagtttaaccaacctgtggccatgtttccatctgattgtaagtagtaattacgtatccaattattttttactgaattacccatggaatcgttgtattgccatcttccattgacctgtacccattgatttgtcttaatattcttagttggcaatggtgtaccactgctattagagttattgctacttccacctctataaatattcaatgtgtatgttctcttatcaccatcatttttaacagttatctttatattattctttcctttatttaaagatactgtttttctaaatttatcgctttcatctacaatacttccatctatttttacttcataatcgtcatactcatcactatcacaatctggttttgcggttattttaatttcatcaacagatcccgaaacatttacactgtaatcagaagtatttttagaaaaactcaaatccccttcactaagtgagatgctcttcaaatacacatcttcatcatcactagaagaacttgctgtacacttcaccctaatagtgtattgactagaatatgaatcatcactgtatttgaccgttcctggattatcgttatatgttcttattgtaagaactgttgttgatcctttggatagttcaatagtactgcttgtctttacacctttagtagaacttgttcttcctttaaagattctaacattacttgagtcagcgccatttacacttatttttattttactagatgaagtcttagcgtaataagtttcattatttttcaactcatcgtcatcaacttcatttttacttttataattatcatcactataagtctttattgtgcttccgcctgatgtctttaatttaatgcttgataaatcacctgttgacgcataagctgttgtagttaaagttaagcttgttgctggtacaattgcactaaaggcagttgccgcaattgttaatgcaactattcttttaatatttctattcatattatatccccctaaattattgtattagcatcaaacaatgctgttcactatataatacaatatcaaataccatttatagtaccttttagttggtaaaataggatttttttctttatattacatattttcttatttcaatgtacaattttaaacaaatgtattgttttttaacatttatatttctttaggaattcttataaataatgcttttacactgtattcaatatacttatccccttttttacaatctgcccttgacttattttctaggcctaggtccattctatagcttctgcttattatattaaaagtacctagtaaatcaaaaaatccatatccaatttctctagtagggtatctataagccaaattgctcctatctgcaccaagcactaaataagctatgatttttgctgcaaacatagttctatcatttccattaacaatcccccattgcaataaaagcgcacaagctcctgctattatagcagctgctactgaactgccagaaacagtagtagtcttgcctcctatattcgttgctaatatatctgcccccaaagtagccatatccgggttttctacatatgtattaacattagggccctttccagatgctgcaaccaaagcattgtcatttccataataagctgttgtgactacacttcgcgccgtagatggtattgtcaatgtagtaaatggatctgcttgaagaaatctcgtattttctggcaatgttttttgtggtggtaaccatatatgatatctaccatctgttatataatctccccttagctggaaggtccatattcctgcttttatgccatcaaaactaattgctatggcttcatgaccagtgaaatgctcaggaacatagtattttacagtcatttgagtcttaaaaaatacaaaattaacattttgtatttcatttgcctttgctttaataaattttgatgattctccattaggcgaaaccacatttatagatgctctattaggttttatcaaccagattgtgaaagaaaaatatttcatctctctaggtattctcaattcaatagaagccacatccccagtttgttttatgattccagaagtatgaccttctgacgatccttcatttccaacaccagtaacagtaacaatacctctaagttttccaatagaagttaaataccttgagagcagattattaccatcatgactgccttcggttgtacctacacccagatatataaccataggtctattcagtcttactgcaacactttgcaaataatatattgctgctaaaacttctgaatcattatatactggtgtataaggaataccatttgcttgaagctcatttctaaaattgatagattcaaaaagcttaacaatcacaaattcgcatcctgatgcaacgccttgaacatcggcattataacctcttgcgccaataataccagccatctgtgttccatgtcccacttcatcctttgatgggacaattagatatggatattgattatttctataagctttgattgcattagtaatttcttcattgctaaatgttcttccaatataaactgatgtgtcggtagaatctggtactgtctgatcccagagacttactattcttgaagtatcatcctctcttataaattcttcatttaaatattctattccgctatcaaccatacctataagcacgcctcttccatttaagtctaagtatggattaattttgattgcattgatattatctacacttgatggcgagacctcttgtagtacgtatttgcttctaggatttatataaagaattgatggaacatccttcattaaacggtttaaatcttctggtgctatagagattactgcaattgtatcagtaattttgtcgccacaggcatatgatatgttatcaatttgtccctgaaaatctcctctatattgcactaaataattaggaaatccagcataatataaattacattttttaaaactaggcacattaaactccttagtattgctatatctaataatatttccgtaaaatataatttattcatttagtacacattaataaaacacaagcgaatgcatgcgaacctatactatttaaatttatttcactttcacaaataaagtaaaaggaagaatttataatatataattgattaattaatatttatatttgcataataatgcacattgacttacacatatattgactcaaatatttaaaaatgatatgtttatatataagatattaataattacaaaatgatatatgtaacgcttaatcactttgaacgggagaaccattttttggggtgaatcttattacacgataataagtagggttaattttcttcaatccgaatccgtcagctaatctcgtaagcgtagaagagaagttttggtatactttgatattttttatgtatgcctataaatattattgctttataagctatagagacttctctatagcttattattttttttataattataaacttaaacttaggacaaacttttgaggctggaaaaatatcttatagttaagaaactttttcctaacttcaagtaatacattatgataaaaggagaaagcaatttaatgagagcaagtagatgtgaattaaataatactttttacgcaaaaatagatcggactaaaatattagtagatttacctaacaagcgaataaaaataattgactttaatgccatatcaatgcaaaacttgaaaagaataattcactttgcatcaaaacaacatttaagtaaaattatttgtaattgtgatactaaatcatttgaaacttttattaatgcgggattcaattccgaaggcaagatcaatggatattttaaaggtaacgatgctttttgtatgtcatactttattaacagcgatagaaaagtttgcagcaattttgcaagaaaagaactattaataaaagaatgtcagaatgttaggaacacatatgcgcatcaaaaaaataatttaggataccttattcgaaacgcaaataaaaatgatataaaagaaatgatagatttgttttccaccgtttttttaacttatcaatcacctatttatgatgaagaatatttaaaacaaacaatgaatgataaagttctatacaaagttgccgtatataacggaaaaataatcagcatagcttcagcggatatgaataaagaaaatttgaatgctgaaataactgactgtgctactcatccatcttatagaggcataggaatattatcaaacattatttattctttagaatcagacttaaaaactaagggttttctctgtttatatagtttatctagatcaataaatcctagcattaactttgttctaagtaagcataattataattttgctggcagactagtaaacaattgtaatatatgcggtacctttgaagacatgaacctttgggtaaaaaacataaatagtacaagcttttaaattagttttattatagtaaaaaatattatttatttgcatgaagcaaataaacaatattttttaatcccctcttttatcatgctattttgcatattcattcaaaatattataagcatattctatgatttcatcacaagttataccttttttcttaagctcaatacactcaagagtaccatacttctctttaactttatttataatttctctagttaatactcttgaattatttttttcttcactgctattccttccttttaatgcacctatcgccattaaagttccagtgattgctccgcatgtacttccaatagtcatgcctcctccaaaaggacttgctattgcaattggaatttcagatcctgtatcctcattaaatgctttaagtatagattctgcacaattatatccttctttatgaaattcaataactttcttcatgttatatcccctcaatctagcaaaataattattatttataaaataataataatactacttagtattatgtactttattttcttttgtttcctatataagagcccattcctcctgcaacatttataaccttgaaaccctgatttcttagattgttgcacgttcttgcacttcttccccctgattggcacattatatagtattctttgcttttatttaagtatttctctggttcatctaaaagctctcccataggaatattttgggcactttttatacttccacctttatactcatattcttctcttatatcaatcaattcaacttttcctattagatcatcaatttcatttacattaataactcttccatcatctttttttaaaaattcaaacactataacttcctcctaaaatactttcctaatttctcatctctaattgtcttttaatattttatttaaatccttaagtatgattattttgcctctttctaaatttatatacccaagcttttctaaattctttagctttctacttataacttcacgaactgaatcaatttcaaaagccaattcactatgagtcgcataaattattttgcttttcttgcttattagcaattttataagccttgtttcaagggattcatgaataatttcttctttattccctatgatagtattaaacttattatacaaatctttatatatatataataagaagtcattatcactaataaaatattttttaaccacttcaaaaggaattatgcataccttagaatcttgaattgccttacctgttatatttaatgattccaaatctgataagcagcttaaggcttcatgacaaaattcaccttggcttatattataaaggttagtttcttcaccattcttattaattttttgtatttttattacaccttttataacaaataatatccctttacacgctttctctgtagcttctacatattcatcagcatataaagttttaaaattagcttgttcgtttattacttcattattctttttattaatctcatataacaccggatataccttatatagagattttatatattccaacctattcccacttgatatttcaattctattattcacttcatccctcctttattgtattatattcttttttttaataaatttgtgtgacttagtcacataagaaaaaaatttgcatttaaaaagtgtagtcatagcaatattatgactacaccaatctataactatatattatctactttcatagctctcatagcatttaagactgcaagcaatgcaactccaacatcaccaaataccgcttcccacatagtgcccatacctacagctacaagcgccaatattatcaatttaatacctaatgcgaaaactatattttgcattactatagttctagtcttctttgcaatctttatagccgaagctatttttgatggttcatctgtcattataactacatcagcagcttcaattgctgcatctgagccaacaccgcccattgctatacctatatcagccctcgctagaactggcgcatcatttattccatctccaacaaatactatcttgcctctaggtgatttttccttaaacaatagctctagctcttctactttttgatctggtaatagttcagcatgaacttcatccaaacctaattctttagcaattttacttccaacagttttattatcacctgtaagcattactgtcttcttaatgcctatttcttttaaagcttttatagcctttaatgaatcttcttttacttcatctgaaataacaatataacctgcatatttcttttctatagcaatatggactacagttcctatttcatctactttgttataagatatattctccttatccattaacttgtagtttccagcaaatacctcttttccatctagaacaacttttacgccgtgccctgatatttcttcataacctgttatcttatctgtaattatctctttatcataagctcttaatatagaagttgctattggatgatttgagtaattttctgcataagccgcacaagctatgagttcatcttttgaaatattattttctggccttatttctgtcactttaaatattccttttgtaagagttcctgttttatcaaacacaactgtttcaacattatttaatgcttcaaggtaattcccacctttaacgagtatcccattttttgatgctccacctattcctccaaaaaatcctagaggtatagatacaactaatgcacatggacaagatacaactaagaatgctaatgctctataaatccactgtgagaatgttgctccctcaataacaattggtggtattacagctagtgctaaagctgcaaaaacaacagcaggagtataatatctagcaaactttgttataaaattttctgtcggagccttttttccacttgcattttgaactaaatccagtatcttagcaacagtagaatctccaaattctttttctacctttattgttaaaagtccatttttattaattactccacttaaaatactgtctcctacccctacttctctaggaacagactcacctgtcaatgcagcagtatcaaccatagagtttccttcaattatttcaccatctaatggcactttttcgcctggtttaactaatataatatctccaaccttaacttcttctggatctacttttttgaaatcattatttatttttaaattagcaaaatccggtcttatatccataagtgatgtgatggattttctagagcgattaacagccatatcttgaaacatttctcctatttggtagaaaagcataactgcaactccttctggatattcgcctattgcaaaagcaccaatagttgctatagtcatcaagaaattctcatcaaatacctgacctttagctatattttttagagctcttaagaccacttctccacctataagaatatagcttattagatataataataattctatataatttgaaaatttaaaaatagtagcggctccaaaaattatagcaccaatagctaatcttataatttccaacttatcattatcctcttcaactttttcattcttgctcatagctcttctatctattccatcaatttcaacaacattaacatctggttctattcttttgacaattcgtttaacattatcaataatggcattttcttttgctgggtcttccatctctataataagctttgttgatataaagtccactagtgcagatttcacaccatctatattatttgattccctttcgatttttgcagcacagttaccacagcataatccttcaagtaaaatttcttttttcaaaattttttctgttaccttttctacaactttaacatgagattcaatattagttacaatgttagttactgctcctatcagctcttctaatttattaacttcatttgtttctaatattaaagttttagtaagaaaatttacattggcaaaattaactccatctaattcatttattttttgttctattttagctgcacaattggcacatccaagtccttctaagataaattctttctttactttctttatactatctttctttgataattttgcgttaacaggaccactagctatttttatattgcttgccataatgtttcccccaatctaaaacttattttttctcagatatatgaatcaacccttgatcaaaaatacttttaacatgttcatcatctagtgaatagtagactaccttaccatttcttttatatttcactaatcttgcttgttttaaaactcttaattgatgtgaaatagcagattgagtcatgccaagcaatgctgctatatcacagacacacatttcagcctcaaataatgcacataatacttttattcttgttgaatccccaagcactttaaataaatctgctaaatcataaagtgtttcttcctctggtatagattccttaaccttattaattatatcttcatgaattatagtgcagttacaaacttcaatattattattttccatactcttcacctcttcgtttgaacatatgaatatctgttcatatgtttattatattcgacattactttattctgtcaatagaaatgagaataattttcagcctttccaataaaaaatcacaggcgactgtggagccggagatttttttacccatctgccttttcgaacgcatgtgagaaaaatctggcaggcgaatatattttcttttttattctttttaaaatacccaaactatttaatcaacctttttaagtcatccacagatttcactggaatataaattcctaaagaataaaaaaacaataagctcaatacttattgtttacatactatgccgaagttatataaaattatatactcatatatatcgcaatttacaatgctcatttcaaaattcacaattactgctaagattcttataatatctttagaattatgatgacgaattatttttgcaatatatataattattaaaagttaaatttatcattaataaaggaactcgttgctaaagtaaaattttactttttactttgaatgtatgtaatctaaataacagatgtactgagaataaactcagtacatctgcttttatttatcttctatagtccttgttcatagctttctatcattctttttaccatttctccaccaacgctaccgttttgtcttgaagaaaggtttcctttatccatgctttcataattgcttaatccaacttctgaagcaacctctgtttttaatctgtttaatccttgttttgcttctggtactaatgttctgtttgttccactattttttgaagccatataaatctacctcccttaaatttttgattttgtttggcagtaatatcttaaccactatcacaaaatataacctataaaaatcttaacaaaactagcacagatggcttgtattacaaaactttaactattcttcctttgcctttatttttagaaaaataagttctaatttttcatgaaatttatattacacttgctcttcacttttaaattttattattttaaatattacagctccaaatgcagcagataaaatagaggctattataatacttattttagccatagataaagcactttcctctgtaaatgacaaggatgaaacaaaaagtgacatagtaaatccaattccgccaagtacacttgctccatataaatgcctcttagttactttagatggcaattttgcaatttttaatttcactaaaatatacgaagccccaaaaataccaatttgttttcctataaataatccaaaaattatacctagactgactggattcattattgctgctgataaactattaatatctatagttatgcctgaattcgctaatgcaaatattggcataattataaatgaagataatggcgttaggacatgctcaaatctatataaaattgatgttctaaattcctccatattttttccgataggtaatcccattccaagtaatactccagcaattgtcgcgtgtactccagattttaagaaacaaatccataatataattccaaaaataatatataaccatttattcttaatattgagtttattagccaacattatcgctaaaaaaataatcaaacctatgattaatgcaatccatgaaatttcacttgtataaaatatagcaattactataatagctcccaaatcatcaactatagctaatgctgtaagaaagattattattccttttggtgcctttttaccaaccaaagaaagtattcctaatgcaaacgcgatatctgtagccattggaattccccatcctattatagttggttggttgaaattgaatagcgcataaattatagctggtacgaccatcccacctatagctgctgatacaggcagtatagtttttttaaaagacttgagttctccaaatactatttctctttttatctccattccaactaccaaaaaaaatatagccatcaacccatcattaatccaatgcaaaattgacatagataaagaaaaatccttatacccaatagttatataagtatgaattatattattatacatactagaaaaatttgaatttgcaattattattgcaataattgcacaaaacagcagcactatcccactcgaagactcattcttaaagaattgcaagaatggatttttaattttaattttgtttttcatactttactctccttcacataattatttattcccaaaaatcagcaaaaataagatattaatttcttatttaaccattgatttattaaaactctatacaaaaaagaggtgggaatactcaaaaagagtttcccaccccagaaactaaaattgcttgaaagcaaattataaaatttgcccaaccgtacaacttaatatattcatttatttcttattaataattatatcatatattactataatactcaagaatggtaactaaaattcacattttcttactttaactaaattatactaatataaacttttaatctgttacttagaaaatgcacctttaattgaacttaaaaaatcagagaacattttttctaacttatcaaaaaaaccttgtgcttctttgcttgttagcttatcttttaattgattcgttacatcatccatctgcgcttttaaattattatagttaagatctaatgaatttattttactcattacatctttaattttagctatatcatcatctgataaattgcctttatagtctttaacagccttatctactatcttatttaattcttcatctgtttttggtttttcctttactacatctttttttatgtcattcattaaattactagcatcattttgccctatcttctctgcgatatctcctgtagtaaccaattcttcattagctgcttcttttttattttcatcaatcttttttcctgtactactattttcaaatccttttaatattcctgtaagtgcagcagttcctgatactttaaatggcgcagatgcttttacatttgcattttctactcctgctgtaatcaacgcattttttatcatgccgtcattaacccaagtaagattgtttgtagtaacatttattcctcctttttcagtcggttctacataagaacatgatattgctttattaccaagttgagcttctgttgcaactttacctaaatatgaatgttcttcctttgatgttacctctaatacattagcatcactttttgttacttcaaaatattttaacatttctgccttttgagcatcgcttaaatcagctcctaacgtaacagatttaaatgaatctgcaaacgcctgtcttcctgtaactgaagtaaaaaacaaactcaaagttaaagatgaaataattgcttttgatataaatgatttgaatttcatattttctattctccttatattattatgctacaaattatgtccaaaaatttaatttcctttattcccgttcattatagcacaaaaataattaagttttatttattattatattacttttatattaatattttagtatgcaataaagaattctctccaggtcttttggagagaattccattatatttattcaattttataccgtaagcatattacctttactaaacttcaagaataagtacttgatatccttgcaatatgattttattcttatctttctttatttcttcacaattatttattaacactttaacatattgtttatctaactcaataatctgctcttccttttggtaatttgcaagtatcattaatttcttagattctccttgtctataaaaagcaaacaagttatcatattcctcaaatgtcggtacgaattctccgtatactatggcatctttaaattcttctgactttcttaaatttatcagcttcttataaaaattaaatactgattcctcatcttcaatttgtgaatttgcattaataactttataattttcattaactttaagccaaggcctgccagttgtaaagcctgcattttcacttccactccactggaacggtgttctagcattgtctctgctaaatatatttataatttttagtgcttcttcatcactatatcctttttcaatagctacattatattggtctattgttgcaatatcgtcaaattcttttatggaattgaatttgttatttgtcattccaatctcttgtccctgataaataaacggtattcctctaagcataagcgatattgccccaagcattttcttgcttctatcatttaagtcttgttcaggaatatatctacttacgcctctcggctcatcatgattttcaataatattagccttaaaacctactccacttgtctctaattgactgttaaaaatagcttttcttaactcgttaattgagaaaggtttattatcataccaaccaaattcactttttcccaagacttccatctcaaaatcgaagatagaagagaagtatccgtcttcacctataaatttatcaagttctccttcttttctgttgaaaacttctccaactgtaaatgcatcaaatttttcgaaggttttctcttttaactcatgtaacatgttccctacgccttctgctgcttctaacattctatctatactgcaaagtccatcttctctatcagctggaaagtcttgaaatctcaaatccttttttatgttaataatggcatcaattctgaaacctgctaatccttttttaagccaccagttaaccatcttaaatatttcattttttagtttcggattttcccaatttaagtctggctgctcttttgcaaataaatgcagataatatttattagtgttaggtatcttttcccatacgcttccgccaaagtaagatcgccaattacaaggatgattatcacctttaccttcacgaatataaaaataatctgcatattctccttctggatcatccaatgctttcttaaaccactcatgcttatctgagcagtggttgactactaaatccattaatatatacatatttcttttttttgcttgccttagaagttcatccatatcctccatagttccaaaccttggatcaatattataataatcagatatatcataaccttgatctactaaaggagaacaataaattggtgatagccaaattatatccactcctaggtcttttaaataatcaagtttactgataatcccctttaaatcacctattccatctccatttgaatcacaaaagctttttggatatatttgatatgctaccttgtcatgccaccatttcttcataacgtaaaacctcctaaattagtattgaatatatttatcttgctggattagctataaacgccttgccatttataacttccactgtttctccatttatgactaaagttttcttatttaaattgtgaacgataaattctatattttcatatttgtcatcatatctataatttatcaagtcaatttttatttcgattttctccttattgactactttaattttataattattaaattctcctaattcatatttaaaactttctccatcatcaacatagtgattatattcggtatcagaattatcattagatagataaacttctatagttaatgaattagattgtttttcaccaatataattttgtacttgccctactggaatcaatgttcctcctttaataaatatcggacataggtctaacggagtttttttaattatatattgtccacctttatattcttcttttgtccaataatctatccaattctccccttcaggaagatatatgcttctagcttttaatccttgctcaacaactggtgcaactaaaatattatctccacaaaggaactcatcattaatttcataagtatttttatcactctgataattaaataaaagcggccttataagtggtgctccattcttactacactcccacatcatgtcgtatatatatggaattagcttatatcgtaattttatatacttcttattgatttcctcagtatctttatcaaatgcccagggttcttgatctcttgttcccatagaagaatgatttctaaaaagtggagtaaatgctccaacttgaacccatcggcttaataattccccagtacaatcatatccaaagcctcctacgtcagtcccacaaaaagccattccactaagtcctaggttcataagcattggaatcgacattcttaagtgctcccatgtgctttgattgtctcccgtccacacagttgagtatttctgagttcctgcataacacgctcttgttactacaaaaggtctctttccagttgctttcttcactccatcataagtagccttagccatcatatggccatatacattatgagcttctttatgattaactgtaattccatcattattgaacattacatcatctggtaatggtcctctaaagcttgcaggttcattcatgtcattccagattccactcacacctgaatctatcattatcttttgatttcctgaccaccaatctctaacctttgaatttaaaaaatcaggataaacagcatctcctggccaaacttcatttacatatgttatacctgatttgtctgttgcaaaatacccttttctgagtccttcgtcataaatcttatatcctttatcaactttaactcctgggtctattatagttaccactttaaatcccatgttatttaattttttaatcattacttctggattctgaaatttttcattatcccacgtaaataccctatagccatccatataatctatatctaaatataatgtatcgcaaggtatctccttttctctaagagtgcttgcaatttccatgagtctttcttctgagtcataagaccatctgcattgctgataaccaagagtccatatttgtggcaaaggcattttcccagtaatttcagtatatcctttaataacatttttaactgatggaccataaataaaataataatctaaattcccatcaactgcagcgaaataataatattcagaattatcttttcccatgtcaaaatgagtctcaaagtggttatcaaaaaatattccaaatgcattatctttgctcaatccaacaaaaaatggaattgatttataaagcctatcaaatgtttctccatggggctttggattatctgtattccaatttacataatgatatccttttttatttaaatgccctgtcttttctccaaaaccatagaaatacatttcttcttccattctttttgatacatataccttgtaatcagattcttccctaagagaatgcccctctgattctgcaagcatataatcaccatatcttcttttaaaaggtttactttcacctctataatctgcacacagtaatgttcccctcttatcataaatatctactttaaattcatcataaatcttacaaactaatttttctgtgattatctgaattccatttgttatattttcaactttaaaatcataataatcatcttttaaatttccaactgctttagaatttctttcctccctatgtaaaggcacaaagaaattaattatatacgaattcaatacttttataaaaacagctttctcttggaatctaatattgattatgttattttcgattttatgacttagcattttaccaaatttcattttttcttcctgatattttcccatacctagtacctccattgtttcaacattttctaaaaatgcttttattcccaaaaatccacttaagatttttattaataatatcttttacttcgactatctattattttataaatttattacttatttaattgcaccatctactatgcctttaattatttgcttttgagcaaataagaataagatgataattggtatcattgctaaaaatgcagctgaaagaattaagtcccattgctttacgtaggatcctacaaaagcacttactgctactggaagagtttttattttaccatttaacccaagcattaatgatggtaatagataatcattccatatccaaattccatttaaaatcaaaattgtcatttgaactggctttagtagaggaaaaataattctaaaaaaagttccttctgggctacagccatcaatccatgctgcttcttctaattcacgtggaattccttttataaaaccatgaaggataaagacagacatgcttccaccaaatcctaggtaagcaaatatgacaccttgataactttgcagcatttgaattcccagaaaattagatatatttctgaatgtggaaagtaaagggagcataacaacttggaaaggtataaccatagctgccacaagaagcataaaaataaatccagaccattttctcttatttcggcaaagtacccatgctgtcatggatgaaaaaagagacaatagagccaacgaaacgattgtaataaataatgaactaaaaaaagatttccaataattaaagctatcgttgtgtattacatttttaaagtttgttaacatctgtccccatttattaggaatagaaagagggctgattacaatatctgcacttgttttagctgaatttaaaatcactaaaataaatggtgaaagaattataagagcaagtataattccaataatctctccaatcatacttcttgtttttatcgacttcattatacttctacctccttcttcttacttatatatacctgagttaatgatacaactgccaatataataaagaatataaccgccttagtttgtccaagagcatattgatttttgccaattgcagtattataaatattaagagctaaaaactctgttgattgaacaatatttccatttaaaattctactaggagcaccattagttattgctaaatttaaatcaaactgcttaaacgaattaaccaatgttagaaatatacaaactgtaaatgtattagcaatcattggaatcttaattttaaacagtgtaacccagccgcttgcaccatctacactagatgcctcaagaatatcttgaggaacattttgtaatcctgtaacataaatcatcataatgtaccctgcatattgccaagtgctaactattaaaattgccattaatgctaaattagggtttgtaagcatagacgcactaccatttattacgactgtgaataccttattaaaaataaactgccacacataaccaagcacaattccaccaattaaatttggtataaagaaagctgcacgataaaaattttttccttttacttttgatgtacaaaatagtgctaatgcaaacgctgccgaatttacaagaatcatattaacaactgtaaaaataaaagttactataaatgaatatacgtagtcctcagatttaaacatacttatataattgcctaatccaacaaattcagtaaacttaatcccattccagttagtaaaggaataaaaaacaccgcatacaaatggtattaacacagttacaaaaaatgcaaatagcaatggaaatagaaatagtatattaattatcattctatgcttcttagttggaaaactatataagcctaaaattactaataaagcacctacaattaatatagttccacgcatcgtgtttttactaccaataatatctagatatagtgcaaaagccatggctaaaatgccaaacaacattactccgattgaaagcaatctttttatatttgtattcatgctttttcctcctaaacttgaatgattattataatcattgttgtaattgcccatactttgcgcttatgcttccccccttttaatatttcacctgtacaaaaaatataattaatataggttactctatttgaaagtaacctatataatttatactacagttattattttgccatataatctgaaactgctttcttcattgcttttgtaaatccatctttatctaattggcctttagcatacaattcaaaaacaggtcctgtagaattcattgcaataccatctttcatatgtgtccaatcccatgcataagtttgattatttttaatataattgctctcgctctttgctaaaggtaagtctggttcaatagtgcttgtcttaaatggtgaaaccattccactatcttttatcaaacatttttgcccttcttctgtagagacaaaagctttaagaaattctttgcacgcatctatttttttactatctttataaattccccaataagctggtgcatctgctaaaatacctggggtatcttttgtagtaaatgctggtggcgcaattccgcaatcaaacttcacatcatatgttgctaaagaaggatctatccaatttccttgagtaataaaagctgtttttccctttgcccataatgctaactgatcatcgtaagtacctgatattaaaacagtcttgtctgcataatcaaataataattttacatagtcagcaaattccccaaaacgctcgtcgtccaattgtcctttattcaacatatcaatatattttttatcttttctatctagtccttctgataaataagcccccatgatatgattaccagttgaccaatacatttgtcctgattctgctgctactgatgcaaccgcttgaatacctaactgatctttcattccatcaatttttttgaacgcttctttataagcattgatgtttgttaaagtctttggatcaatcccagccttcttcaatatatctgcattatacactaatccaataccttcaatagcaaatggaaatccatacaccttaccgtcatcacccttaaatgcaaaatcagtatcttttatccattcttgatcacttaagtctgttaaataatctttaaatgaaacatacgaatctggtccaaacgcatatatatctggcatatttcctgctgctaaataattctttaactgtccattaacatctactccacctccaagagattcaatatctacctcttgtccagttttctcttgatatttttttgcaaattcttttagtggcttgtcaatctcaattttcgtatttacgaagcgaattgcttcactattcccagttgatgttttagaatcagaactagcttgactcgagctacttccacagcctgataaagaaccaattaccatagcacttgcaagtaatgctgctaacacttttttcctcatatcttttcacctcatatacatttatttagattaatatgatttatatttacattattatgcctatcttcgagtcattatgtttagcgctaaactatatcataagattaacattgtttcttttttctgtcaatcgttttcatatgcatttttacctcaattatctacattttttatatttactattatatatatctaatttaataacttaagaattcttagtacttttcttttgtttattcaagtatttaatatctcgtaaacctagtgattaaacctactttaaatactttacttttcttatatttaaaggtcatgaggtatctttcccatacgttaattcttatgattaatgcatatgctctcattgcaataatatgtaatatatattaatattatctatatacacttatcttcataatagtatatcggtaaactaggaggcaattatggttacactaaaagatatcgcagctgaagctggtgtcagtatcatgacagtatcaaatgtaataaatggaaatcattcaaaagtatcaaaaaagactatagaaaaaatagaaaagataatacaaaaatataattatgttcctaatctaactgcacgaagcttgacagctaaatcctctaaaattataggagttatagttcccattaaaggttcgtttaataatttatttaaagatccttatattagtgaattatttggcattatacaaaatgtagttcgtgaaaacggatactatttaatggttcgctcagttaaggatgtttcagatatatctgcattgcttaaaaattggaatatggatggtgctatatttttaatgcctgactatgacaatcttatctattcaatattaaaggaaaataaacttccaatggtatttctagatagttattcaaaaattgataacataataagtgtaggtataaatgattataaaggcggttatatagctactcgctatcttataaataatggacataggaaaattctatttgcagggccatgtcataaagatggtatcccaattcctcagattataaaaagacttgaaggctataaagatgctttattagaatctaatattgagtttaatgaaagtctcatagtcgacgtagaacctaactacgaagttggtatcaatttaggcaggtctatatgtaataaagaatttgatgtttctgctgtatttacaacggctgatattatgggaattggtataattgaaggtgctaaattaaatggaaaaattgttcctaatgatttatcagttattggttttgataatcttctaccatccgtttatgttacgccaaaactcactactatttctcaggatatagagtctaaagcaacaaaagctgtagatctactcatagagtatatcgaaaagggttctgtatcaaacaacaaaataactttagatgtagaattagtcgaacgtcaatctgttggacaattatctaatttaaaatagctggcaaacttagaaaacatcaaatagttcacgttaaactatttatttagctcattttttaaataaatctaatggttataataatttttaaaaatatagatatttgttgaatcctgcattatgcttattagtacaaatggcaattgttcttattaaacaattgcctacacaatattataaatgcacatgtttctaacaaagttatatattttatctattaggcttcttctttaagtatatctctaataaggatagtaagggtacggataataaggataaggtactggtggagcgatataaggcaacaaagctacttctgccaaagcagaaagtgggaaatttctacgtctgtaacgtctaaatctagggttataaccatatcttccatattgcctttgctgattagagtttccttcactctctttctctattacgtcttcaccgattaatactgaaacattatctccatctacattttcaataattccatcaaatgtacttccatctgtcattattaaagttgctccgtaatacatgtattttttgcaattatcatataggcctcttaaatctctgtagttatctttttctacatccattctttaaaccatctccttccaaatattattttattcaaaaccaagaaggattgtgataatttatagcccaaaattatagtatttcgtctacattaacttttctatagcccaaattcctccattcaaatatataatccttgtcatatatagaatcatgttttatattttcattcatatcttgcataccattatttattatcatattttctttatcagcattcataacattatctttcattttccccgtcataccttccatattttcattatccatcatgtgctgatcaatagaaagcattccttcaatcattttttgtgctttataacttatatttgaaacatcccctaatataaaaccgtgcataaatggaggctttggcattcctttgggctgtataggtttaattaagttaatatatctatttaccacttctggtattttatctttttcaattaaaagaagcggagtatgttttcccatatgagcaaatactacactagcaataattttcattggctcattaagttgtccaaacgtaaaagcatgacctcctctataatttcgtccccacccaaaatcagttttcgtatcattatatctagaaaaattaactgctatttcgtatggattttccccgccaattctgtctacccttttaacattatctaatcccgacaaatagtattcaacatcttttgatattgttttagttgaaccaattatataaatattgatatcattcattttcttgattgcatcaatagtacaattaggaattctgtttctttgtacaaatagaataggatctccatgatgtgcagaccaataccccgcaataattccttctgaataatcttcccctgaaattataagaatattattaaattcttttcttatcctagatattatgcatgcagtatcgtaataattgcgacccgatatatgctttgttttataaccatgatcatttaatgcaaaagatacatttttagaaatattaccgactaaaattacttgtaccccattatatcccttaggggataatctctcaatttctcctaaagttttttcatttaaactattaccatcagtaaacaaaagtgatgcattaattggaaaatgaactaaggatgttgctgcaattccatcaaaaacttcatctttattgactaaaatcacagcatttggtttcatattattaaaaccaattttagatatttctatagaagtatctaattcatcatcagcacaaattctagtagtatttagtgtaaagggacaacttttcaaagcatcattcattgatttttctcctaaaactttttaatatataatatgattacaagttatattttgtcatgaaacaaaaaaagaagctaatcattatgtaaattattgattaacttccttaaatataatttatctataaaaaacgtaacctactctattgtattagaattattgtcaacttcttcatttctttcacagcacttttcatttttaccacctttaaacatcataatcatcattaatatcatcattaacttcatttatattacttttctaattgcttcacttttttgatagcattataagcatctataagtccatatcctgattgcttatccttacctttggacataatatcctttgcagtactatctaaaacatcttcaatctgacttggagataaattaggatcttctgctttaaccatagctgctattcctgttgctactggtgctgccatacttgttccatcccatgcttcgtaaccacctggaactgtgcttaatatttccactcctggcgctgaaacttttatacaattaccataatcagaaaacgaggcctttttataattataactcattgcagctactgtaaaagctccgtctccagctggacttatattatcactatcttcattatcattaccagccgcagctacaacaaatactcctttactcttagcataacttattgcttctgcaattaatttactcttctcattagctccaaaactcaaattgattatatcagctccgttgtctgcagcatatttaatacccttaactatatcatttatatccccttccccattgctatctaatacttttatcggaattatttttacatctaatgtcccatcaattcctgctataccaatattgtcattagcatttgcagctattattcctgatacatgagtaccatgaccattgtcatccatagtatcagaattattatctacaaaattataccccttgctctttaatactctattttttaaatctggatgtgtgtaatctactcctgtatctaaaaccgctacattaatttctcttttttgttttattagaggccatgctttatccgcctctgtatagcttatataccactcatacttatatccaggatcatttacagctttattagtattttcatttatctctcctaatctaaaatcactttttaccggagtcttctgtatcggttttattatttttataattttaggctcattgattattttaatcccttttatatcaccaattccatctaaaatgtattgttctagatcttttggtgacactaagttatatttattattattattatttttatcaacacttattatatctttcacactacttagaaggctatctaaatcaccgcttcttagtgattttacaaaattgcttacactattactcgtactattcatgccattatttctaggtaagtaatctgaaatagaaactaatgtaaatattgaagctgcaattattataaatttagctaacttacttctcataaaaaacctccttaaatcatagttacttacttatatctttaattatgaacaataataccttttataaacttcatttacctaattgttaaataataatacatcataattgtgtcgattttgtgaaattctttattttttattatatatatattgcaaaaacaattcttcatcataattctaaaaatattgcaagaattttagatgtaattgcgaaatgtgcactgtgaattgcaacatatattatctgcttataataaatatcttcaatgtatatcctaattaaccaaaaaaagactgatatacattaatttgatatataccagccctaattctcatttattctttattcatttataagtttcttacgaacttcatctaaatttacagtttttaatgaatctgtaacttctattcccattgcaactacattgtctttaacaattacgtatgttccactcttgtctatattaaattccacatttactacatcttttctacctgtaaaagtagttacctcgtctccactatctgcattatatattatgaaaactccatcagccttatcaaaggaattaagatctacagaaagtttagtctttatgcctttttgtagaactgctacaagtggttcaaattcataaccagttccctttatacttagattttgggtgtctcctgaaatattagcttttttaatcaacctatcagtagaaactttactcaaatcattaccatatatacttggagcttgaggagtattacttgctgaagttcctgtacagcaactcatcccactactaggagccggaattgatgaatctgctttcgatgtatccactgaatcaagattatctgtaactttaattatccctcttatcattcccatccaacagctaaagtttatgtccccgtctttaggtgtaaattctataacattttctccagattttaatgttttttggatgttaagtgatggcactactactgcattattacaagaatttatttgatttcctgtaattatccacttaacaggcatatctttttgtacgtaaaatgcattaggagtatatccattattatctgctgtcattctaattacttgaactccattttctatcgtcgccttacctatattggattgcgcggcttgagctccatctccagaaaaattttgtgctagtgtactagcatttggaattccaactccagcaagagctaatcccctattccccattattaatccaagtactactactaaaatcccactaaattttaaaagttgtttcgtatatcccttacttaaaaaacctgatacagcaccaaatataagcatcaaaggaactgttccgagtgaaaataaaaacattgatattgctccatttatggcactaccggtacctaatgcataaagctgcattgtctgaagtggaccgcatggcattaacccatttaacataccaactaaaaacggagccttaggtttatttttaattttgcaagaggaccatggcagcttaatattaagctttctaaataaagaaaagcctgtcatatttaatcccattattaccataaataatcctgcaaatatttgcaatccagcttttacattaagtgatagcgataaaacagaacccaatgcacctacaataccacctataattgtatatgaggttactcttccagcattatataaaatcgaaggctttaaagctttaaatctattctctttttcatctataatactatttttagataaactttgtgtaagcattattccaccgcacatgccaacacaatgtatagatgtaagcattccaacaataaataacaccacataagacgcattattcagcttagcactcatatcaaatcctgctgttgaattgccaagaagtaagactgctgccgctataactaaaaagccagcaaattttaagctaaccgaattttttgtactataacccgccttattaatagcttcttttaattgttccatactgcaaagcttgctatcatattcaaccgttacctgctgtgcactatagctagccatagcatttaaaactccatcaattttcattaaagctctttccactctattttcacaagacgtacatgtcatatcataaactttaatattctccctcttaatacccataatctcctcctaataaatcgctgcttattatagacagtgatgaattttaaatcataactcaaattacatatatagattataatataaagttatgaagattttatgaggatataaaaaagtacagaaatttttctgtgtacttttataaatatatttgaataaactccatatgcttctctttcaactaatattgcattatcatgtatttaataaattaacataaacttataaattttatgtgtaaaaaataatctaccatttgataaatttattaagataaatttccagtataactattaacttcatagtattgactacataattaggggcacattaagattataaagaagttagcagttaagcattaaatattcaagaatgaatatgccttctcaatatagagtcaaaagacttaacttgagaaataaagatgcaatcctatagttagagttttctataattgattagttattgtagggttacgcgaaaattgcaattatgttagtctgttgcaataaggtttgattgttattttctttatttaaggactgtagataaacttattgtatgataggtttatctatggttttttgtctttatgaatatttaaaaaataatttatgataagattttttgcataatacttaacactatttaggctctcaaaattgctttaaatattaaaagttcattttacgcagtcactaagtagtttctctattatttaatcttctctactctcttacccctgatgtttcctataaatatttatatattttc

SEQ ID NO: 37 - DNA, 49965 bp, Clostridium beijerinckii
gtccatcaactatttctgtaatttcttttattacttcattgaagtctcttccttcttttgctattaatgatggatttgttgttacaccacatattactcccatttcatttgcttctttaatgtgttctacatttgctgtgtctaaaaaaaatctcattttaatctacccctttattaattataattcttaaaactattattctacattgatatgattttttgctgcttcactatctgataaattatctcttctactcattaataagcataaatcatctaatactatatggacagattgatcaaataatgaacttagtagttgaattgacgaaacaccggtatcattctttgtttttcctggaacctcaagtacaagatctgatacttctgcaagtggagagtcctttttacttgtaactccaactatagttaagcctaaatcctttgctgcttttgcattacttagtgtattttttgtttttccagaacctgatattgcaacatatatatctccctttttgagagctggtgtaattgtctctcccataacataagaattataaccaatatgcaccaaacgcattgcaaatccttttgcttgaaatccgctacgaccttcgccatctacaaaaatctttttttctttttggagtacatccattatttttttaatcgcttcttcatcaactttgcttattacatctttaatttcttctaatatttgatctattactctcatttatctattactcccttaaactcttttactttttccaccttatcatcagcactagttattgctgatcctactataactagctctatattatatttattcaattctggtatggaatctaatgttattcctcctgcaactgcaattcttttaattgaaggaaactgttctttaaatcgcttcactgtttcacctggattagctagtttttctttatcaatagaggaatgtatgcaataaatagcactgctgaagtgtgatatttccttaattttctcatctgaacattctaataaatctatcatcattgtcccattatattgctcagaaacttcgtgacatttttctatagttccaagtgatgcactccccatcacagttagaatatcaaatccttgtttgaaaccttgtttaaattcataagcaccttcatcacttgtttttatatctcctaacatttgagatttacttttttggcttgttatatcttttaatttaagaagtccatagtcttttattaaagatgttccaatctcaataatatctgctaatccatcaaaagttttaactaagttttctgctttctctaaagacaccctatctattgcaacttgtaacttcattttatcctccttaaattcttatgaaacttttcttttataatttttcaaaaaattatctaattcatctactgttggtaatccctcattatcacttagatgcattacttgaattccaccaatagcgtttcctctttctaaaattttattatcttcaagattttctaaaattccgctaataactcctgctgcaaatccatctcctgctcctactgtatctaaaactggaacttcaaagcttggacattcagcttcttttatttgtccattttctaatttctccctagaatacgaaccggtagttcccatttttataactaccttttttacacctttgtctaaataaaaatcagcaatctcttccttgtaatcttttcctgtaaataattttccttcgctgaaaccaggtaatacaatatctgatttaaatgctaactcattagtcacttgaatcatcttttccttgctctcccataatactggccttggattagggtcaaaagtaacaagcataccattttcgtgagctttttctatagctttaaatgttgtttctaaagttgttttgcttaatgctggaaaaattcctgtgatatgaagcacctttccatctgaaaaacttatttcatttaaaatatctttagttattcttgatgctgccgctccttttctaaaatatagtacctctggatccccctcatcagttctatttttaaattgaaatcctgttggtgcttctttatatgtctttacaaaagttgtatctatattttcattttctagatatttctttacatattgcccaaatggatcttctccaacttggcttatatatgtaactgtatgtccaagtcttcttagtcccatagctacattaagttctgctccagcaattaaccttgtaaaatgttctacgttgctaagatgttctttagtatctgctaaaaacattaccattggttcaccaattgtaataatctcactcatttttttcaccctttccgttgccaatctatagcaaaatttttcttacttcctctaattctcctcgtatatcttcatttctaattggatattcgatcattactggcacattattagataacttctttaacattgccttccaattaatttgtccttctgacagtaaagttgtagtaggcttattatttagaaactctacattttttaaatgaaatactgtaatagctgaacgtaaaatatcaaatgcattttcaggatcttcattctgccaataccaattgcctaagtcgaaagtatatccgattggtaatgaatttttgtttataatatcaatagcatctattacacattttaaatttccattttcaggagtttgatcattttctattgttactttaatctcaaatttataaataatatctcttaatttttttatttcatctaagcttaactctactaagtcacctatattgaattttatgtgacttgcccccatcagttttgcttcctcaaaataaacattaatatctggatttaatttcttttcgcaagctactttctccggaactgaataatataattctattccaaattctttagctaatttatttataatcggaatttcttccgctaagttctttagacattctcttcttatttcagctatatgaacacctaatgcctctatttgctctaatatttgttcttgttttatccctttatctaattcatttttaaatactaataaatttatacctagttgattcataactatccccacttatttttttatatttcttgttgagtaatttagatgtattttaaccggtatttcttctaagataaaatcatcttttctacttccatctattctttcaaatagtagcttagctgctctttctcccatttcatatgggttctcatctattgatgtaattcctgggccaattaatcgggcccatttctcctcagcaaaaccaaatataccaatatctgctccaattcttatatttaaatcatataagcattctataagaacctttaaaatttcatcattatttgcaaagaaacatatatttttatctttatttttatttagaatattttctattatttcttttatatcatttatatcattttttttgataatattagtttctcctgacgtatttgcatttctagatagaaattcttccattgctttctttctctctattcttgaacttatcccatttatgtcttctgaaaaatatacataatgatcataatcattctttagtaactcatctaatatgtttcttgttacctctgaattattcattgtcaccgaatcataaattaatggatttataaatctatccaataatactattggtttaaaattatcactatccttaaactcttgtaaatatttatagttattacccgtagtattaactagtaaaccatcaacttggctatctaacagggattctatgttctctctttctctctctgctagattgtcagcatttgttacaagtagctgataattatttgctctacatacgtcatttattcctttaattagtaatgaagaaaatgggtttcctatatctgcaattgttaccccaattatattggaatttttagcttttagtgtttgagctatacgatttggcctatattttaatactttaattgcttcatctattttttcttgagtttcctgtgacataaattcaaaatttttgtttagatatctagatattgttgtcttagagactcctacataagcagcaacatctgcaattgttacgttcttttgtttatctgtagaatttttcagcataacttattcctccattcaatacttttattatcaatcttaactgtcaaagattcaataatttatgctactattctctatttttctttaacatatttattaatcaactcaatcagattaaatcgctttaacaatcgtattcactattagtttatcgttttagtttaccggtttctaaagtgataatataatgttaagactttcaccaaaaaatgtcaagccattactaacaatcatttatatattaatctgattaagtttattattctagatatcctttacaaaaattttaaataaaagacttacctctatctcttaaatattaagtctagtttgtataagattctttttatactataaattcaataacctaatgaattactaatttatgaagcctctactgcattttctattttattcgataccttagaagttttaaccgcaatcattagaaatactgataacaaaagtgaccctgacataaatatatatgatgcatctactgagcctgttataccattcaaatatcctacgacatatgagcctgcaaatgatcctagtgcacccatactattgattaaggcacttgctcctccagatacattcttaggtaatatttctgtaattattgcaaaaaacggaccataaggtgcatacataacccctcctgcaattacaagtaaaatatatgataaccaaaagtttgaagtcccaattaaatatgaaccaaaaaatgcaaatgtacctattaataagtatgcccaaacaaatgtctttctatttccggtacgatctgaataataagacgatactaacatcaatactactgctaaagcatatggcaatgatgatagccaaccggctgaaacaatgctaatttgaggacttgcctttagaatagatggtaaccacattacaaaaccgtaaacacctatactccagaaaaaatattgaaatgataaaattattaccttaggtgatttaaatgcttctctataattttttactggttttatgcctttttgttcttcttccatcaccatatcaatatctttcttttcctgttcagttaaccattttgcttcctttggtttattatctgaaagtttcaaccagaagaacgcccataaaattggtggtattccttcaagtataaacatccatctccatcctacagaatttactaaatatcctgatacaatagacatccataaaacagtagctggattacctaaaattagaaatgtatttgctcttgaacgttctttttttgtaaaccaattacttaaaaaaatcaacatagctggcataacagcactttcaattattccaagtatgaatctagtaaccattaaaacttttacattcgttatcaagccatttgaagcagctaatatcccccagaatattaaactccaaaaaactaattttttagcacttttcttttctgcaaaccatgctgctggtacttgaaaaaagaaatatcctaagaaaaataaggcggatagaagagatgctatcgatgctgtaatatgcaaagattcacccatacctcctgcaacaccaaaactataatttgcacgatccaagtaagctaggctataagtaataaatgctactggtattaatcttttccaccttttagaagttaattgaatacttgatttatccatttcatatcctcccataataatcattttaatttccatataatttaataattaaaaacaattttagctttattgtgcaatcatttgttcaatttataaaatttattattccttcagcgagttcataataatatcgattatcttcttacattccccctatgcttatcacgctacttcaaatattttttgattttttaaacttgagtttaaatttcaatattttttatactttagctttagtttatcgttttagttaaccggtttctaaacttaatataatgttaacgctttcaccaaaagatgtcaagtagtatttataaaaagttaaaatcaattatctgtataataaaaaagccactatagttctagaaggctttattccagaacatagcggtttaatattctccatacaaattatataaatttacttttaatattttttgttctctaaattcaaagccttataaatagctttagcaactccagcattgtcattggtatcagttatatacttggctatttcttttatttctggtactgcattttccatagcaacggattcagtaaattcagtaaacattgagtaatcattaaaactatccccaatcaccattacttcatctctttttatccccattttttccgcaactcttgctaatattaatcccttttgtgcatttttattatttatttctatatttttagtaaaagttgatgctatagcaagttcccctattgattccaatttgttctttacctttttagttgtctcttcatcgttataaaatgcaacaaattttcctatcttaacattactattcaaaaaatcgtttatatctttaacatattttaaattaataaaatgaggatgatttttagccatttccatagcatcttcaaaagttgtttctgggtcgaataccataattctgtatgcaacttcagttaatgcttcctctcttgtatttacactatataatccatcattagtataaatttcagctataattttttcctttaatatcatatctataatttctcttgcttgcttactatcaatgtaaattccttctaatacctttccattctcatctatgtattctccgccatttagaacgacacattgacattttaaattagattcatcaagtaggggtttaacatcttcatacattcttccagtagaaattgcaaatttcactcccattttctcagccacttttatagcttttatattttcctttgatatcttatgattgctattaagcagtgttccatccatatcagctgcaataagttttatcatcccttaatccctccatactcgtttatatattctacaacatgtatttactcaaaattttcttgtaaaatatttacctataatttctattatatactataatacaaaaaaaataaggctaaagatacttcttctctagcctcaaattctaaatagaattaattattaattttattctcttctatttatttatattattttttcatttattttattataactagtgccataatttcttacaaacataaactatcttaagtaagatgaatgcatctatatcatacttttttctcatgtatatttacatataactatgcatattgcaatttatatagaaattaaatctttaacgctaaaattaacattaagatcatgattttcatttatgttcttatattttattttagttgttttttgttctatatcaaaataccaaccttcttcgcttaattcccattcttttatatctaggaacatggcaagctttttatctcttaagttaacttgaactggagctatatccttacatattaaatctatattaatttctttaggctgcttgtcatatccgccttctttttcaaatgcaattttaacactattttctctcttcactgatattaacgtctttaagtattcaccatttttgtagttattagttacaccatcgtcttcatataatacaaagcttgattcctctgatggctctattagaagcttaagtgtttctattgaatcattatgaatattagctaagccttcagcaattggaattattgctccacttctaaagaacataggaattgagtttaatgaaacttcaacttcaatcgtctgtccaccttcatatgtctgttttgtatcccaatcaaaccaaacagctccttcaggtaaatatacttttcttgtttttgcacctttttctaggacgtttgcaatcaaaatagaacttccaagcataaaatcaaagctttcctcaagtaattttttatcatcttggaattcatatattaaaggcctcataattggtgatccttctttagatgcttcaaataacaatgaatataagtatggtactaatttatatctaagttttatagcttcttttatatattttgtataagatggatacatccatggttctgtaacagtattatcagtattgcaagaatgaattgagaatcttggctggaatattccattttgaacccatcttacaaatagctcaggctcaggtgctggtccaaaaaatcctcctatatcacatccttgatttgcaactcctgaaaggcccattccaagcattactggaatattgaattttaaactcttccagcttgtattattatctccagcccatgtttgagcataacgttgaatccctgcaaatccagccctattcactatatatggtcttatattttgataaacttctgcgactgtttcctttgccataagtgccattaaatttggcattattggtcttaaaccacttatttctttcttcatgccctcgaaatgacaaattgcttccgtattatttatttcatactcattattatcattccatatagatgtgattcctagtgaaactaaagattcttttaaatgctttttccataattctcttcccttaggatttgtaaaatctacaaaagaagcttgacctccccaatatctatctgtttgagatttttctccttcgtcatcctttatataagccccggcttcatcaaattctttgtatagcggattagaaattaacatacctggttttatgttaggtgccacacaagcccctttttccttcacttggcttacaaaatcttcagggtttttgaatctatcataattccaattgaatacatatctttttccatcttcccctgtagtatatcctgatgacataaagaaaccatcacaagggattccttcttctttacatctatctaaaaatcgtaagatagctttatctgaatctttatctaattctgtataatacatagttgatcccatatatcctaaagaatactttgtagacattgcagtttttcctgttaaatcagtataatttcttaccacatctttgattttaggtccatagatgaaaaatgtatctaattctccaccatcagcacagaaataactgtatttattccaatatccacttctttcacatcccatatcaaaagtggaatcataagaattgttatagaatattccgctagctatgctatttttattattaaattttatataaaaaggtatatgcttatataatggatctgtatgttctgaatcataacctatagtatctacattatgcattctcattcttctctttttcttatttaaatacccagctttttccccaaatccataaaaataatcttcatcatccatacatgaataatgataaattcttcctaagctatcttttacatatgatttttcttttaaatctgaatgtaatatattaccttgcttatctgtaatctctactccaaaaggttctttataaatatttatatttaaactttttgtagttaataaaatataattacctaaatcttcataactactgctaattgcttctacttgttttctttcatcttttaataactcgtccattttatctttccaagctgtcataactaaagcatatgatgcttcttcttgaaactcctcatcaaaagtacagcgaactcttactatattatcatttaaaagtataattctatatttagctgcattggtagtgatttctaaataattatcaatattttttagacttataattttattacttatcttcataatgctatctcctagtatatttattttataattttcaccttatttgcaatataagcctcgtcttatcaactattttagcgaatttagaaatgcttatctatttcttaataatacagttcacaaaatctatgattccatcttcaacttcatccctaatatctaaataatattgtatttcatgacgatatcccgaataaacttttgtctttaccatgtgccctgtttctgcaagccaatttgatacagcataaacaccttctccatacaaacctactggatctttatctcctgcaatattgtaaactttaattgatgttggcactttctctgcccacttaacaccaacaatatcattcattaaatttgcaaaataatatagtgaacgtatattaggctgtattagaagatcactatatatatctcttgcatggtctgcatttacatcaggatcaccacatgcccatgtatttgaggtaacaggattttcttcataacgttctgttttccacatccatcccatgagcatctctaagcaagaaggatcaacttcttctcctctaccttcatctattagatttttaaaaacaggtattactgaacttgctgtttgaattactcctgaagttccacataaaatcaaaccatcaattccttttccataaatggtagcataacatcttgcaaccatcgatcccatgctatgcccaaacataaaataaggtaaatctggatattcttcttgaacaattttacgaagtgaatgttcatcttctaccattgtcatataacctttatctccccaatcactccaattgtccgaaacataagcggtttttccatgtcctacatgatcatccgcagcaactataaaccctgcgtcattcaattttaatatcatgtgcatatatctacgtgaatgttcatgatacccatgcacaagctgaatgattccccttggtttacggagaggagtataaatccaagcttgtaccatatcccttttattaaatgattcaaaacttttttcttgaaaagccataacaattctcctttgcttagataaattttaatactattttttctattattagataaataccttataacttggacttatgcctttaagaatatgctttaccagaaagggcaggtactcttttgtgcagtgttacattagagaataagtttcaggcatttcttcatcagaagttgttccatatttgcttgtcaccagcttgtctggggaacatgcagaaatggtgcaacttctgatggtagaaatcctaaacttattctcagtaaccgaaacaacagagtacctgtcctttcggtgagtcatggtataagtctaggtttaagcattcagtactattcgtctcccataccaattaaatcaaatctttcacaagaaacaacaatatcaaattctttctttgctggtttcttgcattttactaacactgttctatctgataattcatagtaccatccttgttctgctttttcccaagatgatttgtttaagaaacgcggtatttgttcattgtctacagaaacccaatatgcacctttctctttacttactaatttaatcgtaagatcagatattccaccttcataacttcctattgtcttgaaagaaattttcttacgtgctcctccgcttacattgatttctgtattttcatatatacctttttcaaaatcattagttacaccatcatcattgtagaaattgaagcttctttctgcttctccaccgattaaaatgtctaatgtcttcattttatccgtagtaatatgctttacttcttcgtttgttatgaaaattccgtcgcctcttagaaacataggaatactgttaagggtaactggaatttctattacttgtccgcctttatattcagccatattattattcatatcataccaagtacagccttctggcaagtaaagttttcttgacttcgctcccttttccaatacatttgcaactaaaacagatggcccaaacataaatgtcatatattgatcatcataacaattaacatcatcttggaattccatgagtaatggacgcattattgatttaccagtagtatgagcttcatacattaaagaatatagatatggtaacattctataacgctgactatatgcattacgtacaaattcattattttcttcatacatccatggctgagtaacagtattatcattattggctgaattaatgcagaatcttggctggaatataccattttgaatccatcttagtaatagttctccttctggagcacctcctgcaaagcccccgatatcacaacctgtatttgctactcctgataaccccattccaacaatagttgctatattaaattttaatgtacgccagtctgttaaattatcccctgcccatgtttgtgcatacctttgaatacctgcaaatccagcacggtttataatatatggacggcggtttggataaagttcagctacagcttgctttccaacataagccattaaattagaatgcattattttaagttccgccatagtgcctggttttccatcaaaatcacatacagcattacgatcctctattccatcatattcacagttgtcattccaaacggttatagttcctttgcttaaaatattttctttaagtagcttcttccacgtttctctacctgatggcttagtaaaatctacaaatcttccaacaccgccccaccaacggccattataatctccttttccatctggatttttaataaatacctcattttcttcaaattcttttttatacggatgcttagctaaaatccctggttttaaatttggtataacattaaggcccatttcattcatttttttcataaattcatctggattcgggaatctctttttgttccaattgaaaatatatcttaaattatcttcttctccagaggaataaccagatgctagtttaaagttgtctatatacattttttcatcaaaatgctttttaattacttcatatatttccttatcgcaatctttttcaagttcagcataatacattgtagaagctgtataacctaagctttgtttaggaggcattgcctgctttcctgtaagttttgtgtaattatctaagacttgttcaacttttggtccattgataaagaatagatcaatgtctcctccatcagcttgataataactataacgaggccaatatccactaatttcattacccatatcaaatactgaatcataggaattatgatagaaaagtccaatggcatgatgattattgttatttaacttaatataaaatgggatatgtttatataaaggatctccaaattcaggatcatgcccaattgcatctttaggcgacatacgcattcttctacccattttatctaactttccagtcttttcaccaaatccgtagaaatgatcattttgtaaatcaacctcattataatgagaaattcttcctagttgatcacattcaaaagctctatctacaagatcactgtataacttttctccatttaatttatatatagaaaaatgtaatggtgatttagctagtactaatttcaatgtttttgtataaaatataatttctttttcattttcttcaaaaggaatatctaatgcttctattctttcacgttcttctgcaagtaaagaatcaaaacgatcctcccatgcagtcgtaaccaatgtataagatgcttcctcaaactttctatcaaaagaagctctaacacgtataatatcatctgacataaaaattatttttatatctgcggtatcccccttcactaaataaccattctgtattctatttatagacataaattcctttaataacatgtaacttcctcctaaactactaatttatacttattaatctatcaacaacctattaaggcgtagattgcccgtttataaacttgttatataggttgttcaattatgatttttttcaacaactgtcaaaactcaattatttaacaacctatatctatataacattataagagtagcaaaataacttaactgatactattcattaaattatcttgtgtaaaattctgtttccaaacatcctcatatttatatccagtaagactttcaacaacttcttttgtgtttgagtcaacatcatcttttaaaccaccatttttcaaacgttcaacttcatctattaatatctgatgagtttctttattaagcttaaaagtaaatgcaagtattaatgataatgcaaacaaaccaacacatccaataagtaaaacatatccaataatctgtactgtttgaggagattgaacctcttgacctttaacaaatcctccttcttgcaacacaacgccgattaaaaatgtagcaatggctacagtgctctttctagtaaaagtcataactgctgcaaaaagtccctctcttcttttcatcgaaacaatttcatcaacatcaggaataaatgggaacactgtccaaggagttagaaccgccaaggatctaaatgcaaagtaaactatagatattccaagtaaaatagcagtcttagcttcaggatcagctaaataaactccataatatgctagtacacttaatatcataaatgtatacgtaatcttatataatttagtaggtccaagttttaaaaataaaattccacctataattgttcctggtataccaataatgctaaatgaaagcaaatatgcaccaaaagatgatgaaacctttaaattataaacacagaaaaataaaaatacagcattaaatatatccccagcagtaaacgataataaataaagtcctaaatgtttcctgaaactttttagcttaaatgtagatgcatattccccaagcacttttaagtaatcactaaaattcctattccctttagattgagatgcagccaataattcttgctccatcgctggtgtaatttctctctcccaagtcgctttatatgttataaatatacaaatcgcatacaatattgcaaaaaataatccattatagaaatatgcataaggattcttttggccaaaatgtccaatcaattgtgcaggaacaaaggtccctaagaactgacctaaagaagaaataactaatctgcaagtagaaattttagttctatcagagtagttagttgtcatttcagtcggtagtgtttcccatggaattaataccatggctgcaactatttcaaataataaatagcaacttaaataaaaccagtaattcattcctattgtccatattaatacatagattgccattaatggcgctccaattaataaaaagaaacgacgtcttccaaatatctttccaagcttagttttataaaaattatcagatatactccctataaaaagactggcaattgcatctacaaaacgagcaactgcaacaatagatgccccttgtataggtgtaagtccacaataagttgtatagaaaaacaataagaaagctccaattattgtaaaggctccgccgcccattatatcaactaatccatatccaatacatctaggtaaagtaatctttttatcttttatagacatataatctacctctttctttaattaatatttttaattagcaatcttatatctaaatattgaagtattcctttgcattgttgtagcatataccttcaacaactgtttttagcaatttaatatttcctggtacttcaccattttctacccattctccgattaaattgcaggcaattcttctaaaatactcatgtcttgtatatgataagaagcttctagaatccgttaacattccaacaaaacgacctaataatccaagatttgctaacactttcatttgttcaatcattccatctttattatcgttaaaccaccaagctgcaccaaattgcatttttcctggaatcccctctccctgaaaatttcctatcatagctccaagaacataattatcctttggattcaacgtatataaaattgttttaggaagtgaattttccttatctacagaatctaaaattctagataatgggtacgctatactctcatcattaattgaatcaaatcctgtattagggcctattttttcgaacattctgttattattattccttagcgcagctatatgaagctgcatagcccatccaagttcatgataaagtttaaatacatgtgttaatgtataagttttatacttcttttcttcatcaatgcttactacttctccatttaaggctttagcaaatatagctgctgcatcttcttttgatgcatctgcataaactactgtcccatctataccatggtctgctatcctacatccaaccgaatggaaataccttactcttgagtcaaatgcatttagaaattcatcataattacttatagtgatctccgatattccttctaatttttttacccataaaacaaaaccatctaagtttatttctattcctttatctggcctgaaagttggtaaaacatttacattaaaactctcgtcttctttaagcttaatgtgatattctaaagtatcagtaggatcatcagttgtacatatagtttcaacctttgattttgtaattaaatctcttgctctaaatccttctccactcaataattcgtttgcttttttccaaattgctggagcagtgtcttcatcaagcggttcatatattttaaagaacctttgaagctctaagtgagtccaatgataaagaggatttcctatagacataggtatggtttttgcccaagctaaaaatttatcataatcactgccatcacctgtaatatatttttcatctataccattacatctcattactctccatttgtagtgatccccgtacaaccatgcttcagttatgttattaaattttttattttcatatatctccttaggatcaatatgacaatgataatcgataataggcatattctttgcataattatgatataactctatagctgttttattagataataagaaattttcatccataaatttcttcaaattcatcatcctactttcaaataaaagtttaatatttgtaaagtattgaatggattttatttaacggtacacactctgctaattagagtacattatcgtaatctttatatatccaacaccctactataacgttttcttttacactaatctttgtaaattttcattacttagattatgttcccaactctaatatttctttaaatcttcataatctaagcaagattgttagttagtacaatttgtgttataatgtatttcttaataattttcttagcatttttatcattctttgtttatattatttgccagaatataataaactggaatgataaaaatgttattttttacatatctcaatttcaccataaactatctgcattctaagtacttttctaaagtagacctaacagcaccagttccagaaatcatttcggtgaaataaccttcaattttttctcctaatcctatgacataaagatctacgccaaaaatttcttcatccattagtatcggttttagagtatctcctaattgttctatagttcctaattttatattagctacatatttatttagttcatctaataatggatctggacttaattccattgcattaccatcatcagctattcccattaaatatctgcaccaacctgcaataacaagcggaatgtatttaaggtttttagtatctaaatctactctatctctgtaagccttgattgtctccccaaatcttataccaaccttttgagatgtatctgatgcaatcctttgaggagtatctggtatatatgggttcggaagtctaacttcaagtacttctttaataaaatcttcaggttttaatattccaggatcaacaacaactggcattccttcgtcgtacccaatcttttctactagtttctttagagtttggtctttcatttcgtctgcaattaaattatatccaagtaaacatccaaagactgctaaagaagtgtgtagcggatttaaacaagtacaaaccttcattttttcaactctctcgactgtttctctgtttgttaaaaatactccagcctcttctaatgccattcgtccatttgggaaatcatcttctataacaagatactgaggtccttctacatttacaaaaggtgcaatataagtattcttgctagtacatataatctcagtactgtaaaaaccgttttctcctagagtatctttaacactttgagatggtctaggcgtaattttatctatcatactccaagggaacgatacctttttatcatcattgatatattgtagaaatcctttatcaactaatccattttcagtccatttctttgctattgtttccattgcatcatgaagcttttcaccatttttcgaacaattgtccatactcacaaaagctattggaagttgtccattcttatatctcacatatgctaaggaagtaactttagcaataatacttacaggatgttctaatccatctgttatatcttctttaaatagattttttacactataacctttttcagttatcgtaaaacttgctatttgtaatgctggatttgaaaatatatctttcaatctattccaatcttgtccccttgaatagtcacaagctaggctttctcctatgcttcctacaacttttttctccaagcttccatctggtttcataattactaacaaacttaaatcatcatgaggcgcataaattttatctattatttcatagtcatatccttctacagcaacaatacctccagttactcttttattgtttaaaagttcttgttgcaacatcgctataaagcctctaaatatatttcctgctccaaagtgcacccaagtaggattttccttagttaaagttgacatcttatcatgatcaaactttggaagttctattccagcattttcccataactcgctgtttttaatactttctttgcttagtattaatttggcattactcattcctattttcacctctttaaaactactattaatagcattaccaattttaattatcttttatatcttaggattaataaatccaagattttattgcaatctctaattttatttattcttaagccttatttagttctttgtagtgtatcccatatcccccagatatacataattccaagagctctatcataaagtccataacctggtctacactgctcattccatatatgtcttccatgatctggtctcgcatatccagtaaatccaaattcatggtaagcttttactatgtcacatatatctaatgagccatcacaagttctatgagatgtttcaataaaatcaccattttcataaatctttacatttctaatatgagcaaaggcaattctgtttccaaattctcttatcattgctggcacatcgttattaggatttgagcctatagcaccgctacaaagagtaaggcagttatatggactatcaacaagctttaataatcttgctaagtcgtttctacttttaactatccttggtaaaccaaatattgaccaaggtggatcatccggatgaactgccatcttaatatcattgatttcagctacaggaataatttgctccaagaaatatttcaagttattccataaatcttcttctgtaacatttttatatgcttcaaaaagttgtgtcagattctttaatctttctggctcccaacctggcattgtgagatctggatttgatgctatcttgttaaccaactccattggatctatatctgtaatccttgctttttcatagaaaagagctgttgaaccatcttctgtttttttgtacaagtcagttctcaaccaatcgaataccggcataaagttatagcaaattacttttacgccaaccttggctagtttctctattgtctttttgtaattttcaatatatttatctctagttggaagtcctaatttaatgtcctcatgaacattaacactttcaacaacatctaaattaaatccatatttatcagctgatttctttacttcaagaattttttccataggccattcatcaccagctgccatatcatgaagagcccaaacaatcgtttctacaccgggaatctgtttaatttgctcaagtgttacggtatcgttaccttcaccataccatctgaaacccattttcataataatatacctcctgtcattttatctaatttggttttaccgtatagtttttttgccagcatataaagagtttaaattgaatgctctatataggcctcacctccctaaattgaaaatttttttaatatcagatgatttaaatatcatggcatctaatatttaaatatgttatatacccctaatctttgaaataattaggataactttctcttacttgtgttttatcaaagatgaccatatttaaatgcttcttcatgaattcttctgccatctctggatttttattttttatagcattaaatatttctttgtgctgcagatagatattatcccaactagaattaactgttaatcttaatacacgaattctttgaaattcggtacttccatcattaatactattccatatcctcttcttgctgcatccttcaaaaattatcttgtgaaattcttcatctgtattaaataattttttataatctttattttctatatacattttttgaaactttaaattcatttccaaagccaatatattttcctttggaaattccatgcaggcttcttttactacagctctttctaaatgctcacgtaaaaatctttcttcttcaacagcagataagtcaattaatgaaacaactgtgcctttctgaggataaatttgtactaagccttcttgagctaatcgaacaagagcctctctaactggagttctgcttacattatatttttcagaaagttctttttcagaaatgcttgtaccaggctcaagatatagattaataatttcttctctgagattatgatatataaccttactcgtagaattcttacttattttaaaagtcatacttatattctcccccattggcgtgttttaccatacttgtatggtaactatgagtatagtcttgctgtctaagaatcgtttacaaagacttgtatagtaaatcttttcacttgcttttccctaattgctatgattaaattatagctatacaactatataaaaaatatgttttaattgcttcaaaacttgcaaaaattgctatagtaaaatataatgtatctcagttttattaaaaatcacttatacaaataatctctttcacaatttaaaacgtttaattgtttaataattcagtaattttatcgcaatttatacaattcgtcgaagaggtgatatcaatgaagagaaaaatacatgagttttttacacgaaaacatatgctttccagtgactacgaaatctttcacttcttaaatactgatgtaccatttcaatacctacacaatcatgacttttatgagttttatctatacctttctggagatgttacatatttgatagaaggtaagtcatataatctaaaatcaggtgacatagtattaattaatacaagagaactacaccgcgctgttattaatagcatgaaaatgccttatgagcgtattgtactctggatcaacaaatcttttctaaatgaattgtcaacgccagaaacggatcttacccagtgctttgaaaacgtagagaaagcaaatgttataagagctgattttcaaattcagcagaatgtaagagcacaacttagcaagctacttgaacttgaaaactacaaaggcttaggtaaagatttgctatataaagcctatattatagaacttataatacagttaaataatcttgttttaagtcataaatctgattttgacattgatgtgacgaagagcagcttaattgatggaatagttgaatatattaataatcatattaatgaagaacttacaattgatgagctttctaaagaattttatcttagtaaattccatttatctagagaattcaaaaagtatactggtactacaatccataggtatatcgtacaaaaaaaattaatacaagctaaagaattaattcttaaaaattatccgataaatagcgtttacaaacaatctggatttggtgattactcaaatttttttagagcctttaagaatgaatacagcatttcccctaaacaattctatgaacttatggttgaatctaatttgaagaaataataaacattagaaattttatgatatatagttttataataaatatttcaatagctttttctattaaaaaaaggaaataacatatttaaatttatcttatatatctttttcaataacaaaaccgtgctaaaatctatatgattagagaataactggacaaggcatataatgtagagaactaattgcaacatatgtacatcaacggaatactttaaggattttacttaattctttaattaataaattttaaatgaacaagatacaaactcattattaataatttattacaagaatagcatatgtaagtactattcttgtaattttttgtgtagatatatataatttatttaaatgtacaccaaaacttgttgaaataaaaaattcgtaaataatttgaataggcttttttgaggtgaaaatatgaaagcaaatgtagaaatagttcttggatttcttggctctggaaaaacgaggtttataaattctatgctaaaaagaaaagaattacaagatgaagttatcgttgttatacaagatgaatttggagactgtcaaatacaggatgactttaataataaaaatccaatagtagtaattaatgttgataagaataaagaaattgatgaaagttatataaccgaaatcgtaagtaaacatgctcctaataggatttttatcgaaataaatggtatgaaagattctactaaagtaattaatatatttaatacaaaaaagataaagagtatatgtagaattgataacataataaatactattgatacaacaagctttaatatgtatttcagaaatatgaaaagtattattaacactcatatttttaatagtgagactataattttgaacaatgtagtcgagttagataaaaaagaacttttaaacatacaaaaagaaattgaaaatattaatgagactgctgatatactaatgcatttatacataacagataataaaatatcaactaaaaaagaatatgtaaaaactacaaggcacggtttttcattctttaatacttttttatattcaggttttgtactatttttattcatttttttgattacgatgtcaacattaaatattaagatatccagtgcgtatttagatagattcaaaaaattttatgatgtatttataagcatattaattcaaggttttcccttcattcttatcggtagctttgtatcttcaataattcaaatttgtatatcaagagatacatttattaaactattttcaaaaaatagttttttatcttgtgtaattgcagcttttgcaggcttattatttccaatatgtgattgtgggacaatccctgtggttaaagggcttatgaaaaagaatgttcctatagcagcaggaattacatttatgcttgcagcgccaattgtaaatccaatagcaattattgcaactctctatgcttttccaggtatggtatctgtcttaatttacaggttagctactggaatattaatctctgttttagtaggtttaattatgcagtttactaataagaaggatgaagaaattttaaaaaataattctgatatagatacatgtgattgcggtttttgtgatggtaaacaggattattcagaaagtaagctacaaaaagtcaaggcaatattcgttcatgcaggagatgaattttttaatataggtaaatatatgattattggaacttttctatctagtatttttcaaagtatgacatttataagtagcaatacttacatttctaatgatagtagagtttctcttcttgtaatgattttattatctttcttactttcagtttgttcaacttcagatgcatttgttgccaaaggttttttaagagcctttccaataagctctatacttggatttttagtagttggacccatgttagatgtaaaaaatacaatgatgctttttggaagctttaaaaagaaatttgtattaaaattaatatttactattattttagtatcatttagcattttgattaactgcaaattaacttgataatattgaaaaatagctcaatctattatcatatattccatggctattatagataaattaattgaaaggggtagcatatgaaaagaattagttcagatatagttattaaaatactgatattgctatgtttcgggatattttactttaagataattaagaataatgaaataataatgtatgtccatccaagaattattccatttgctattttaggaatgctagcaatgtttgcaattgcgttatttctaattacagacagtcgtcgaaccaaaaagaagaataccaagttaaggaattatgtagtcttcatcattcccttagttatggtatttttcatgcaaagtaccagtgcaaattcttcaataaaaactgatgatataggcgcaaattttagcggatcattaagctccaatttaacttatgacaattctaagcctaatccctcagaccaaaagatcaacaatgttgagcagggtaaatatgatgatgatttatatattaaagataatgttatagaagtagatgtcaacaattttctgcactcctttgatgaacttacagagaatgcaaataactatgatggacaagaaatagaaataacaggatttgtttataaagacacaacccttagcgataatgaattcataataggtagatttgtaatggcgtgttgtgcagctgatttacaagttgtaggaattaaatgtgatagtaataatcaagaaatctacagtaaggatacatgggtaaaaataaggggcaaacttaaaactgaaacagtcaagtatgcagtgaacccagttatagtagtcgaacatatagaaaaagatcctaatcccaaaactgaatacttatatccattttaaaaatccttaactatctagattgaatatgtcataaactgtgccaaatataactattaaaaaattatctttatataaaaaaataaactatgccactttcatttagtgttttattagcataaagagctatataaacattaaatgaaaattagcatagtcatataaggcataatccccaaaacaacaagtccagttgcctaataattattttataattttaaattcatatccttgtccctttaaatattctataacttctggcaatgcttttgctgtttcttcttttccgtacgtatcatgcattaatattattgctttttccctgtttgccacagtttttataacttcttgttttaactgttctgcttttttaggagcaccttctgcatctccagataacgaattccaatcaatttgatgatagtccttgtcatgcaacgctttgtccatagcttctgctcctgacggatctttcttgtcccaagtcatttgccctcctggaaatctaacagctcttgttgaaaaatcttgtcctaaaatatttttcaaagattgatttgttttctcaaaatcggacatacaattctccaaatttatttttccatttggatataagtagttataatcatgcgaataagtatgattacctattgcattaccttcatcaaactccctttttactaaatctttgcttgcctgatctttatctatatattttcctataaggaagaaagttgcatgtacatcttctttcttaagaatatctaatatctgaggggtaactgtttctgatggcccatcatcaaaagtcaaataaacaactttcttaccatcagctccatcaggcctttgtcctttcatttgctgatttaaatatttttctacaaatgctgagttttctacttctgaattactttctgatttaagttcgtcactatccgtttcacttttactctgattatcacttgattcagattttgcattctggttaccatcaagtgcttgtacagtttttgtattatttgaaaatctttgcattactatgttacctactgttataaccaatatggaaataataataaatagaattgtgatctttgctactttaatgtttttatttgggttattcctattgttatacttcatttttcatccctcttatgtcttatctatgtgtgtcttaatagttttttattagatagcagcatagtatatgttgctattgaattctataatttcccttaattaaatattcgtcttattagaacttttaaggttaagtatactattgcaacatatatactgagtatttgtagctaattatttgaaaactccttgtgtaaattcatctaaatcaacatcatggtttattccattaacaaatcctgtctcactgtattgatgtccaactcttgaaaaccatattttatttgttggcagattttgaaatggagtgttattataatttgcttcccataaaggatagttagataatctgccgtctagattgctaatgaagctgctatatgtgtatatacctatatccatattacttactttcttgaattcggctataaatcttaaagcataatccataatgtcaaatcctgtagcttctatatctaacattggcttcaaatcgtttcttttatcctttatgctattataaaaattatcagcttgagtttccggagcacttgtcccaactaagaagtgatagaaaccaacctttaatccagctgatgaagccccattataattagcctgtaaatacggatctataaaagttgttccttcagttgcttttatatacactaattgaactccacttgattttactgaattaaaatctatgtacccatcataattactaatatctataccataatatttgcttaaagtgttcccactactgcttgaaccggaagaactttgccctggagtgcttccactactacttgatccagtagaactttgacctgaagtgcttccactactacttgatccagaagtattttggcttgaatcttcatacctcttaccatcagatccaatcttatatccatctttagtagtgttagtaagcatttttcctgtgtctttgtctaagtaataccacgctccattaagataagcccatcctgttgccatgcttccatcattattaaagtaataccagttattgtttatagtaatccatccagtttccatatctccgctatcagtaaatttgtatgttgtaccgtctatcttattaataccagttaccatacttccatcattctttaaatagtaccatttattattattcttgatccatccaatatgaatttttccccctttatcgaagtaataccatttatcatttattttactccatccactattggttgccattactcctgaatctttgaaatagtacaaatttgagccatcatctcggattccagttgccatagcacctgaatcagttaagaaataccaatcaccatctaactgtttccatccttttgccatagccccactttcatccatgtaataccaattacctttatcttttacccacccagttttcattttaccgtcatcttcatttaaatagtaccaattattatctggtttaatccatccaatcgcttttgtattatccgacttataataataccaaactccattctcattcttccaaccaatattggaggttatattagtatcactagttgcagcttgtacatttaatcctggaattaaaattagtacaattaatacagataatattgttagtctctttttaatattcaaaacaacctgtcactcccttttttattttttagctaaaatatgattaaattgaatacgaaattaattttatgtttctataagattttttccatctatagcaatgctttcatccttgtaatattgcattactctctcaacataatcctgaaccccttgcgacatcttacataaatcatcatctgataaaactccatctttttttacattttgtggtccagcattataagctgctattgctatttttacatcaccattaaattggtttagatattcttttagtaattttgaccctccatcgatattttgctctatatcatatccgtcagtcattccaagatatgaataattctgaggcataatctgcatcaatccagttgcgcctgagcttgacgttgcttttggatcaaaatctgactctgctttaattatagctagtatcaattttgaatctagtccatatttatttgccgaatcatttactgagttatatatttttttcatagtatcacctgaccccttcgagctagtgcttaaaggaatttgattaaacgtcttatacctttttccatccgacccaatcttatatccatctatggtagtatccgttagcatttttcctgaagtaggatctaaatagtaataatcgcttccatttgatgtaacccatcctgtcgccattgatccattatcatttaggtaataccatgctccatcaagatttatccaccctgtcgcaacacttccatcagtattgaaataataccagttattgttcacattaacccatccagtttccatctcaccagtatcgctaaacacatatgttatatttcctattttatcagtaccagttaccatacttccatcatcgtttgagtaataccacttatcattattctcaatccatccagtatgtatcttcccatctttatcaaaatagtaccatttatcatttatcttagtccatccaatatttgtagccataacccctgaatctttgaaataatacaaattagaattatcctgctgaattccagttgccctagcacccgaatcagtcaaaagataccaatcgccatctaactttttccatccttttaccatagccccattatcatccatatagtaccagtttcctttatcctctaaccatccagttgtcattttaccactatattcatctaaatgataccaattattatccggtttaatccatccaattgcttttgtgttgtcagacttataataataccaagatccattttcgtttttccaaccaatgcttgatgttatatttgtatcagtaacatctgcttgtacatttaatgttggaatgaagcttagtgcaattaatgctgataaaactgtaagtacttttttaatattcaaagtaatccatcacttccttttaactgattcttaataaaaaatgttatttgactaaataactaatactgattttaaaaagttaaatttcatattaaaatttatcattaaaaatcagtattaattatgtattttataatttattaatgttatttattatttttaaaataatttttttcaatgatggcttccgaaactttgaattcatcttttagatgctttacttctttttcatcttttggatttcctacaatttgaccttcatttaaaattgtagcatctctattcgtatttactaatactcttcctattgaattattctcaaattcacttctatcctcgccaagcaagtataatattgtcggtttaaaatctgtttgcccaccagctgttgatatgacttctgattttgagttctttgagtaaataatataaggaatttttctttgattatccttccaccaatctccttctaaaggtgcattttctatatcttgttcataaaacttatgaacaccacaatgatcaccgtaaatcataactaccgtattatccaataaaccttccttatctaattctgctataaactttccgatagcctcatcggtatatcttacagattgaaaatattttcctaacatattatcatcaagttccttaggtagattcaaatattttttatcttctggcatctcaaaagggccatgacttgtcaacgtagtcataaatgcataataaggttgtttttcatcttgtaacttttgagctacttgctttaaatatgattcatctgaaagtcccaaacctataatttcatcttgattaaactttcctacatctaatattttatcagccccataacttttatgcatttctgtccaattccaattcccaggtggttctgcatgggtagaaactgtagaatatcctttaccttctaaaatattttggagtgtattatattgactccaaggataagaatatactgtagtgccttctcttataggaagtactgatgcattaaccatcaaatcacaatctgaacttgttccagaattattttgttcgcgtatattattaaaatacaagctatttgataatagcttatttaaatttggtgttatttcttgtccatacactttttcattaattacaaagttctccaaagactctacctgtagtgcaattacatttttccctttaaacattcccttgtaactattgtcaggtaaatcttccttattagcgctaaaccaattttctatttctttcttgtcttcttctgttaaagtcttatttttatttttatagaactgaatatcaaaaccatgatatccaagtgggctcatatctccaaaagtctgaaatggcgcccaagacaatctaaatacatttttcccttgatccatttgcttgacatctactgtgtaataaccaagccatataacaagtgcacttgcgataaatacatacaaggtctttgctatcctaaaatatgcttgactttcattcgcttctttaactttaataaacttatgtattaagaagagcattacaaagtcaatgataaatactaaatccactattctaaaattaaataaacttttgccttccggattaaatatctcagtatgcattaaatgtcttatagataaaaaggtttcatttgaacgataataccagatatctgcaacaaaaagaattgtcactaaaatatctattattaaggcagcaccaagcctccccctttctttaaaaagaaatattggactgcatactaatactattattgctatatgcacccaaagtactggactatcaaaataagcacttcctaaacttatacttgatgaatcttgtgtccttagcatagataatagcaatgttgatttagcttgtaacattgctaccataaatataaataaccaatttcttcgaactaaatttttcattctttcttttgtttccattttcattctccattaatatccatttttcttcctacattataactcaaactttatcttttaccaatataattttattaaaagataattacaatattttaatgttaatatgaatcttacttaaattataaatcattattactaattatcataagtttaaaattacttattattattaaatattttataatttccttaatttatcgacgcttaagagcttaattaatcaaagtttatcttaaaatatcaagtaatgcgattaaatagctttataattaataaattacactagaacctatataatatcaacccggaatcatttacatattaagataaaaaaaggataaaagctacttgtgcaaattcctgatttacatcaaaattgcatacttttatccaaaataaaacttataatttaaataaactacattaatatatcaaacatatcccttcttttttcatattcctaatactccacaattaaaatttctccattaatatgttttatataaaaaaattgagtataatacttttattaagtgtttcattagaaatcacaataaaagtattatactcatttcagtaagttttatatttaaatatagtttatattaaagttcttctccattactttctattactttcttataccaataaaaactcttttttcttgatctacttaagtctccatttccatcattatctttattaacataaataaatccatatctttttttcatttctccagttgatgcactaactaaatcaatacatccccaaggagtatatcctattaattctactccatcattaactgcttctttcatctcttcaatatgtgcttttaaatagtcaattctatatccatcattaatcgatccatcttcttcaactttatccacagcacctaaaccattttccacaaccattaaaggaatttgatatctattataaatattatttaatgtccatcttaatcctttagggtcaatttgccatccccaatcacttgctttaagatatggattctttacacctccaagtatatttccagatgttctttctaattctggatctgtgcttgaacagtttgacatataataactaaatgtatagaaatctacacaaccttcctttagaatttgctcatcattttcttccatctttatttctatattattctctctaaaaaatctctttgcaaaaccaggataagctcctcttacttgaacatcagaacataaaaaattattcaaattatctctttcctgagctaaaagtacatcttccggattacatgtataaggatatgttgtcatatatgcaatcatacatcctaccttgaaatctgtattaatttggtgtgccagtttaacagcttttgcgcttgcaatgaattggtgatgaagagcttgaaatcttatttgtctactatcatcaatctctttattaaattcaagttcaccacctttatccaataaaattccaccacccataaatgtaccaaatggcattgttaaacaatttatttcgttgaatgtgagccaatattttacgacatccttatatctgttaaatattgtgttgcaatatctaacataacaatcaataacttctctacttgcccacccattatactttttagttaaaccaaaaggtgtttcatagtgagatattgtaactaatggctcaatgttgtatttttttaattctgcaaaaacatcatcatagaattttaatccttcttcatttggttctaactcatcaccattcggaaaaattctagtccaatttattgacattctaaaggtcttaaaccccatctcagcaaacaatttaatgtcttctttatagtgatgataaaaatctatagcttcatgacttggataatacgttccttcttctaattctggagttattcttcttggtgtagtatgtgtaccacctgtcataacgtctgatgtgctaaggccttttccaccctctctatatccaccttcaaattggtttgcagcggttgctcctccccataagaaatcctttggcaatccttgaaatttattatttaacattttatccccactttcttcagtttacagttaactgtataagtttatttgtacaatgatccgtattgcaggaaagttccgtattgtggcaaagccactcttttcagatgtgcatagctgctctttttataggtgtaaaattttataaacagctttagccactccagaattataatttgcatctgttatatattttgctatttcttttatctcagggattgcattttccatagcaaaagatataggaaattcagtaaacattgaatagtcgttaaacccatctccaattacaacaacatcctctttttttactctctttttatctgaaatcttagctaatataattcctttttgagcttctatatgatttatttctagattaattgcaatacttgatgcaattgcaagcccctctatggttttaagctcttcctttaattcaaaaagcttatcttcacattcaccataagactcaatttttcctattttaatatctctacttaaaaattcatctatattatcaatatactttaaaattacaaaatgctgttcttcttttgccatcttaaggatttcttcattatttgtaacttctggatgaaaatatttgaccctaagtacacttccttttaaagattcttctttagtattagtagtatataatcctttatccgtgtatatctcaacattaagaccatctctttttattatctctaaaatgtccttaagcttacttttgtccatataaattccttctaatatatttccgtctttatctctatattctgcaccatttaatactatacattcacactttaaattatatctatcaagaaatggcttaatatcttcatacattcttccactagcaaatacgaactttactcccatttcttctgctttgcttatagcctttaaattttcttcaggtatatcattattttttccaagtaatgttccatccatatctgatacaataaattttatcatatttttctactccctaataataacaatctattgcttcatgacttggataatacgttccgccttctaattctagatatccaccttcaaattggttcgcagctattgctcctccatataagaaatcatttagcaatccttgaaatttattattcaacattctttgttcttctgattttgcaaagtttactacttatttttctctagtttttctattctttcagcaaattgtggtaagtgttttttatgtgcaagtaacatttcatctaataaatctttagcaatttgtccacttggaactaatggatttattgtaaatgcatgaagagctttgttgtagttccctgtaaccgctgctgaaattgttgtttcttccattcccttcattatttgaaccatacctcttggcgctggatcaaactttccaaaattaatcggttctggtccatgagacgtgattgtacttgaaacttctacgatagagtcatatggaagatcctctaacgcaccattattctttgtgctaactaccatagttgttctcttgtcattgtatattgaagcaattaattcacaagcagcatcactgtagtgagttccacctctcttagttaattgttctggtttatagtcaagctttggatctttatatagttcaaacaattctgcctctgtcctttttacaacctccgctctagtttcaccttttgagtaactttcaagttcttccttcaacatatcatctgtaatatagtaatacctatgatatggacaaggtaatattcccaagtctttaacctgctcatagttaaacttgatatctttaatattggcaactcctgcatctttcttttcttctgctaacaatgggttgtaaaatttttcaattacttctgcagttttttcattaccttccttatcccatactctatgccaatggaaatgatttaatcctgcaaacttaaagaataattcacttgaaggaactccaagcatctttgcatcatcttctatacagttgattggaacattacatagtccaacagttctgtcccatccgccatattttatagctgcttcagtcaccattcctgatggatttgtgaagttaacaagccatgcattagggcataactctctcatatcgtctattatatctaatattactggaattgttctaaatgctttaaacataccaccagcaccgttagtctcttgtccaattattccatggcttaaaggaattctttcatcctttattcttgcatctaaaagtcctactctaaattgagttgacacaaaatccgcatccttaagggcctctctcctatctaaagttaaattaactttccaatccaaccctgctgccttaaccattctttgagccattgctccaactatttccaacttctcttttccatcttcaatatctacaagccatatttctttaataggcagttcatctttcctttttataaacccttcaattaattcaggagtgtaacttgatcctccaccaatagtaactattttgattttttcttttttcattacttatttcctcccttaatctcgcctcaggcaaattttaaatttaagatattttcctaatctgaaaattccttggatataaaatacaagagctacttttttacaaaatgcatataagtaatcctttacctaaaagatatcacaccccaaaataaaataccttattttttcggatttagtgacacatgctactatttagttatttgtttttttataaaacagtttgtttcataatatagctagtctaactacttactaggaatcaataagcaaaataatgggaatattatacctaaacaaatttcagtaatatttagtataaaacataaaattaatagataataagagttataatgaatttattctcaccatgaattcttttccagaagaaactgatttgaatcgaatttttaatagattattatatcttcaatactttaatcaatcttaaaataattataaaaagaaggtgtactatggcaaaacaaatattgttattagataatgttcataaatctataaaaaataaagaaattgttaaaggcattaccttttcaattaatgaaggtgaggttttaggttttcttggaccaaatggtgctggaaagtctaccactttaagaatgattgtcggcctttcttcccctactagtggaaaaattttaatcgatggctattcaattactaaggattatattaaggctatgtctaaagttggatgtattatagaaggtccagatatgtataattatttaagtggcttagaaaatttgaagatgcttgcttctatgaataaaaatgttactaatgaagatataacgagagcaattgaacttgtaggaatgcagaatagaataaatgagaaagtgtctacttattctttgggaatgaagcaaaggttaggacttgcgcaagctcttattcataagccaaagcttcttatattagatgagcctacaaatggacttgatccttcaggaataaatgagtttagacatattattaaagatcttgctaaaaaagaaaatattgctgttctcgtttctagccatttgatatctgaggttgaattaatgtgtgatactgttgcaataataaaaagtggtactttactaaaatacgcttcagtctctgaacttataagtgataaggaagtttcctttgttctaagtgataattcaaagggaattaaaatattaaaagataagtggaatattaatagttcacttatagacaataagataatagcaaaagttgatgtatcaaaaattgaaaaaattaattcttcgtttatcgaagaaggaatagcaataaagttcgtaagtataaatcagaaaaatttggaggatctgtttttatcacttacagaaagtaactctattgttagttaaggaggtgtatatattgctagtattagttaaaaatgaagttaataaaatattatataagcggaaacttctacttattagtgctataatcctaattttagtttcgctttttgcatatggccaaaattatcaatatcaaaacactttgaataagtatttaaagacaactactcaaagtggcgatatcccttggctgtcattacaaaagcaacaaatccaggacctaaaaaataggcttaatagacctgatacccctgacgaaagtaagccttcaattaatattcaaattcagcaaaatcagtattatttagataacaacataaatccaattactccaagtgctgcaaaattttcagttaaactaatggaacagtccatatctgtattactacctttactaataattctattggctggagatagcgtatgtggagaattttctgctaaaactataaaagtactgctaacaagagctgttcctcgatggaagatattacttagtaaatatatagcacttctaatcatgttttctatagtaattctagagatggctctattttcaattttaatttctggtttattttttaataactggggatttaatgagcctgtagctacaggttttagctctgcttccggaaccttagatgtttccaatgtaatcaaagtaaccgaattgcaatatttaattctcgtatactctcttggatggtttgtatcaattgttatcggtacaatttcatttatgatttcagttttagtaagaaatacagctacctccataggtataatgatggctacattagttgggggaggctttcttagattgtttctaaatgattggccttcaataaagtacttttttgccatcaatctaaacttacctcagtatcttacaggatcatatactccaataagtggaatgtcattaagttttagcactttagtacttctagcttggggcataggtgcctttattgttagttttgttgcatttttaaaacaagatgtattagtttaaaaggagggatttaaaatgtttaaaaatataagatggaaatttattttattactatccatagtttctaccataaccttagttatgggatttatatcagcattatcaataagttctcgccctcctaaagagatatccgataaggaatctgaacaacctaaaagtgaagaattagatcaaaactattacaacatattagttcttggtgactcccttgctaaaggaactggagatgaaaaaggacttggcttttcaggctatttttcagaatactggaaaactaaagtttcaaaggagattaaaataaataatcttgccataaacggagatgtatctaacgggcttttaaatgtagttcaagagtcacagaccttagctgacattaaaggatcgaacatgatatttatatctataggtggcaatgaaataagtaaacttaaaaatacagatataagctcatccactactaagataaaagatattcaagatacctatttagctaatctaaaatctatttttaatataataagaaccaataatcaatcatctatggtagttttcattggcttgtataactcatttggaaaagatcttacatctgataaggtaagcatattaaatgaatggaattatcaaagtcagcaacttttatcattagattcaaatgcaatttttattccaacatatgatcttttcaaatacaacttacaagattatctagctgctgataattttcatccaaatagcactggttatcaagctatttctaacagaataattgaatctttaaaaaattataaataatatactataataaagctgcccagtctgataaatattttctgactagagcagcttcataatatactataaaaatttatgctagcttgatatcaacttctaaaggagatatttcaacaagctgaatacttctgctgtctggttgtgatataccaacaaataatttgaaccttttgctatctaatatcctttctccatcgtcatttactacttcaaatgatgatttcttgattttcatttttacaatcttgctttctcctattttcaacccaacacgtttaaatcctgctagactatgattcctaacagcatgtttagattcaagatcttttatataacattgcacaacttcttctatatcaaaatttcctgtattagttatctttacgcttacctctacatcctcaaaatcactttttacatctggtacatgcaattccgataattttacagtagagtaagttaatccataaccaaatggatataagctttcacaagacatatagcgatatgtcctatctttcattgaataatctataaattctggtagatccttagtatttctataaaatgtaataggtaactttccacttggtgaacactttccaaatattaagtcagctacagctctgccacctctacttccaggataccaagcatctaatatagctgaacacttatcctctgcattattaaatgtcaatgcacttcctgcgccaataactaatataacaggtgtacctgtttctattattttctctaataattcttgctgccttcctggtaaatttaagcttgctttatcaccagctccttcactattacctgcatctccttgctcaccttcaattgtagaatctagtccaaggcatagaattgcaacatctgatctttctgctattgatattgcttcttttaatctatcattaggttctgctaattcctcaactctgtctctaaataaatgacaaccttcagaataatatactcttacatcttctcctacggcttcatgtattccctccaacacagttatatatctagatgcagttcctgaataattgcctttaagcatgatctggctatcagcattagggccaataacagcaattgattttaagttatttttatttaatggtaatattccattattctttaataaaaccattgaatttctagctgcttttaatgataattcattatgttctttacaatcattcaactcatatggtattttgttatattcgcactcttcatcaaacattcccaatcttattcttgttgccattaatctttctgttgctgttgttatatcttcttctgttaccaatccctctttataggcaagtagtaactgaagatacacattaccacagtttagatcacatccatttttcatagctaatgctgctgattctgttgcagtgcttgtcactctatgatgcaagtggaaatcagcaattgcccagcaatcggatactacatgacctttaaagttccattttccccttaatatatctcttaataaagttttacttccacagcatggttcaccatttgtacgattataagcccccattactgcctctacatcaccttctttgacacaagcttcaaaagcagggaggtatgtctcatataaatcctttttacttacaactgcatcaaattcatgccttaatccttctggtccgctatgaacagcaaaatgttttgcacatgctgccacttttaaatatttgccttctccttgtagtccttttacaaaggccactcctaatctagatgttaaatatggatcttcaccataagtttcatgaccacggccccatctaggatctctaaaaatattaacatttggtgaccaaaaagttattcccttatagatgtctctatcatcttttttactgctttcattatactttgctctgccttctgttgcgataacttttgcaatgtcattcaataactcatcatcaaacatagcagctaatcctatagcttgtggaaatactgttgctgtacctgctctggctactccatgcaatccctcattccaccaattatatctaggtatatttaatctttttacagctgatgatttataagttaattgttctgctttttcttctagcgtcattttccctactaattcttttgctttttctaacgcatattcatgagtaattcttttttcttcgaccatattacacatctcctaaaataatcataatatttattctaactttttttaattataagactaaacaaccaatgtattaaaagaatgaggctgaatattaaagctataatcttcaccattaacactaaatgtgacttcttgtaattcatcaaatggatttaataattctaatacaacacttccgtctggattttcaaaagccaaagcatttcctgcaaagtccccttttagacctttcattgttgctccttgttttatatactttgaaaaatgtctcattagataatactctggattatatttaacatcattatcttttgtcactgtaataagtgaattttgtttccatccccaagtgcttattccctcttcttcaagtaccatattccaataggtataggcgcttactccatttataaagtatgtccacattaaattaaatacatattcagcatattcccagctattttttccttctccacattcattttctgtctgtatcaatttcatttctggataagcaattcttgtctgcagcaaagcatgctttcctccccactgatacccaacgccctttatatatctttttgcatctttatcacttagtacagtgttagcaaaattattatactgaccaaattgccaattttcatctccataatcatcataaggagaatttaatgttccaagccatatctcagtatcaagtttattctcttcaaataatggcccgatgtattcttttataaaatcacgtaattgttttcctgaccaaacacatgatggaaatttctgatctgctataggttcattttgtatgtgtacctggttaattttaataccctctttttggtattcttcaataaatttcttaaagtaaagagcatatgcttttagatttttctcctcccatattagtgttccaaaattatatacttccgggaacttcatccaagttggcggactccatggagaagcaaataaattaagctccccactatatttttctgcttctttaatgtacggaatcaagcattctttgtctctttcaatgctaaaattcttcatttcataatcgcccttagtttcatttagactgtaccagctttctgcataatcatttgctccaattggcaatctgcaataagtaaaattacactcctctggatcaaatagatttctaagcacctcttctttcttatcatttggaatcttttttaatgctatatatcctaactcattaaaacatccaccaaatccatcaatagtttgataagattctccatttaactctaatgtatggtatgatttatctttactaatatctatagtactacttactaagctatcagttcttgttgttgaaatcaaagttgccttcctcattataacttccccctttttctctaaattcagttggtgacattcctgtctgttttttaaaagctaaagaaaaataatttgtatccttatatcccactaaagttgctattttacctgttttcatactagttgtttccaatagggatttagctttctgtattcgtttacgtataatgtagttattacagccttctcctgtactatgtttaaacagctttgaaaaataggttggagttaaataaagcatttccgctatactatatactgaaatgtcttcatttaaatgatcattaatatattgttttgcttttcttataatttcatggctttctccaatatcagtctgaagtatttgtattatgaaatctcgtgtaattctcaacgcatcacttctactacaattttttaatgaaattaataaagaatttaatttattatctgatatatctcctttttccatggcataggaaaaatatattcctcctccaatatcaaaacatgttttcttaactaatgatgttgataaattataaaactctatagcctctgaataagcctcatagatactcattactttctcaaggtcatctatattatctatcatattcttcttaaattcctggactctctcgttaaataaagtcaaacgcatttctctaggttctttagttatgatttttccatatgtgctcttattatttaataaaacacatgcgtcgttatatgaaatattgatcttattaaatcctcctacaacgcttccaagaatcactttaggattaatttcatactcattttttaaatactcaattaaatgttgtactcttaatgttacttcttctaactcttctcttataaatatggcaattactatatttttatttttgtcctcaaatgtaatcccttgtttcttagaatcaaataattcaatgcaaatatttttaatagataaatttaataattcaaaatgttgtttccaagctaaattatcatctataattggacataccaaagcaatttgaagcatctcttccttatcgtaagaatactccctcaatacttttttaaattcacttgtcttcactcgttcataaagtaaattttgcataatctgttcaagctttaattgttctgttacaccttgtatcctgctatttatcttttgctcatggcttaaagttttctcatgctctaaatcttctattaatcttccgatagcattctcaagttctatctcatctactggttttaggagataatcctccacctgcatcttgcagcatttttgagcatattcaaaattatcatatcctgttaaaacaataatttttaacctaggatttagataattcatcttttctactaaagataatccattcatctcagtcatacatatatctgtaatcatgatatcaaatgcttcttcttccatgatttttaaagattcaattcctgaggatgccattttaacagtatctatcttgagtttctcccaaggaatcacactacatattccttttctaatcatttcctcatcatctacaactatagctttatacattaattattctctcctttaggtaatataatatctaccgtagttccaccatgttcatttttcttgtagtataatccatacccactaccaaataatatttcaattcgcttatgaacattccttaagccatatccagttttttcatcaaatactgatatagagctatttatttcatcaatttgttcttgtctcattccaactccattatcagcaactgatataactatcttgttatttatttctcttgcggtaactaatattttacctttatacccatctttgacccttattccatgataaatggaattttctattaaaggttgaagtgtaagcttgggtattagtacatttttgaaattctcatctacatttatttcacactcagcaatgccactatatctcatattttgtatgatcaaataattttctacattttctagttcttgtgaaataggaataacatctttccctctacttagacataatctataataattagctaacgcttttaccatttttgatacatctttatttccatccgataaagcctgccaatgtatacactctagtgtgttatataaaaaatgtggtttaatttgagattgcagtctgtttaattcaatttgcttaatctcagattgctccttttttatcctatacataagtatattaatttcttcaatcatgatattaaagccacttgctagttgcctaaaatctttgccatcataatcatgttccattctaacttccagatttcccatcgaaacctctctcatctttcttacaatgtcatccatcggcttatataagttattgcttaatttatagcaagctatactaattaatactccggcacctattactaaagctattattaaaattattactgcattggtatcccttaacattgatcttgtgggtatctcccctaccatataccaatcccaattatcaagtttctcataaataaccatcttatcttcaactttttgttggccactttttccttgtaatacgcttttataaggactttctgttccaatcagagatttatcctcattagatataataactccatctttatctgttaaatatgtttgtacttttaaccctttatctaaattagagtaaaattcttttatacttttttctccaattcctattactaaaaatccagtatatttattaaaattgtatttatcattgatcggttgatatatatttagtacatactgatctggataaaatacttttttcttcatgcttatcttacagttaccaaactttgtgcctacagcatcttgataatcttttaaagtttgagtcctgaaatcgctacttgtccaagactctccaacatatattaactctggaccatcaaatttcaccaatccaatataatctatataactgtttgtattcaagagatatcttactgacgaatatgcatcacttgtatctttgttataattctttgaagtcagcctattattcattaagaattctttaactctactgtctcctgtaatcatattcgatgtctcaataatattttttaatgttatatttaaaatatccgttattgtttcaaactgtccttgcactaatccactggatttttcagtaatttgctttcctgctaattgataaacagcaaaaatcacaaaactattagtaattaagactgccaatataaaaaatgtagtaatcttctgattaaatttcattttagatagcttatttataacttttctcaatttcttatacatacctgtatccctttttgtaattcttatatataagagttacctaccataagtatattattaacctttgacagctcctgccatcataccctttattaatttatcttgtccaaaaataaatgctatgatcattggtaacatagaaatagttaataccgacataatcattggaacattcattgtatattgaccttgatattcccaaatagcaagtggtaatgttctattaggtaatgtttgagttaaaactaatgcaaaactgaattcattccatatagcaacaccattataaattgctaaagttgctagccctggcttcactaatggaagcataacatttgaaaagattttatatttattgcacccatctatctcagctgcttcttctaattccctaggaattgcctgcataaatgtaactaatataaatactgagattggtaaattaaaagccacatatggacctattaatgcccaaggactatcatacaaacccatcttagtagtcatcaaaaatattggaagtaatgttacgtgaactggcactgacatacatgctactattatagcatatattggcttatttagcttaaatttgaatctagataatggataagatgcacatgcacttaagaatagtaaaattactagcgacactataagtactaatatactgtttttaaagtaaataaatatgtttcctttgaatacgtcaatgaaattctttaaatataaactttttggtaaatcaaatacacttcccataagcatctcaaattgctgtttgaatcctgctaataacataaatataaaaggaaccattgtaattaaaagccatgctattgctagtattccaacaatagcttttatagataatttttttattaatgaattctgcttcataatagtcaatcttcctttctatttaatgttttaattgtgattaatgatattatggttataagaataaacatccctgaagcaattgctgagccatatcccattctttgagataaaaacgcgttcttatacatataagttgccataagttctgacgcgttacctggtcctccacctgtcataacatatatgagatcaaaatattttaatgatccaaccattgataatacaattgcacttttaatagctggtttcataagtggaagtgctattttccaaaaatactgacttttttttgctccatcaattattgctgcttcatataaatctgatggtattccactatatgcagccaaaaaatacaccatatagaagggaataaattgccagcaaatagctattgttatggttaatagtgctgtcttagggttacctaataagtctactgaatgcccaccaagcaactttgatattcctgatactataccagaatttgcatctaatgcatacttaaataaataaccaattgcaacagatgacattaacattggtataaaccaaattactttaaatatattaaattttttcccaccaaaatctaaaaatgttgcaagagcaagacctattggtaattggacagctatagatagaatcataataacaatattatttagaaacgcttttctaaaaatttggtcagcaataagttctttccagttatttaatcctacaaataccttatttgatgcaaatccattccaattatagcaacttaaattaaaagagtagacaattggatatgctatatatattattaagaataaaaatgctggcacaagaaatataattgctgcatttctcgttgacgcggcacgtcttttagctaaactattagtttgtaattgcactttttctctctcctttatataattattgagctgttacaaaattaattccaccgcataaattcaacttctgcatttgacttataatataaacatatttacatctctgatatatcatatttctactcctttttcagaaatcataaatgctttgcgccttctcattcaaagataagctataacgcaaatctaaatttgcagttgtttatatataatagaatttttattttgcaacagctttacattattttttaaatgctgctataattatttattttttgccttatatgaatccatagcagattgtaattccttatctgcatcttgtggagtcttagttaaaccaaatatttcttggcaagttgatttgtgtacttctgcaacttctgctggtaagtattggtcataccataattgaactccttttgcttggttaactgtgtctaagattttttgtgttaatgcatcatctggtttaaaatctttaagtggaataatcttacctaatttcttacgatcttgtaatgcttgatcatctaataaagattgaattaatttaaaagcaccttctttatctttacatgtttctgaaattgaatataagttatctccaactgttcctgcacaaagtgattgatcttcttttgaaccgtctaatgctgggaatgggaagaatcctaatttactcataaagtctggattttcaccaagtactgtacctgtgaaccatgaacccattaaatccatagctgcatcacctttgtataatgcttgtctagcttgaccactatcatcatccataccattgaatccatctataaagtaaccttttttaacccaatcttgaattttgcttccagcaaattcaaatgcagggttttcaaattttccttttcctgatgctgcatctgcgaatgcatttaacccaccaaaacgagttgctaagtacatataatacatagatcctgtccattttgtagcattagctaaagcaaatggcgccactccgtttgcttttaacttatcacatgcagcttctaattcagaaatagtttttggctcttgtattccatatttagcaaaaacatctttgttatagaagaagcctgctacggatacgttttcaactggaacggcataaatttttccattgtatgaacattgattaattccagcatctataaatttatctttgtagttatctttgttcatgaattctgtaagatcagcaattttatttgaatttacataatcaattaatcctgatcctccccattgaataaatacatctggagtctgatttgaactcattgccatagataatttctgtttgtaggaatcattaacctgatcaacaacttctacatcatattgtgggttagcttccataaaccttttaactgatgctttaattgcatctgctgctgttgacgtttggatatgccataatgtcaattttgtctttcctgaagcagatccaccgcttgtctgtgaagtgctgtttccgcagccaatcattgatgcagaaaccatagttactgtcattatgattgatgctatccttttcaaattcttattcatatacctttctaccccctagaattttcatatatttgatatacttatatattagcattgataacgtttaataaaaattgaataatttgtcttttagatataattttatatcctattgtaatttttctttattaaacgcataaataacctccattttaaatagttctctaaaatactatctaaataatgaaggcatttatatttttattcacatattaaatttttataaattgaggctgaaagctggaggggaacctgccttcagcctttgaaatatattacctcaaaaacaaagatagataaaaaaactgccaagaatatttatctataaccctttgattctggtaaatatccaatactatttgaaaggattttcagttttgtaaagcataccttttggttgattgaatccaacttctttaacacctaaatatctaaataagttgtaaacagcttttccaaagtgtccaaatgcaactgctccatgatgaggatatctgccttctactaatacgtgacgatagaatcttcccatttcaggaattgcaaatactcctatagctccaaatgaacgagttg

SEQ ID NO: 38 - DNA, 48210 bp, Clostridium beijerinckii
aagttatatatttaaattatataatgtaaatataaatttcagataactatttttattaaacttctattactttttaaataatatttcgacaatcacttattcttttaaatatatttttaagtgtaattactaaaaaaattattaatgaactaacagctagcttctttaacataaacatcatatatatgctgcaattcataatgtagagttcacaattactgttaaaattctttcaatattttcagaattatgataaagaattatttttgcaatatatattcgaaaaaaaataaagagcctcttttgcgatatcatcattatcccaagagtactcttcaatttaattatcatgtatattagtttgctggctcccatttgcagcgaactggtgatataatagcgctttctttctttaattccttgaatgcattatcaatttctttacgatctaaaccagataacttttcaacctcacctgcgctaactggctttccagcctctctcataacttctaaaactttttctttaacgctcattactttaactcccttcagtatgaattatttattttctttgattatattccaaaaagataatttaatcaataatcattttccaataaaatctattattgattttagatattctttcttgtgtacacaaaattcatgagctcttatattaaattttaacttttcatcaattgaaaaagccataatatagtcatagcgacctaataccagcttcttaaattcactaactgataactttaccatcttttccacttcagatccaatattaaatttaggatcttttacattatataaatatacttcacatatttcattatttaagaagttatttaggctaagtttttctcttatacttccaacaaatcttaagtttctaaaattaatttctatccctatttcttccttaacttcacgttttaatgcattttctattttctctccaatatcaacatgtcctgctgctgatatatcatataatcctggaaaatcttttttcttatatgatctctgttgaagatatatccatttttcattgctagactcatctactatccaacaatgaacaaccttatgtagaagtccatttgcatgtatttccgaacgagaagctacaccaatttcatttaattcttcatcataaaatgacagtttctcttcactttccgtaagtatctcccccttttatctattttctttcaatgaaaacacttttatagctatattaacatctcataaccaatttttctatccaacaattctcttcatacaaatgttattactatcatttatatatggtccatagttttcatttaacttatagcccatactctcgtataaactaacagctgccttttgtctacttcctgtctgtaaaataatatttttaacattactttcaattgccaatttttcaatttcttttactataatcttagctacccctctgcctctatcttctaatgatacatataccctcttcacttctgctaaatcataatcaagaaattttaagcacccacagcctattggttttttgtcatcatatattataattgtctttaaatctctaactgtattgtgtgatgaatagttattttgcatctccccatatatttcgaataactcctcatcaagttgcttctctaaaaacttaaagcctacatcttccgaagtggttcttttgactatataattcatttttacccccaatttattttttatctttcatcagaaactctactaatttttcttcatgattaaatactaattcataattaaattttggtttttctattactattaacttaattttggcttcccgaacagccttaagcttttctagaactccaccttctttaccactgtctttagtcaaaattgccttaatattatattggcaaataaatgctttctccaattcataagatattggaccttgaagcgctataatatctttaatattaattcccttctcgactatcttttccaatactttaggtgatggtaaaattctatgtatcactctatggttaaactctaaatttacaaacttagaaacattatttccgcctgtagtatttaaaatatttccgtctatattttttataattttaatagcctcatcataatctttaactcttactatatcttctccagtaatactctcaagagcacctaatctttcatatcttatatatttaatcttaagataatttgcgcactctaatgcagtcttggtaacttcttgtgcataaggatgagaggcatcaactagcatatcaatttgattgacctctatccattttagcatttcttctgcattcaaaggctttgtgtttagctgctttatattaaattccttgagtaactctcctccatacgctgtagcagttgtaaccgcaatgtcactagtatatttatttattaacgataaaatttttcttccttctgaagttcctaaaataaatccaatcatactttctccattccagattgccaagacacattaaaaaaataacgagccaaccatgctaatttatttcaaatttatgtagtgcatcattaactcattattttctttcatatacctaaatacaaactatctctatcttttattttcatagcctctaggtgttataaatttttcatctttataataactttttgaatttcctactattacaatagacatcatatctactatatcttcatcaaaatctttgatagtaaataatttataactttgcccttctctaagtgcatgtcttactactgccactggagtgctatcctgtctaaactcccttattatatcaatacactctcttaaatagtcaggtcttcctttacttttaggattatataaagatattacgaaatctccttctgctgcaagttttactctcttctttatatcttcataaggtgtcattagatcacttaagctaatattgcaattatcatgcataagaggcgccccaactacagatcctgctgcactacttgcagtaatacctggaattatctccacgtcctcatcttttttaagttcaagtatcaatccagccattccataaatacctgcatctccagtacttattaatgcaacatttttatctttacataaatttaaagcttccttgcatctagcttcttcacctttcattcctgtcgaatataactctttatctttaactaagtcttttatcatgtcaatatatttgttatatcctacaacaacatcactatcttcaatggcctttaatgctctcaagctcatattctcaatgcttccaggccctattcctattactcttaattttcccatacttcaatcaacctctttcgcttcatttttatccttggaataaaatctaattcttattatctaattctatattatagcatttcactctaatataggtaagatagcatttgcaatcttaaaatgcaacttacctattgtatatttttctcatcgaaacaattttgatcatatgatattccattacttgaaataaaatattatattttgaaatattgctttttctctactcaaatttctatatttatggggtatattggctacgaatttaatagaattacctttttgtagtgaatacttttgatcatcaatatctatctctacttcaccttgagttactataatatactcttcaacaccatcactatgtggagtagatacatgattgcaccctggttctaattctatagtgaatatttcaacccccctattggcatcgaaagggaatataggatataacttcattctggcatcgtcttctataatcggatcaatattattttgatccactatctctaattcatcctgctcttcatcaataaaaaaggaaaatgatacctttaatccagttgaaattttccataaagtcgatactgtcggatttgattgtcctctctctatttgacctaacatagctttactaactccagtcaattttgctgcttcatccaaacttaattctctcttatttctgatttcctttaatttgcttccaataatcgaatttaaatttctcatattctgctcctttgctcgaaaacattgtatgtcataacatatatacaaataatatattgcacaaaatattgttcccgtatataatataacatatcttactaattagattcacaacttaatttcaaatattttagataaggagtctttcaaatggcaaaagcatttctattaggagtcgcagcatcatttttctttgcattcacatttatattaaatcaacaaatgaatatttctggcggaagctttttatggagttcatcacttcgatatatctttatgttgccactcttgcttattattatgattataaatagacaattaaatcctgtattaaatgatataattaataaacctattcaatggattacttggagcacaataggctttggattattttacgctcctttaagctttgcatctgcatatggtgcatcatggctagttgctggaacttggcaattaactataattgctggtgctcttatgtctccattattttttaaaaatattaaaacacctgctggaatatgcaaagtaagaaatacacttccgaaaaaatctctgttaatgtcctctttaatattactaggtatatttttaatgcagtttgaacaatcaaaaaatgtctctttctcagaaataatctctgtagttattcccgttattctagctgcatttgcttacccacttggtaatcgcaagatgatggaaatctgcgatgataattttaatacctttcagagagtatttggaatgactttatgtagcatgcctttttggatattaatatcaatattcggtgtattatctgtaggtatgccaagtaacggacaaatacttcaatccttagtcgttgctattttttcaggaatcattgccacaatactgttttttaaggcaaccgacatagtaagtaatgatacacataagttagccgttgtagaatcaacacaatccggggaagtaatatttactcttataggtggagtttttatatttcatgataaatatccaacatttgttggactagcaggcataatattaatagtaataggcatgattttaaatagtattgtggaatcataaaatcattggtttaacaaaaagataggctttgataagcttatacttatcaaccattgatttcattactttttacgactagaaatttttatatttccgttcttgtaaaaaacaagaagagatgttgcttcttctacttgtcaataagtatttttcacaacatctcttaatatttcttattcttctgctggcttgaaagttccttcaataaatttattaggattaaatatatgctctattcttggtagtgaaatccccaatgtttctcttagaacatcttctactgtttctactgctataatagttaattgttccttaacttcttgtggaacctcatttaaatcaactacattatcctttggaattagtacttttgtaattccggctctttgagctcctaataatttttctttaagtcctcctattggaagaacagctcctcttagagttatttctcctgtcattgcaagtttcgaatctacttttatacctgtaacaagtgatgcaagtgcagtaaataatgcaattcctgctgatggtccatctttaggaacagatcctgatggaacatgaatatgaatatctctttctctaaagtttatagcattaatcggcaatcttgattttaataaacttaaagagatttgcgcagattctttcataacatcccctagctgtccagttaagacaatttgtccacttcctagcattcctgtcgcttcaatgaaaagtatttctccacctacagatgtccacgctagtccagttacaacccctggaacattatcatcttgagccttatcatggcttgaaacctttcttcctaataagtcctctaaatcatcttctttaactttaaaaggtaattccaccttattagatacaatcttttctgatgcaattcttgcaatagttgctatttgctttttaagtcctcttactccagcctctagagtatattcacttataattctttctaatgctgcatcttctataacaagctgagtatcatttaatccgtgttcttcaagaactgctgatatcaagtgattctttcctatatggaatttctcattcatagtataactagaaatttgaattacttccatcctatctaataaaggccttggtatagtatctagagagttagctgtagcaataaagaatacattagataaatcataaggtacatctaaatagtgatcagtaaaagtatcattttgttctgggtctagtacttctaataatgcacttgctgggtctccattatagctagccatcaacttatctacttcatctaaaaccataactggatttatttctcctgctttctttatactttgaataattcttcctggcattgcacctacataagttcttctatgccctcttatttcagcctcatcacgaactccacctaagcttaatcttacatattttctgtttaaagcttctgcaatactctttcctaaacttgtctttcctactcctggaggacctactaatagtagaatagaaccctttttatcatttttaagctgcataactgctaaatgttgtattattctatctttaactttttctaatccataatgctgttcatctaatattcttcttgcctcttctaaatcaatgtccttaaattcttgttttttccaaggaagctgaattaataattctaagtagtttttaatcacattgtattcagcactatttggactttggctttctaattttcctaattcttctaaagcaacttcttttatctcatccggcatctgagcctcttcaattctatttaagtagttcttgtcctttttagaaggtgagctttttccttcatttaattcttcttggatagcttttaactgctctcttaatactgtttccctataattcttattagctttttctgtgaatttttctgctaattcaaattgtaattttaaagattctttttgttttaataaataatctataaatttaagacctctatcctttaatgattgagtttccaacaaatcatatttttcctcacttgaaatttgcatgaaatgagataaatatcccataagcttattcaaatctttttgaccttctacagccaacataaacctttctgatcctttaaaattctcactaatttcacgagtaacttttttaatatactctaccatttcatccttacttttttctgtaagatcaataatatcgggtgcaaattcgaattcagctttaacaaaatcttcttcaatactaaatgttttaatttcaactctatctaatattttaatttcagctttatatcccttttctgttttttcaattgcatttacttgaaatgtaacaccaactctatgaaaatcttcttcctttaacttactttgaccaaagttttgttttaaaggtaatgcaatattaactatatcttcatctgataaactttcaatctgagtttcactaaatttattaaattttagtgtatggtacattccaggtaataacactatatctgatacaggaattacttttcctatattatttttattatctaaatttatcatcataatcatccttcctattagaacattcttaaacgagcattcatttaaagattagttaagcaatagcgagatacttctgcaattatatttcacaaaatctctcgcactaaaaaacagtccgtttaattatataagtaatgcctcttgcactattctaatgagttcctttagcaactcaattttttcattttcatcaatacatgaattaatagcaattgattttactggataaaaaagtattgcttttaaattatcattttgaagatttttaaaaacttttctttctttcatttcatcaagaaaattatttaggttatctattcccctcttagtcaagcattgatttgataaagctggacaattagcaaattgatctacgaaatgaaagacttctccatgctccctaatataaataaaatactctttaacaataatttcaataacttgctgaccattcatcttattgttaagtttactgagtatgtaatcaaaaatatcttcagaatattcaagatatatgtcttgtaacatgacttctttattttcataataaatatatactgtagcaggtgatacccctgcctcttttgctatcttcgaaatagacgtaccgtgaaagccttctttaagaattaatttaataactgcttcctttatgttcttttgcttttcatcgtctttccttctcatttaaacacctctattattatatttctataataaatgaacattcttttattgtcaatatatattccaccaattttatcttattaaatgttaattttcttttaaaatctacataaagaaactaaaaacataatttacttgtttttaatctagtaaaaaatacatcactcctaattatcaaaagcattaaaaatcgctattcaactttaaaatagcgatttttaatactttccaaacttttatgtttaaaacaagatgtaacttaaatcaaacaattccttacatattcaatacatgtctacattcactagcacattgactacatacatcagcacaagtttgacaatgttcatcattgaatcttccgcattcttttgcacagctttcacatacggtagcacatacagtagctatttctcttatatgaccgcttcctcttgaaataaaacaagctgttgtagagcaaatttcagcacaatcttgaagtgatttaatacaatacatccgatctctagcatcactatgttgtaaacataaatttaagcattcctcacatatttgcacacatttgctgcaagcatcaatgcaatattgcattgggtttccttcggatattaatgaatttgaatgtctagtcatagttgcttccatttttgtttcctcctttattattttattgataacaaaatatattttcttctaacgcactaaaaatatactttgtaatttctgcttaagtcgcctataaaattcaaaaaggataaattaatatattgataattttttgtatacactttttagtttatacttgttatatcttaaatctttgtagttaatatatttgtgcatcaaaaacaggagcagattaagtaccatctgctcctaatttatatatgttctatatttaaattcttttatacaagctaatgacatgtacttcccaaaactcatctacccataaaccaactattgtatcaactgaaaaattccaatttttaatcaaatttgtagcttcttctatttgcctataatgaacctcagcatccactggattcgcagcacagtcataatggcctaccaatccaattattttggatttatgagctttaaccgaaatattaatcttatcttttaatctacttgaataaaacggattcccttctgacactatcttatccattccaggctcagttattaaatctacatactccacattaaaattttcttttatccaatttattactggaatctgagtccttccgtcaatacaatttaaaactgtcccaaagctttttttcattcataccacctaaaactattattcttaggtaagatatgaatataagttggcgtttgctatcaatctcctcaaataaacattatatattattgttttttaactacaaaaataattatattcataattctttattagaatcttaattgctctaatgaactcttagatgcattttacctctattctattacatttgcttccatagggctacagagttcctttaaaatgaaatctatatttcatttttatctctaaattcaatttctgtgccctcaggagcctttagtttaaataagaaactatcctcaactttgtatatcacttcattatttttaaccctaaaattgttataacctaaacctttaatcctgttaaattcctcttgaacattatccactaaaaagcacatatgaactattccttcgcttaacttattccacttagaaagattttctcccttcttgctggtttgtaactcaatcatgaatgttcctagttttaaccatgtattataatctctagtatggaaattctttgtctcttctacaatctcaaacccaagaatatttttataaaattcaagcgattctttgtaactattagtttgaatgcacacatggtgcatagcttttattcccattatttttcctccataataaatctatttatacttgtaaatttatccataattattctatttaaatacaacatattgtccctcatactctgcgaaaacagttcccttatttttaataacaaccttaagatctaatctactcttgttatgtttcgtgtatgtttcgagaaattctcttcttgtttcatcccccaagatttcacattgtgcagtgaaatcttcacgtataggagctctataatttatattactttttttaattactatctgagcctttggatcaatttctttaatatttacaaaaaccatagaccatccgcatattgtcatcaaagtatttatacttcctccaaacgctgttaatttatcatttatattaggttttaatttagcagcaagtataaccctcgacttagtaaactctataacacttatgcccatagcttctgtaattggtatgttggtatgtaaaaactgctcaaactcattctcactcattatcttacctccgatgttcatctacatgtattgtagacaaaatataatatttataaattttatcatataactcaattcaaatccaatatatgacataatattagaatcaaatgattattattctaatattgaaatataattgtcttaacttgtcagacatgctattgttatctatataaattctaatattaaaggagcaattatgaaaaatattacacattatttattagtttcatttattttaattttattatcattcataatgtttttcattcactatttagtatttggtcaattggaaaacacgatttattactcttttatgagtctctgttttatccctataaatatattagtcgtaaccctagtatttgataaacttgtagaaagacgtactaaacttgaacgcttaagtaaattaaatatgttagtcggattattttttagtgatattggttttactctattggaaataatagtagctggtgatgcgaatatacaatatttaaatctagattttatagacttaaaaacttctaataataaactaaaatcttatgaacacataatagcctttgaaaaaattaattatcctaggcttgaaaaactagttctcggaagtagagatattttatctaaccttataagtaatgagaatatattagagcatgaaacctttgccgatttacttatgtctctaatgcatttaagagatgaaatagtatttttacaatataaaacattgacaaaagatgactctactcacataaaaggtgatatttgcagagtctatagggcattaacttctcaatggataaattacctttctcacttaaagcaattttatccttatcaatataatggtgccatcaaattcaatccatttacagttactagcagataataattaaagcaggagctttaaattctcctgctacaatttctttaatcattaatttaaagtttaaattttattttacaatattatgtttatttccttaccacactttgggcacttattgtcttttataaatacattagttgaataaccattcctctcaataagcagttcattgcaattatcacaataagtattattatcaactccttgaacatttcctacatatacatgtttcaagtatttctttgcttcattttgagcttctgttatcttttctatttttgtagcctcattctccatcttatatcttggaaaatatctgcttaaatgaagaggtatattttcatcaacactagctataaattcagctatttgccttgattcttctaaagaatcgttttcttcgctgacaagtaaagtggtaatttccacatgacagtattcactgcacctttttatagtttctagaacaggctcaagttttgcaccacaaatattattatagtatctatttgtatatccctttaaatcgatattcatagcatctacataaggaagaagcttcttaagcggctcttcattaatatagccattagtaacaaccacaacacttgtatcagtattactctcttttattccctttgcagcatcataaatatattcataccacataaagggttcattataagtaaacgcaacaccaatattgttttctatggtcggaataatgcctattagtttttcaacgtttatatattgggtttgtggcttcccctgcgatatctcataattttgacaaaagctacacgtcatattacatccaaagcttccaattgataaaatatcttttgatggtttgaaatgatataagggtttcttctcaatgggatcaactcccattgaagttacttctccataatttattgcaatagggactttagattccaacgttctaactccacaaattccaaacttatcttcatctattaaacaattatgtggacatatcctacatctcactttatccttaacttcctcataaaacggtattttttttcccactctttatcaccttctttaaataaagtataagttattcataaatatctttgatttttaaaactatactattaaaatctttaactttaaataaatttattatctatccttccttatatcttacaacttcaaatctttctatcttataatcctcgtcaaaatctatatttgccttatcacatgcaatttgcaattgttcatctacagtattcacaccttcaagatccggaagcaataaccctcttctcattcctaaagaaacaatgactccatattttttaggatctaaatcttccttattacatggttccgaatccataagaacatctacagatatatcaatatcatccatttcatcttctgaaacttctggaaatcttggatcactcatagctgcttctatagaatttcttattatttcctcacccacagaacctgttgttggtgcaattgttcctatacatcccctaagattgccaaacttctttaaagacacaaagacaccgtgtctttcatttaatagttcttttggcaaattagagatatcttctatactttttccgtgagaaaaataatgatttaaattctcccttgcaagttttacataggaattactctcatttagctttgctttcagtttttcttctttatattttgttagctcgtctaaatagttcctatcttggtgctgtctactaagtttcattactccatatcccactccaaaagttccctgatacgataaaagctctccttttatttctttgccttccattgctccaagaagtatataaaccgaatttaacccacattgtccagcctcactaatcatagttctattcatattaaaggctcctaaaacatctcctttttcgaggttacctaaaagagctttatcaaacaattctccatatggtgaatatgaatatggtccttcatctttaagcttatgcgaaaggtctccacttgctataataacagcttttctatttaattcttctgctacattttttatctccataccaaatttatataagttaatatcccctatcattgagtaagtaatgtgaactaatttataatcgttgtaatatttattaatgaaatatagtggtactatacttccatggtctaattcataattaacattatatctacgtaataattcccaatctacaaggactgacggaattccttctacatgacatgcagtgccaagtttaacattaaattctttatctataggaatatccatttttatgtttgtacatctaaattggcttaaatctcctgaaattctttcctcgtctgatatggctattgcatcagaaaacattgtagcatgaggtgttataattattattgtatctggtttaatatctgctacttctctccctatttcattgcatgccaaacttgtttcctctattttcttttcttctcctttacctatgtctggtataattattggcggatgcggcattaaataataacctagtatattttccatgttctcacctcctaattggaactattgattttctctagatttttcattttccttaaccttttctaaatagtttctttgatttactatattttcttcgaaattttctactgcatgtttagtgaaatttccaacactcataatgttcttaaatttattaccttcactatttctactcattagttaaattctcctttctaaagaattatttaagctaattttctttaaatatatatgttgcaattcacaatgcatatttcacaattcacgattaaacctaaaattcttgcaatatttttagaataatgatgaatgattatttttgctagatatatacgtctttaaccaaaacagtttcaaagaaaattacttatctctcaattttattatcctttttattagtgatttttttaatctcttctccagaataatggaaattctgaattgctgtagtcaaatcacttcctaaactactaatactgtttcttttatcataaggcttattcttcataaatttgtctccccgaactctaatttatttttaaaaattgggtaaattatttttatagagataaatttctgtaataaatcatttcgtttctattatttctataaatatatttattatgcttgcagcatactaaactcataagctaacaacttattattagcttcttatcaatattagtctaaatcctcatataagggctgaaatcctatggatttggcactattcactgtattatctaatttttaatggtttgactaatattttttaacaatgttattataataattattcttaaaataattattaatttacctactttacatattaaaagtaaattaaacaagtatttaaatttcatttatttaattttaggaattatgtataactatatttgatgtaaaggatgattaatgtgaaatcaactacaaaacatggagatgttgcaaaactgagtgctggaggagtacttatagcactaggtgtagtttacggagatattggaacttcaccactttatgtaatgaaatcaattattgaaggtaatggaggcttgaagaatatatctgaaaactttattcttggatcgttatctctaattttttggacaattacaattttaacaacagtaaagtacgtccttataactttaaatgctgacaataacggtgaaggtgggatcttttcactatttaccttggttaggaatcgcgcaaagtggcttattattccagcaatgattggtggatcagcattgcttgctgatgggacgctaactcccgctgtaactgtcacttcagcaattgagggattggatttaattccaagttttagggctttttttggcagtcaggttgatattgttacaattgtaataataatattaagcgctctatttttcattcagcactttggaactgatttgattggaaaaatgtttggtccaataatgtttgtctggttctctgcactagctatatggggaattatcggtatttcacacgattggacattattgcgtgccctatctccatactatgcaattaacactctttttagcagtgaaaataaagcaggtttttttatacttggcagcatatttttagcaactacaggtgctgaagctctttactcagatcttgggcatgttggtaaatataatatttatggttcttggccatttgttaagatatgtttattattgaactattttggtcagggagcttggttattatcagctagacataatcctacttttacgaatatggaagatttaaacccattttttcaattaattccatcttcttttttaatttttggtataataatttcaactttagcggcaattattgcttcacaagcgctaatttcaggttcttttactcttgtttctgaagcaattaagctaaatttatttccaagattacatattatgtatccatctagcactaagggacaactttacataccttcgattaataaatttttatggattgtctgtatcggaattgttctctattttggaaattccgcaagaatggaagcagcttacggattatcgattacagttactatgttgatgactactattcttttatttaattacttattgaagaaaaaaacaccgctcattgctgctgtattaatccttgttttctttagtgcatttgagttttctttcttcattgcaaatattgttaaatttactcacggaggatttattgctgctttaatcgctcttgcaatcttaagtgttatgtatatttggattaaaggttactatattaaaatgcgtttattagaacatgtcccaattgaaaattataaaacccaacttaatcaattgcgccaagatagtgatcgtcctaagtatacaacaaaccttgtatgtttaactagcagccatgatcctgaacaaatcgaaagaaagataatgtattccattttagacaaaagacctaaaaaagcagatgtttattggtttgttaatattgctgttactgatgagccttatgtagcagaatattcagtagatactttaggaacattatatattgtaagagttcaaataagacttggattcagagtagaacaaaaattgaatgtctttctacgacaaatttcaactgagttagttgaaaatggtgaaataaaaattcaatctagaaactatacaactatgccagatagaaaagtcggagatttccgttttcttttaattcaagagcagctttcgtatgagacagctttaaatttctgggaagaattgatacttaaatcaaaattattcataaaaagatatactgtttctccaaccaaatggtttggccttgagaatagtgatgttgatgttgaaaaggtacctctatttatagggaaatatgaccatacaactttaaaaagaactccaaaatagcattattaaattaactaaatatttaaatataactgtccacaatttagtgggcagttatattttttctctaaaatatttatttaatttttacagtttattttttctatagctttatatataaatataagaattgttcctattaagtatgaaatgatatcacaaaaatcaaaagttgatccaagaattatttttgctattttaaaatcttccatgtgcaaaatagaaaccaaattaaaatactgtcctatctcaattaagcaagcaaatatgaaaacatatattggtgaaaccttcttggtaaacactccaataaaaaaataaattaagcatacaactaatacatctccaataaaaggtctaattatattatcatgtataaaagctccaatatatacttctattaaaaataagactatgaaaatatataaatatttgtagtttactctcatatgaatccctcccattaatctggcttaaatatataattttttacgtatccattgaaataatttatatcagcatagaccaatcctagactactgtggtcaagttcagtattgtgctccccaatattttcattataatttgttaaggctttgccgtcatgatcagttcctatagaataaaaaacaataaggatagaattactgaatttctatccttatcatatattctaaattgatttatgttttatattatactctaatccaccataaaagcttctttaaagtattcttcttgctgcgtaaaagttatatactggaccgaccttaacaacatcacctgtttgtggtgcatgaatcatttgtccatttccaacatatattccaacatgtccagcatgagggaatactaaatctccaggttgaagttgatcctcactaacaggtcgtccaacatcaatctgtgtataagttgttcttgaaatatctatccctgtagcatgctcataaacatattctgtaaatcctgaacaatcaaatgtacttggtcctgttgctccccatacataagatgctcctaaatgcttatatgcctcattaaggactgcttgtgcactacctccagatggcgcagctacagatgaacttgatttctgactactttttgatttgacgcttgattgtacatttgaagctactactgattgctttacactttctgcagcaatcctatcttcctcttgcttctttttagccgcggctgtctttcctttttctattttatcattgatttccttagtaacaattgggctcttaatttgactatccctaatactaattaactggttaactgctccttgaatctctgttgatgaactatttgaactatcaattatatcaaactgatactttacagcgtctctttcaagttgtgataaatactgttcatcaaatttacttttttctgccttagcctgattagctaattgttcttcttctttctttttttgtgataactgatttaaattatcctgtgtttctttgttaagcttgctaatttcagcttttttatcgtctaatgactttattttagcatttaattcatttttcttgttattgatatcttctatgtaagacttgtctttccctacaatcttactaacagcctgcaatctcgaaaaaaattcagttgttgaatccgagttaacgacaaaatttaaataattaaattccaaatctcctgatgcatacataactttaactctttgtcctaaagctagatctaaatcattgatgtcttttttgtattgctcaatatccttttttgtcttctcagtaattttattaatattatctatctctattttatttttatccacagttgcttgtaatggctccatctgagtatctaaatcataaattttattttcaatatcttttatgttattttctatttccgcatatttctgtctagaagcatccaactgtgcattatcaggtgctgcaaaagcagctatggaactacttgtagtgattactgttgctaatataagtgctaaaaccttatttttcataataccgtcggttgttacaaccctttccccctttgtcatcccctgttatacataattatagcacttttagtaaccgtcaacaaacctcatatatgctgtgataatacattaaattagtttttcttctctattcttctattctccttaaaaatttggtaaaatattcacatttacttaagttgaggtttataaatatttttatatacgttagcatattttatataagaatgcagacttttacaataagaatattttttgattcgccactactttttctataatttcactattaaatttattactcaaaaaactactccattaatattattttgatttttcacctttatgttttcctagttaacaaagtatttatatccattagattttagtctcataaaagaaaaaaagcactaacttccatataaagaacagttgtgctttcattaaaatacttcataatttatgaccaatactattttaaactaatttgggaagcgtagtcgctccatgaggcataaggttaatcgtaggatttttattttgattattatcataagaaattttaagtgcctcttccaaagttctaacaacaataatttttgtattctttagcaaatcaggatcaatttctgaaaccaaaattaacctatacttttctcctgtttcacagaaaaagtaccctacatattttgagatagtataattctctctaagatctctttctctatcaagcatattgtcaaaatttaatatcatatcattaatatctttaatttctccaattccctcactgcactcagcaagtactataatggtacctccttctacaaccgcttctttggcatttatcaaagtttttattgattgataaagatttatgtcttttggtgcccctcctgcacttgcaataactatatctgatttacttcttatattgacgccgtcaatactatccaccaattttcttcctgcctcatgagctgttatatagtctccagcaaccgccccagctatatttccatcaggtcccatgactacattaaacataaatgctggtttcaccattgctgctgcttgcatcatatcatcatgtactgggttttctataatattacccgagcacacactctctcttgtcccgcttccaaatccatcatttaacgaaagtgaatgattggctgatattgttttaaatgatgcaataccaggaagtatagattttttccctcctgaccagcctacaagaaaatgatagactatagctcctgtaataactatatgatcagattcaacagcttttttatttaacataacaggagtgccatagcttgtctcccctagatatgtcatactttcttcatcgaagcaatcatgatcgtaaacttcaaatctttttgatagcttttctccaagaagtatttcatgttcttctcttgtctgttttctatgagtcccctgagcagataaaaatataatatcttcgtctttaactccgccttcatttagttcctctacgattttatataaaaatttatatggcttttgccaacttcttgtaatatctgaaattattatacaaactttttcaccttcatgtacaatatctttaagtctttcgctgtcaataggattatacaatgcctcagctataatttcatcttctgtcttactctttttaaaatcgttgctttcaattatctccaaaagattttcttcttcaataaaagccctcattttatctcttccatatttcatattaatttctttcatttatagtcccccaataacgaatttgttaacgctttcgaatttttattgccaatttatcaaagttttccatctacttttaatataatacaaattttaactatagtcaaattagaatttagaaatagccttttattctaacatatctatttagactcaaatatatttaatcttatatcaaaaagtaagaaacatgattgcttgatatcactaaaagaacaaaatcgcagtcgactgtggagccagagatttttttacgcatctgccttttcgaacgcatgtgagaaaaatctgcacataagaaatggcagctatgctgcatataagaacattttatgcaggcgaatatattttcttttttattctctttataaagcacaacattcttaatcagccttttcataagttatccacagatttgaatcgaatataaattcctagagaataaaaaaatccactattcattgatgcatagtcacagtatatagggatggatcatacacttcatgataacattcacaatatttacttagtactttcttggatatatgaaaaaaattaaaaccatggagaaacatacatctctatggttttaactttatatattataatttattacaagtataataaaatatcatatttaattttgaaaattcactttttctatatagtgacaattaacatcaatatgatttaaaaataataataatctctcataaagcggatgaaccttatcaccatattttgcttctagactttctcctatgtctttaacatttttctttccatctatctgcaataatatccagcttccatattcatctaaagtaatctttttatactctggaattctgaatttaagttttctaaagaacctttggaccttatggtcttgttttaaaagtatagtcacaatattatctttatccacttcatactctaaatcatcagatattttatatactaattctaaaacatctttattattttccagcattttttaccttactctttagaattggtattgcagttgctattactaaaactattagtaatatgaatgccattccattagaagctgcaaatccacttggttcagctccacctacaagacccgatatctggaatattatccctataagtccaagaatagaacctccagcaactagtccagaagataagcttataccatttgaaactttagcttctttttccttttcagatttagaattcttttctataaatagacgtaccaatgctcctgccaatattatagtagttgtagatataggtaaatagaatcctatagcaactgccattataggaaggtttaacataaataaaacaagtcccataacaacaccagcaattaccattacccaaggtaattggcctgacattattccagcagttagtgtagacattaaattagcttgtggtaatgcaaacggaacattatcaccagtaattgcaagttgatctgaaagtaataatatagtaccaacaaccactgcaacacctagaattccagctattgcaaagtatttttccatttctcttttgtctccacctattacaaaagtaaccttttgagattgtgagtaaccgcctgctactgatatagcagtaacaataaatgtcccaaataaaagtagtgatttgttgctttcagggctcttccatcccattacaacaaataatgatgtcacaataactatagaagctatagtcattcctgatacaggaagatttgaagttcctatagtaccagtcaaacgaccagaaactataacaaataataatgataaaaacattgataaaatagaagcaagtattgccattactatattaccattagatgctacaaaaccacctacaaatcctaatattataccaccaagtaatatcatattttcaacagatgaactctttccactatttgaagctttagcattaagagtttcttttatagaagatattatagtcggaataagttttatagcgcctattaaaccaccagaaagcatcattcctgcccctatatattttacatagctaccagctatatctttaacttgcatagcatttatagcaacattaggattattccacacagatcctccatctcttccaagacttgagaagtaacctattaatggcataattccaaagttagctagtatagctccagcaaacatagttaaagaaacctccataccaactatgaaccctattcctaatagtagaggattaacttcaacttcgaatttccacttataaaacgactcatttacataacttataacattgttaactaaattcaaaaatgaacttgttataacagttataatacctcctattccaaaaccaattcccatgaacttcattgattctccagcaccttctgaagcaacaagtgtttcagatatagccattgattctggatacattaatttaccatgttcttcaacaattaagtaattgtaaacaagagaagctattcctataccaaataaaactccagctgctccaacagaaaaaccttctatgaaactaactttagagcctattaaaagaattgctggtaatacgaatattacaccactagcaacagattctccaccacttgacataccttgaactaaatttttaccaagtatgcctttttgctttgcaaatacagctataaacccagaccctattatagatcccggtataccagcagcaactgtaagtcctgatttcattcccgagtaggccgttgatgctgcaaatagaacagccaatataataccgattatcaaaactgaaacgtttccacccgacttcgaaccgttagaaatgtatggaacatagctcttgccggctacaccgccatatgcatctttggacaatttattattcataagggcacctccttttatattttacaagcaatattataacacgattttcatataatactatattttttctcttcaattatttatatttttttaaatatttttatcaaaatatttaatttttttgaagatttccacacataatagataagtttagcaatataagaccattacactttaattcatctagttttagagattagcatatcaatagaattatgttttcctatgataagctataatattctaaacataaaaaatatacaatatattcgtttaatttcctaaatacattgtatactttatgttaactctaaatactatgaatcacgtcattaaagaattattttaagcttatttgaataatcaattgcatgaggataaaaacatttaaagtcactttcaagaccttcgtaattattaattaactcctctataggatttactaatgggtgccttgtgttgacaaatcttgtagcaatcctatcaactgctgtttgaatgccatgtatatctctgtaagaaatgagccagttttcttctataatataattcatccttcttaataacttatctggcagacagtaagaaaactttctaagtatcttataaaaattatcagcatactcttctaatgatattgaggaataatccttccaatttttagctaagaaatgatcataaaatatatcaatcaatacacctgccaagcgtctattactttttgaaattctttttctactccttaggaagtctggatgtgaatccgtaaaggtatcaagctttttatgcataataatcccttttcttattgattgttcaaattcattttccaaagacttatttacaaagtcccctaagaaatttcctaacatattttcttcgctattatctgcgagatatatgtgtgctaaataattcattttttctcctttcaaattcctacaaataatattctaaatttataatttctataacttattgtttttcattctttaccaagataatatcactgatatgatctttggtcatttaaaagtatcatatttttctctattaattataagttcttcttcatataacacttcttatggttttctgaacaattatctaatatataagcatgttattgataatagaaattacaagtgttaaaatttaatagaaacaaatttaaataaagttctaatagatgtaactattatagtatattattgagcatttattctaaattatattaaggagtgacgttaatggagaagatagcaagttttacaattaatcacctagaattacttcctggtgtatatgtctcaagacaagataagtttggtgatacagttcttacgacttttgatattagaatgactagaccaaactttgagccaactatgaatacagcagaaatgcatgcaattgagcacttagctgctacattcttaagaaatcataaagattatgcagataaaacagtttattttggaccaatgggatgtaggacaggcttttatttgattttacatggtgattataaatctaaagatatagttcctctacttacagaactatataaatttatggctgaatttgaaggagatattcctggtgcttctgctaaagattgtggaaactatttagatatgaatttaccaatggcaaaatatttggcaaataaatttcttaacgatatcttattaaatataaccgagaaaaatttagtttatcctaattaatgaaattatgataaacttatatgatataaaaaataggatgcttttatgggcatcctattttttctttccttaatagatatatacttctagaatctcttaaccgatgtttatctaatagatatttttcatttatataatttataacattttatagataaaccaactaagacctgaacttatgcatataactcgccgaaatgaataacatacttttgttccagtttctagttgggatatatttcatagtataaatctaacttataattggcttatctatatagacaaacaatttaagaattcgatttattagattaacatatttacaaagtcgctaaaaatttaatttcataagttgttccatttttgcttgtcacgagcttgtctcgggagcatgctgaaatgatgcaacttattatgttagaaagcctcaacttattcttagtaaccgaaacaacagagtacctgtcctttcggtaagttattgcataagtctaagttttgttttggatatctctagttcttatatgtgcgtattacattttagaaattgcaaaactatattctaaatctttacttgaatcgatacggaattcaggtaatactggtgctccccagctgtcatctccgccaacacccatttgtttacctattatattcacatgagtaaaattaacagatggtaattcttctatatgaagtgcgttttctaattccatgttgctgtatggtaaaacactaaattcaaatggaactttatcataagtaaatttaagcccttcattcttatgatttttaactactacccatctagttcctgtcctgttaccacattcttgtggtactaaataccttgatagattttctattggtgtactttcatatattccaagttttgccccttcacatctgtctatatagttttcttccggccccattccataccagctaaatgaattaaattcggctaataatttaaaattcattcctagtacaggcagttcaggtaatccgctaactcctttatacttaacatttactttaattattccttctccagatacttcataagttatcttaacattagtagatggcactgttgataattgataattataatataatgtaatcttctcatcaaattcctcaactgaaaaatccacatacttctgccccatagtagcagccagccattgaccgcatctaaattcatgtttatttcccctatcattatctgttgttgctctccaatagaaagtttttggcgttcttgttataaactccttgttattatatctcaaggatacaattcctccttcttgtttagagaatataaccttgaaatcttttccgtgaacccctatgtttacatctccatgaatgatcttcatttcagactctgaattatgattattcatatctgatttttctttaataaccttttgtccaaatgctacttcatatcctttttctgcccaaagtgtatcttgtactaatcttaatgaggttgtaagtacaatttcttcaagaaaattatacttttctattggaagttctatatatttttcttctcctggagctacacatacatttagataaccatctcttactagttttccatctctttcaacgatatagtataaatcatatttatcagtgttaacaaaaagattttgattcttaatagtcaccccttttgcatctggttctaattttacgttttgatataggtacttaacttcctgtgctttaggtgatatagttctatctgcataaatcaaaccatttccagagaaattataatctgttggacgatctgtaaagtctcctccataagctagaacttcttttccatctggaagttttctatataaagcttgatcgccataatcccaaataactccaccttgatacatcaaatatttatcttcaagttctgtatatttcatcattccaccagttgagttacccattgagtgcatgtattcgcagctgatataaggtttctttggattatcattaagatactcttctatttctgctgcctttgcatacattctactttccatgtcactcgtgtcatcaaattctctacatctagttaccccttcatagtgcactaaacgtgaaggatctttttttctaaagtattcagacatttgataaatatcttcacccgcataagattcattaccacatgaccaaataaggacagatggatgatttttatctctttcaaccattgatgatgctcgatctaaaactgctgcctgccactgtggaagacttcctggcacattccaagtaggatcgcaagtgcctatcttttgccatgaaccatggctttctaaatttgtttcatctattaaataaatcccgtattcatcgcaaagcttgtaccataaactttgatttggatagtgtgatgttctaacagcattaatattatgttgtttcaagaacttaatatcccatagcatatcctctttcgtaattgagcgtccacgccttgcgctaaattcgtgacggtttacacctttaaagataatacgctttccattcagacacataattttatccttcatttcaaagtgcctaaaccctatcttttgagttacaacctcaactaaagtaccattttttttctttactaaaatataaagtgtgtataagttaggctcttctgcactccataagcttatattttgcgcatctaaatataaagtcaactgatcagaaaacggaactttttcagatatagctattttatttccttttttatcttctaaatatgtttcaactgttgtttctgaatttccaatcattttaagttcagcatttaacttcgcatttttgaaatcatcatataaatctgtttttataaatatatcatttacatgagtttctggaactgcatataagtatacatctctaaagatgcctgaaaatctccaaaaatcttgatcttctatccaacttgcgctactccttttataaacttcaactgcaagtttattttctccctctcttaaatagtcagtaatatcaaattctgatggtgtaaatgtatcttcgctatatcctacaaattctccatttacccatacataaaatgctgtttcaacaccttgaaaggaaataaaagtctgcttatttttaagttcatctttaacttcaaaaaatgttacatagcttcccaccggattatatgtttttgaaatatgaggtggtcttaattcatcatgaccttcccaaggatacatagtattgatatattgacatttatcatatccttgaatctgaatatgacctggaacttcaatataatcaaatccatttatatcaaactcatccttataaaactctttaattcttaatgatggattttcactatatgaaaatctccattttccatttaaattttgcttaagaggcatggcgtcttctaatttaacatcctcaactttttcataaaaccaatgatcggaatgagcatctattctattaactctaaatatttctggatcttctagccaatctaatgacggtttattattaatcatactcttacctcactttcaccttgtagagttattgcttttttaaattaaagttgttaatcgtattaactaaatgtaactcttttataaagtcacatttaattaatacttaaacatatatgagaataaaaaaaattatgggctaatattattaggacaccttacttcgtaaccaattacattacctctttaatttatcctatcttctgaagttagatttatgctattaactaaatttatagtttcattttattatctttttagtaaaaaatcaattatattttactaaactttactaaaataatttatcacttaattgaaaacctttaatttataagatataatcagtattaaacaatatttatctatcttgtggtaattttagaatagaggtgctaactattgaacgaatatagtaaaattttagttgttgatgatgaatttattatgcgacaaggcataactcatatgattgattgggaaaaagaaggcttccaaattataggacaggcttctaatggtcaagaagctctcgaaatgataaaaaaggatattcctgacattataatttctgatattgtaatgcctcaaataaatggaattgaattagctaaatttgtacaggacaaataccctaagataagaattatcatcttaagtagttatagcgattttgaatatgttaaatcatcttttcaaaatggtgctgttgattatattttaaaaccttctctaaatccttctgagttattaagtactctaaaaaagatttcaattaaaatgaaaagaaatactttagaaggaaactctttaagtctcaccaatagcgccttaaatcgacttatatctggctttgacaatgatcctgactttaactattttaatacgatatttacttttcaatcattttgcttatttggtttaaacgcaaagaaaatatatgataattatagcaaacgccttgaaattattgattttacaatttcagaaatcggcaaggaattttctttagaaggtttaaatgcaaattataatatacaagtcgctaatattaaaaacgaaatcatagttgtaattataaattttgatgataaaagttataattctctatttagtaagctagaaaatatttcagaaatagtttcaaatagttttaaagaagcattttttgtattaagcaacttcttctattctagtagaaatattaaggatatatacgaaaaggaattcctagtgttaactcaacaatatttttacaacaaaaatgtttctttaatgtgctcttccaacttcaaaacaccatcgccaatagaaaaatttaattttaagcgtttttcagaatcaatttctataatgcaatttcagaatgcattcgaaatgctaacaatatacgttacaaatgctattgatcaaagatctcttacagaatttgaattaaaaacattgattcaaaattctttttataatgtgattacttctttagaatatttaaattttgatttaaataagctaaattcattaaagcaagagtgctttcatgacatagataacactaaatattcagaagacttacttgtggcctataactctctcttaaatcgctttaaacaaataatagacacatatgaaaataaaataaattcacatatgattaataaaattattcaatacattcatgatcattacgacgagcaacttactttaactaatgtatctaagctatttaattttaattattcatacttatcaacctactttagttcccataacgaagaggggtttaatgaatttcttaataaaattagaatacaaaaagcttgtgattttttaaaacaggacattcctatctcagatataagcggaatggttggctactcagatcaaagttacttttgtaaggttttcaagaaatttatcggactcactcctagcgcttttagaaaaaaaggatattaatactagtaacaaacgaaaggacttttcattatgctaaaattatcaaaatcaatacattctacgagcctgttttttagagttgcttcagttgttcttataagcgttattttagtatctatttcaataggaattattacaattaaaatttcaaaggatatacttgctgatactttcagcaaatcaaattataaagttttaacacaaattagcaatgaactcagtacatttaatgataatacaattaacattatgaatgcgattgattatatccctgattttcagcgatacttatcagaaaaggagcttactccacagcaaaattatcgaactttatacaatatgtttacaggcttccataaaatgatccctgataaagatctttatgatattactgtactagctgtaggcgttaatgggaatacctatgtagcaagcgattatgaccatcttatccttgatactaatgaagttttaaatagcagctttactaaaaaagcattagataataagaatactgttctatatcaatacttagatcatggttttacaaaactcacaaaaaactctagtacaattgtagctataaaggttctgtgtgataaacttacaagagaaccctatggatttgtatatgtacttattagtgagcatacattccataaatattatgattattttgtaggtaatggtaatagtatttctatcatatcaagtgatggtactattgtttcttctagcctttcttcaaaaataggaacgaaaaatttagatttatataatatatcaagtgtcattttaaataataacctcaaatacgttaacactaaattagattcttctgatgtagcaatattatcaaaacatttaccaacttataattttaatatagttggcacgattgataaaaatatagtattaagtgaaatatatgattcttctgaaattatagcagtaagtatcttaattgcatcaatattcattgctattactttcttcgtaatacgaagaaccacaaaaccaatttcagctcttgttaaagttatgcctaaaataattcatggtgatttcaataatcatattcccgttgtcggaagctatgaagttcgcgaactatcaactaactttaactatatgttagatggattaaataattatgtccatgcccaaataaaaatgcagaaagaaaagagaaaagccgaaatacatgctttacagatgcaaattaatccacactttatttacaatactttagcttcaatcaaatggcttatgtggcaaggaagcacagaaaaatctatacaaactatagatgcatttatatcacttcttagaaatactattagtaataaaaatgaaatgataacaatacaagaagaaatcgaaaatttaaataattatgttttaattaatcatatacgatatggagataatattaatgtaaattttttcgtaattccaaattgcgaaaactatgtaattccaaaattaattttacaacctttcattgaaaatgcattttttcatggctttaatgaaagaaataatggatctatacatgtgtttgtaaatgaacaaaatcagaatctaatttgtgaaatcatagataatggcgtcggaatgacagatgaagaagtacaaaagattcttagagaatcttctaaaaaacacgaacattttacaagtattggaattcaaaatgttaatgatagaattaaacttctatatggcgatgattatggtatttcaattagcagcgaattaggtaaagggactactgtaagagtaacaattcctgctcaaaaggaatttgtagagaattaactatgtgggaaaaatctgtatatcagaaatgatagctatgcacttataaaaagagtatctatgctgcaatagtgaactattatgaatataagaacattttttgcaagcaaatatattttcttcttaattctctttatgatccataactttctgagtcagtcttttccataacttatatcctcaatgggcacaacatccacagatttaacttgaatataaattacttaagaataaaaatttaaaaactataatatgttgtatataagttctaaatgatataattcactccttatagtattatttgttttgaatcacctaatagtttaaggtaatctctgatgaattaaaatttctagaatatatattaagtttcaaatgcagcatattatagttttctataaataaaacatattttataattattaacttttcttctttaattcattatagaaaaattgactcataggaacttctacttgacattttaaagctaattcaattaactttccagaaaagacctctaattcattttgtcttcctgcttcaatatctctttttaatgaacttgttgattctccagcttggttatgcattaagtgataaaagtgctcttcttctaaatcatcagaaatattaatttttaatttacgagctacggcacaagattcctttagtaatattttaatttgcttgactgcttcatcattttttataatttctgctgttgttgcgttataataagcagttattacgttatatgcacaatttaatatatattttctccaaattgcagcttctatatctttttctattttacaaataatttcagcttcttgtaatattttttgaattctaattaatacattctctacttcatcattgttttccaagccataccctatatgtatcttacaataagaacttgcatgatgtattgaaaaatctttttctgccccagaaactacatatattaaactatcgacaacttggccatcatttataaattttcttactttttcagatactccaactccattcattaatggaattattacagtattttcattaatcattggttttatttgtttacatacttcttctaaagaaaaatttttaacacatataaaaatataatccattattccaatttcatcagcgctatcgcttgctaatttaggatgtacgtttaattctccatgaagattactgtataatttcaaaccattattttttattgattctaatctttttcctcttgctaaaaaataaacattagaaaaatgctttgcaaacatacagccaatatatcctccaactccacctaaccctacaacacaaattttactattatccataaataacttatcctttcaccttttattatttattcaaaatactttatctaatttatacctatttagtttatttatagtatatcattaaattaatacattgttaattttcattctttctcctcacttataaataagataaaatcactacaaacctttaatttatagtgattttatcttaattgggggtaatatattaattttttaacatatatatcgaaatttaatttctacattctatccttaactaaacacttgtcttactagaattttaaatgtgaatttattattgcaacatatatacataaagaatttttctcattctaataattaattacaattaatttgctttagtatttttagaccatacttacctaatatgatctttccactgatttcttctccagaaagcatatcaaaatatatttcttctcctaaatccacctttttttcttcttcagtgaaattcataatgaaagtatacttattatttttattggaacgcatttgagctgtaacaccttgtggcaattttccctctataacactcttaatatttaaatccttaaaaagctttgaataaaaatcattgttaaaatctgctcccgttcttgctgaaatataatatgctcttccatctccatagttattaactgttaacgcaggcatatccgcataaaaatcttctttatatactccaagaacttctgcagtttctacatggattaagtcacagtaatcttttacttcatattggctctttaattctttaattttatcatttttaaattctatataattcacttcattatcatatagtgaatctatttcttctgaccaaattccagttacttctcgaagtggtcctggaaatcctcctaagaagcaaagatcattttcatccaccattccgctaaaataagtagttacaaaagttccgcctgtctttacaaattcattaattctttctgcaacatttggtcttatcatatatagcattggtgctattacaagtttataatctgatatatcacaatccatattaataatatctactgaaattccattttcccaaaatactttataagctgcttgacagctttcttcatagccctttctatatttttttaatccctgtgcatcatcgatagcccataagttttcaacatcaaatattatggccacttctgattctttaattgacccttggatttctttaatcttttttaagacttctccaacttctgtaacttctctaaatactcttgtattctcatggccacagtgatctacaacagcaccatggaatttttccgaagctcctcttccttttctccattggaaatacagaacagaatctgctccatgagccacaccttgcattgatgataataaatgcattccagggcgctttaatttattagtatcatgccaatttactagactcggagtactttccattattaaaaacggatgtccaccttttaacgacctatatatatcatgcacaaaactaacattagctgcaagatcttcagtactttcaaaatcgttatgccatgcaggatagttatcccatgtaactacatccacttcttttgcaaacttccaataatctaaacctgtgaacaagcccatacgtggataattacccatgaaattagctgttacaggtatgttaggtgttatttctcttatgggggcaatttcatttttataaaaatctattgtctgatctgtaacgaaccgcttccaatctaaattatgtccatgaacaaacatctcacccttttcagacggactttcgatttgtgaccaactgttaaatctatgactccagaaaccagtccaccaagcctcatttaatttatctaaattattatcgtactttcttttaagccattctctaaaagcatcttggcagagatcacagtgacattctcctccatattcgttagaaacatgccacataataagcgctggatgatctttatatctctcagcaagaattttatttatttcatatgttctttttctataaacaggtgaagtaaagcaatgattgtgtctctgaccatgaagatttttacttctatcgctatttactcttaagacctctggatatttttctgacatccatgcaggtcttgcaccacttggcgtcgataaaattacatgaatattgttttcttccatatcattcataattttatctaaccaatcaaatgtatatttcccttcttccggctctattgaactccagccaaatatgtttattgatacacaattgcaatttgcaagtttcataagcctcacatcttcttttaatacttcgggataatttagccattgatctggattatagtcaccaccatgcaaaaatccatttattttactactaagtacaggaaattccttcttcacaagctaccctccaatattttataaaactcttattttttcagattctaattatttaatgaattatattatttaaaatttatatatacttatactttagttctattaaattttattttattgaaccagtcattcctgcaacaaagtgtttttgcataacaaagaatacaaatgcagttggtaaagtcgtaattactatagccatcattattaatccataatctggggagtaacttgacgctaactttgaaattataagtaaaacagttttcttttctggtgattgcaatgcaatcaatggccataaataagcattccatgcactcataaatgttataatcgctgctgctgcataggttgttctcatagttgggaaaaatatcttaaagaaaattccagcttcgcccaaaccatcaattcttgctgcttctaaaatttctttaggaaatgatttagcattttgtctaaagaagaaaattaaaaatgcagtacaaacactaggcaaaactacagcccataatgtattcaccccaagaaagcccaatggtgaactttttaaatttgagaaaaatttgaataatggaatcatcaaagctgaaaatggaaccatcatagacaaaagtaaaatgttaaatagtctatctctagcttttgttctaaatatttcaaatccatatcctgctattgatgaaacaaggagtgcaagaattgtagttataatcgcaatttctgctgaattaactaatgaagaagcaaatcccaattctggcttaaaaagattatttaaattttccataaagctatgcccaggaattagttttcctcttgttacatcaacagatttatttgttgcactaataaccatccaaaaaaacggaaatatagaaacaaaagatgctatactcaaaaatatatatttaaatactctattcattttacttgtcattcttatctcctcctattttgaattggattatagctaacactaccactataataacaacaagataagctaccgctgttgcatatccaaagtctggtgtatatgtgaaacataagtcatatatatatttagaaatggtagttgttgcattggcaggaccaccttttgtgatattcataggttcatcaaataactgtaatgtaccaattgttgaagtaattgttgtaaataatattataggttttaatagtggcactgttatagatatgaattttttaaatggagatgctccatcaatttctgctgcttcataaatcgaatgatcaatattttgtaagcctgacaaataaaatatcatattataacctgtccatctccatgttatggctataataatcaatatcttagcccaaaatggatctgtaatccattcaattggtactgaaattaaatgtatattgataagcaatttatttactaaaccatctgatgcaaatatgctctttataataactgaatatccaactaaagatgctacacaaggtaagaaaattgctgttctaaaaaagccactaaattttaattttttatcattgagaactgaagaaataataagtgctaaaataatcattattggaacttggactattaaaaatataaatgtatttccaactgctttaatcaaagttgcatctgaaaacattctcacatagttactaaaaccactaaattttaaattattacctttacctgattgtagtgacattatcaaagattgtatcattggaaaaaacacaaatagtcctattaaaaatgtacctaatgctacataaatccatccccaaaagttttctttgctgttaataccagatccaattttgcgtttcattttttcaactcctttaggatttataaaaggccatttgctaaacatatatttaaacttttaacaaatagcctttacaaattcatatttttcaaattacggttattttatctgtgttatttgcttacagctgcttctgcttgagcttgagttttctgaagagtttcgtctatatcggctccattaacaatagcctgcatcccttctgacataacactttccaattgatatgtgtaaagaccatagtttacagatggaaccttttcagcccaagctgataaatctttaaatacttgttgatctccataaaattttattggcttactataattttcacttgtacttgctgattttaatgtacttactaaaccaattgctggaactaaatcattcattaaagcatcatctgatgcaaaagtatttgctaaaaagtcagcagctaaatctgaatttccaaccttatctagaacataccagctactaccaccaaggttagatgcattaactgattttggatttgaagccattcttggaatagctgctactgcccattttccactctggtcttcagaagcttgtattgaagatgaaacccaacatccacttggcacagtagcaacgtcacctttttggaatgctgctataaatgcatcccatcctgatacttgctttgtaattcctgcatcaaccatttgcttgtatatattaattgcatcttttaaagcttgattaccagcaatatttactgtttttccatcatctttaacataccatgaaccagctgattgcatcatagctcttagttgatttaaatcacttggatctatagttatcatagcttttccagttttagctttaacagctttaccaatttctatatatttttcccaagtaaggttttgcatatcttctttcttatatccagcttgttcaattaaatctgttctataaaataacgctgttacgccactatcaaatggtaccccgtaagtcttatcaccttgctgcatagattttaatttataatccataaatttacttttatctatttttccacttaaatctttaatctcgcctggataagattgcaaataattttgaattttatagtcttcaattaacacaacattaggaagcccatcatatgttccagatgaaagacctgtatttaatttttgcactacatcatcttgtgccatacttactacgttaatagttacatccgggtgatcctttagatatttttctttagccatattagctgcttttatattgaatgtatcatcccaagcccagatagtaattgttttatcatcttttcctttgcttgatgatgaagcattgctaccacctgatgatgaaccacatgctattaaactaaaagccatcatgccagttacaactgcagccataatctttttaagtttcataaattattcccccttgaaattaaagtttatacataaataattttctaatttatattagttatgtatttgtttacattatagcattctcaatatagtaaacgttattgcattattggtatcaatttgtaataattttataatattaatattgggatttgtactttttttggttattagcatttttttattagtttgatgtaaatattaaactcgtctttttcaataaaagaatttaatcttcacgttagatttaatggtgataaaaatctaacatgctttttgtattttttctttatctaattcttcaaaagtttaaatatatatgttgcaattcacaatgcacatttcataattcacaattacggctaaaattcttgcaatatttttagaattatgatgaagaattgtttttgcatatatattcatttagagcaaaaaaatagtaacccttttccacaaaaggctactgcttattttctatattctcttacaactctctctaattttaaattcagttggtattattacttttttattatattccctaattccattcaaattttcaagcagcaagtcaacagctgcttttcctaaatactcacttggtattcttattgtagttagagctggtatcatatactttgcactaggctgatcattaaatccaattatgcttatatcctctggtattgataatccttcctctgaaattgctttgtaagccccgactgccattgtatcatttccaataaaaaaagctgttatgttatttttagattttaatgcttccttcataagattatatccagctttaaaagtgaatctctccgtctcatatatgtatttattattatagatattcttactttccataaattctttatatttcatatcccttttatccaaatatatatctctataatctatgcattctaatttattcccaccaatgaaaccaatctttctatggcctaaactatacaaataatctaagatttcataagttgcttttcctaaatccgccattactgaatcaaatttattttcatcaggtgaaaaatctacaaatactatattatcattggcacttgctaatttatctatgatacttgaagagaactttccaatagcaattattccactaacattcttaacatcctcaatactgctatcctcacttagcttcaccaaattaaaattattttcattacattttttttcagcagctaaccttattgataagtaatatggatctcctaattcttcctcatagttataccaataaataattcctatatccttacttttcttattcttagctttttttgtttttgctgaaacataatcaagttcatctgctatttttaatattttttcccttgttgcatcacttacatttaatgtttcatcaaaatttaaaactctagaaactgttgctatagaaacttctgctatagaagctatttcctttatagtggccaacttaacttcctcctttagctcgcatagtccaaaaaaattaaacacgagattttgctgaaaacaaatctaagttaagtgtatctcacaagcaaaatatagtcaaactgttgtgatacttttcttatatagatggcattatgcgtcaattcaccgaaagtagagacattgttatttcgcaggactatgaaaatttcgctgaaagtgctaaattgcgggttgcacaaataatgcttgctcccaatttcattgtgacaagcattatttgaacaacctccaattaagaacttttaacatctcatttttaaatgcctgctgcataaaaatgtttccactttctagttaatgatatatcatagtataaatccaactaataattgttttgtctttttatatatcacgactaatatggagcttaccaaaattataaatattttattccgaaaagctatgagaacttcagaaataattaagagaaagagggttccacttaaacttattccattttaaattgaataagcaaagcgttaaccctcttcctccaaatagccttgacatcttactttgtttcctccacacaagtaatttgacttcttttgtgaatgtactcgtataataaatcaaatatatatctatgccacgctagaaatgataggttctcttatagccataaatggcccttacacctgatgtttcctataaatatttatatatttacatatgaaaatatttttatacatacatatatttctttaaaaatatatacctttaatcctatataagtatatacatatatttataagcttaatgtattttcatgatcccatatagataacacaatcataaactatacttaaactatgaaatatcttccaactagaaatgagtaatatacttttgtggaatgtttcattggtaattttgatggatgtgattctttggctataagttgttacaaatgtgctagttcaaagctcgttctttgaggctagcactttgggtgcaactttatagccttagaatcacccatcagaattacccagaaactggaacaaaagtatattattcatttcggtgagctatacgcataagtatagattatagttggcttatcctattgtattaattagattcgccatttcgatagctgaaactgcactttcatatcctttattaccagctttagttcccgctctttcaattgcttgttctatagtatttgttgtaagaacaccaaaaattactggctttccactttcaagagaaacacttgcaattcccttggatacttctgagcaaacatagtcataatgtgatgtagatccttttattactgctcctaaacatattactccatcgtatttagggctcttagccatctttttagcaattagtgggatttcaaaggcacctggtacccatgcaatatcgatatcttcttctttcacaccatgtctctttaatccgtctattgcgccttctaaaagttttcctccaataaattcattaaatcttcctactactatcccaaattttaatccttctgaaactaaatttccttcaaatatattcattattttttcctccaatattttatattatttattttattttttatcaacttcaattagatctacatgtaaactaaatactaattgaacttataaccacaaatattccacctaatttatctcagctaatattactttaaatgcagtaacatgttattagaatttgatcatcaaatatttagcaaatgattcattctttcttttttagtctttaaataaaattcatcattttcattcaaaggcatttgtattgaaactctttctgaaacttttatatcatttttttctaatccttctattttatctgggttattagtaattaatctaacattctttatccctaaaatcttaagcatgtcagcacttgttttgtaatctctcatgtcttctctaaatcctagagctaaatttgcatctactgtatccaatccctcatcttgaagtgcatatgctttcaatttatttaaaaggccaattcctcttccttcctgtctcatatacagaagtattcctgagtcctcttttgctatcattctcatcgaagcttcatattgttctccacaatcgcattttctagatcctagagcatctccagttaaacattcagaatgaactctaacaagtattggttcatcattatttttaatatctcctttgactaaagccaaatgacattttgaggaatctttttctttaaatgcgagtactttaaaattcccatacttagttggaagattagcttccgtttccataacgacacttaaatgttcttcttttctgtatttaactagatcagctatagtaactatctttaagttatgctccttagcaaactttatcaaatcatcacgccttgccattgttccatcgtcttttactatttcacatataactgccgcacctttaaatcctgcaagctttgccaaatctaccgatgcctctgtatgtccaatcctctcaaatactccgccattcttagctatcaaaggaaatacatggcctggtcgtctaaagtcatcgccttcacttgcagttacaagtttgtttattgtataagctctttcaaatgctgatatgcctgttgtcgtatccttatgatctatggatactgtaaaagcagtttcatggttgtccgtatttttttcaaccattggatttaatccaagtttcactgcaatttcttcttccactggcgtacaaacaagtcccctcgcgtacttaatcataaaattaatattttctccattagccagttctgctggaattactaaatctccttcattttctcttccctcgtcatctacaattattatcattttcccttctttaatatcctttaatgcctcttctatactattaaacataatgctcagctccttaaatttgtattttatatatacttaaaattcattctgatgatttatatgattaaaacccattttttcttaggaattccattgtaatattgctattttcattttcttctttttcttttccaccaaataacttttccacatatttcccaattaaatcgcactccaaattaacctttgaattaacttttttatatgaaagtatagtattatctatagtatgaggtataacagaaaccttaaatacttcatcatcaacataagcaacagttaagcttattccatctattccaattgatcctttatatataatgtatcttagtacctcctcaggtgcagatatagtaaaccaagttccattactttcttcttttatggaaactatttttccaacaccatctatatgtccacttacaatatgaccaccaagcctatcgcttaatctcaatgccctttcaaggtttactttatctccagcctttaaatttcctaagttacttttctctaaagtttcgcccatcacttctgctttaaaagaatctgaatatttttcttttactgttaagcaaactccattggtggctatactatctccgactctagtttcctttaaaacttcactacacttgatttccataactccaaagccattacctgtgctaaatttctctaacacgccaacttcttcaataattccagtaaacatcttctcctccttatatctttcatctcttatttagcaacataaccttctagtactaagtcctctccaatcgttctataattaatgtcctctaatctaactgcatcatctaatttaaagaagccttttcctgctatactatttctgctgctttgtccacctattatcttaggtgctatataaaatcttactttatctacaattctctcttctaatgcagaaaaatttaaagttcctccaccttctataagtattgaatctattccttcttctccaaccctcttaaccagctctttcagattaactctattatctttatctgccacttctataactttaatgcccatagatcttaatttctttttcttttctttatctgattttaaagtagttactactattgcagctttatcactatttgtgagaactttagactctagtgggattctaagattactatctacaataatcctgattaacttctttccatcgttgattctgcatgtgagttcaggattatcttcaattaccgtgtttacacctaccataatcgaatgaaacctatttcttaagtgttgtgaatcttctctagattctttagatgtaatccattttgattctccactataagttgctatcttcccatcaatagacattccacttttcaaaatgacaaatggaatctttgatgttatatactttataaaaatctcattcaattctttacattcgttttctttaatacctactacaacttcaatcccatgctgttttaacttttccacactttttccagaaactagctcattgggatctaacatacctattactactcttttaaactttttttcaattattaaatctacgcatgggggtgtctttccataatgagcacaaggttctagtgtgacgtaaattgtactttcctccacagattttgttgcatttttcactgcatttctttctgcatgagcttctccatagcactcatgataaccttctcctattatctcattgtctttaactataacggctccaactagtgggttaggatttactttacctattcctcttttagctaattctaaagctatctccatgtacttctcatccaaaactaatcatctccaatttttcatactatttcctataatataatcttataaatacttagttgaattataatttaatgaataataaagaaactccgggattcaaatcctcggagttttaaaaaattgtaatgattatttatatatacaagtaaaattttaaaatttatcctatatattacagcatatattttaagccagttctatcaatcttatacaatttcaaacttaaaaatatattgtaataaaaaaaccctgaattctaataaattcagggtacttaaatacgaacaaataacatttaaaactttaattttaaatataatttataacattactctcttctttcatccagactttactgtcggcttcggaatctaaccgaatctgctttttaaagctcgcgggctgtaccgccgatagggaatttcacccaaccccgaagatttctttatttaatttacaataactatgatatcatgaagttttatctttgtaaagtgattagctaaaatttatgatatcgaattctttcttcttttctttaatccattgaagcatcttaggatcattccaaatgtctaaacctaagctagcatatttcatagcttcttcctcgcttccaaatctaattaaattaggcaaggtacttgaaactcttttttgttttaatatgtatggtataacatgcgggtttctcttatatgctcttcttaaagcactttctgccgctttaatttcattaatcttatataataacgctactctactataatgtatagctgccaaattatctttttcatatttttctagcaggctttttagttgttcatatctctcctcaattaaaagccaattaactactaaacttctaaccactaattcatctttctcatcatactctaggatttctaaagcattctctattgcagcttctttttcaccaatttcccataaatgaatcgctaaactatacttagctccgaaaagttgcctcgctatctttaatctaagaagctctgccggtgcatttttcaaatcatctattcttaataaattcttcgctgcgttaactgctttttctagaagttctgtcctctgattattatttaaactagaatcttttgataatattatatatgcatccgcacaatcttcatatacttctaatgcttcttttgcatattttgctttatttttataattcttttgtctccatgcatactcaatagttctttgagccattatataatctttatggacagcaaatttaaaaggaacttttgtttcatccttaacagctttatcctcttctattttatcattcatagttaatgcaacttcttctttagcttttagcatagtaccttctgaagcttctgcatccttattttcgcctattatccatttattattatcttttgatatatctaataagctttttacttcctttgatttactagagcctgtactactactaacaccaaactccttatataagtcagcaactttaatatatggcttttcttttgaatcaaataagttatttgcagttcctatagcatgcactattcctgctccccatgaaaagctcttcccctttttaaattgttcttcataattcaaaaataaagtttctgttgctagaacacaaatattcttataatcttcattgagatattcatctgaaaaactctttattttttcaattatttcttcatacttgctagctattccgttagataattcttgcatttcttcttatagctcctttataaaaatctttaacaaatttgactttatcctacaacaattataatttgcaagtatagtcaccaaatttataattttcattttagatttacaatattctctataaaaatattataagttcattacttttttcgtccatattacattataacatattaaat

SEQ ID NO: 39 - DNA, 47585 bp, Clostridium beijerinckii
atgttgcattttgtaattaaataattaaatatattgtacttttattaatattaactcaataattaatatatatttttttcaccttattattttagttttacagcatttattctaaaaatctagttataaaactcctatatagatatattagttggttaaatccttataaaaaaaaacctaaatactagatgcttttttagttaaacgctaattataattgcttaatggattgtttgcccttaggaagaatcttaatagaaactagcaaagaaattaccataattgagaaaccaaccagatacattgcagtatatccaaaatttctttggattgtactaaacatatgtggatatacaaagttagctcctgctgatcccagcacgctaacaaatgaatatgtaccagcaactagttcgtcatcaactacttctcttatgtatttaaataaaaatgttaaataacaaccatacattagaccatgtaattgatcgcctaaaacaactaaaggtattgaacctgttgaaaataaaagtattctagtagttcctataagaaatgctattattaaatatttcttaggctttttatcctttagatactttcctacaagcatgaatgatataaattcaacgcatacccttgaaaatattgatttactatatatagagttagctagatcctcattccccgttatttcaattaaatatgttgaatatgcaaattctattgcggtatacgttcctatgattaagatattaattattccgagaattactgaatttttatttttaaatacagcaattaattttcccctatttggatttccatctgcttcaatatttttaaacttcatagctattaataatataactatacatgacattatgattcctattatatgcatagttttaaatccatattttaaaattatagttccacttaataaaactacgcacccaaatcctatggatccccattttcttatttctgaatactctacattttttctaactgctatttcctcaacatatacttcatatacatttccaattgtttgtactataattccataaagagctgcataaaaatatatgatagtcttgttaacagacattaaaaatactatcattccaataagtgcgcataaatgtatgataataaatctttttttgttttttctcatcgaaaatttacttactaaaaattgctgggaaagaattgcaaataatgctcctatagatactacagttccaacttcacttaatgataatccaactacttgattcaaatatggcacataaaaagtagtcactatactcgttactccataatttatataagtagtcagggaataataaaacttttctttgcttttcatataatgctccaatcctaatgaattaaatatttctcctattcacttctattattaaatttatatattaaattatactcagttaagaaaaagtttccataacgctagcaattttgtaaaaataattatttaggtttcatgaaaattttttaaaactcgtttatttagtacatattagataaaatacttagacatataaaaccactcttttatttctctaagtaaaagagtggttttatcataattttaaatttcctattctattctataatataggcgataccaatctaattaaggactctttaattttgagagacaaactcctaccatcgtatatttccctagttatctcttctgagcactccatgtcctttataaactgcttttctccatcctttgcaattctatcgtcataaataaatgcattaacttcaaagttaagcttaaaacttctaatgtctaaattagctgttcctatactcattactaacccatcagctactatggtttttgcatgaataaatccattttgataactatatattttaacaccagcttctaataattctcccacataagaacttgctgcccactgcataaagaaatgatctggttttcccggtattataatccgtacatctactcctgataatgcagagatttttaatgattccaatattggcgaatcaaggactaaatatggagtttccaaatacaaattattcttagcattattaattaattttaaataagcatttcttatatattcttccttgtgatccggaccactagttacaatctgtattcccacatcccctaagtctttcttgaattcttttgcatatttattataatcaattattttttcaccagatgcatggcaccaatccagtaaaaatctttcatttaatgcattaactgcttctccttctattcttacatgggtatctctccaaaaaccaacttctggatcctcacttatatactcttttccaacattaaaacctccaacatagccgtactgaccatcaataacaactatttttctgtgatttctataatttatacgagtatttatatgcggtaaaattcctggaaaaaacagtgaaaacttcccacctgcattcaagtattccctaagaactttttttcttagcttgcgtgatcccatactatctaataacaatctaacctctaatccacttttaactttcttagttagttcatcaagtatctgttttccaatagtatctcctctaaatatataatattcaacatgaataaactttttagcattttttatgtcttcaattaactgactaaatttttcttttccatttacatatacatcaattttattattagtagtgtattttacgccagaattattaaaatttagcctccttaaatcagcaaatttttctccgccatcatgaccgtgtctattggatttatatgtatcgtttaagttctttctcttcttttcatcaaactttattttttctttaaaaatcttttgcctgcttagattttgaccaaacatgatgtaaatcacaaatccaaggccaggtaaaatcattaatattaagatccatgcccatgttgttgtaggatcttttctttctataaacactaatgataaagaaaaaagtatatttaaaactaaagttataactgttaagcctaaaagtatgttcattgattcacatccctatattaaactctttcctattctaatattgtatcataataactcattctaaaaaaaatattatttgctttttttgagataatattacttatagtaaaaattaatttcatttttgattaggaaaactactgctaatattattccaaatattgcataaacaataagtggtaataagtttttactattaaacacatatatataagtcaacttcttgactttttttgatttcttaatatataatattattaaaattttatattgtgcgatgaataggagtattagtaataattatatcttaaagagagctgttgtttggtgtaaaatagcgttatattattatgaacttgcctaggagcttacttgttaaaagcaagtacggtagacccgttaaaataataagtgagaaggataaatttgtttttttatctcttctaattaagagtggtaccacggaaattatgctttcgtctctttgttttagagatgagagctttttttaatttatccattatcagtgcatagatctaatattttaattaaaattttgttttaataacatatttttcaattattataagcatttttcttttatatgcattatattgtgcattttacattaaaattataggaggctatatcatggcaaattacggaacaaaaattgatgaaaagtggcaaaaattttgggaggagaatgaggtttataaatttaatcctgaaaattcaggtaaaaaactctatacattagaaatgttttcttatccatcaggcgctcaattacatgctggtcactggtttaactatggtccaacagattcatgggcaagacttaagagaatgcaaggatataatgtatttcaaccaatgggatttgatgcctttggattacctgctgaaaattatgctataaaaactggaattcatcctcaagattctactttaaagaatattgagacaatggaaaaacaattgaaatctatgggtgctatgtttaactgggaaaacgaagttgttacttgtcttcctgattattataaatggactcaatggctatttttgaaactttacgagaaaggtctagcttacagaaaaaaagcgcctgtaaattggtgtccatcatgcaatacagtattagctaatgaacaagttgttgatggtgtttgtgaaagatgtagtactgaagttacaaagaaagatcttactcaatggttctttaaaataactgagtacggcgatgaattacttgataaattagatggtttagattggcctgaaaaaacaaagtctatgcaaaagcactggattggaagatcttatggtgcagaggttactttcaaagttaagggttcagatttgaaattcgatgtatttactacaagagttgatactttaaacggtgttacttatgtagttctagctcctgaaaacaaattagttgatgagttaactcttccagagtataaggctgctgttgaagaatataaggaagctgctgcaaagcaatctgaaattgaaagacaatccgtttcaaaagaaaagacaggagtattcacaggatcttatgctattaaccctattaatggaaaaatagttcctatttggatttctgattatgtattggctacttatggtacaggatgtgttatggcagttcctgctcatgatgaaagagattttgcttttgcaacaaaattcaatttaccaatcgaaagagttataacggataaagaaaatactaatccagaccttccatattgcgaatatggagtacttgttaattcaggaaaattcgatggattaacaactgatgaagctaaaaagaaaatcgttgaagaattagaaaaagatgaattaggagcaatgaagaaaaacttcagattaagagactggctagtttcaagacaaagatattggggtgctccaattcctgttatatactgtgatgattgtggaatagttccagtacctgaaaaggatcttccagtgaaacttccttacaatgttgaatttacaccagatggtaaatcaccattaggtaaatgtgaggattttgtaaatacaacttgtcctcattgtgggaagcctgcaaagagagaagctgatactttagacacttttgtatgttcatctttttactatttaagatatgtagacaataaaaacgatgatgcaccttttgattctgaaaaagtcaacaaaatgcttcctgtagacaaatatgttggtggaccagaacatgcttgcatgcatttattatatgctagattcataacaaaagctttaagagatatgggatatttaaactttgacgaaccattcttaagcttaactcaccaaggattgatattaggaccagatggacttaaaatgagtaaatcaaaaggaaatactatttctcctgatgattatattaaagaatatggcgctgacgtatttagaatgtacttaatgtttggatttggttatactgaaggtggagcttggagcgacgacggaataaaatctgttggaaaattcgtggatagaattgaaagaatccttgaaaattgcagaaatataataaattcaaatgagagcactaaggattctattgattcagctgaaaaagaattaaacttctggaaacataatactattaaaggtgttactgaagacggagataaaatgcaatttaacactgcgatagcaagacttatggagcttacaaatgctcttaataagtacactcaagaaaatattaaaaacgcaaacttcttaaaagaaactatagttgatttcataaaactacttgcaccatttgctcctcactttgctgaagagcaatggagcttacttggaaataattcaacaatctttaatgaaaaatggccagaatttaaccctgctgctttagttaaagatgaagtcgaaattgcgatccaaataaatggtaaaataaaagctaaaatcatggtagcttctaatttagatgaagaaggtataaaagctgcttcattagaaaatgagactattaaagaaaatactgaaggtaaaactatagttaaagtgattgtaattaaaggaagacttgttaatatagttgtgaaataaaagagtggccacttggccacttttttatttatgacttttccttattcctacttatccccttgcttaactatcaaaatttatactattaaatattcctccaatctccttaagtgaattaaatattaaagtcggttgtatttcagattcctttagatctttcatttgagtttcccctgtcaagactagaattgtaactgccttattgccttttcctatagcaatatctgtatataacctatctcctacaaaagcgacttcttcttctttaagttccatattcttaagtatataatttaaagtataaggagacggcttaccaaaaaatgtaggtttcactcctgtagatgcagtaatcattgagcatatagatccgcaatcaggcataaaaccattttctataggacagttgaaatctggatttaccgccaagaaagtagctccatttctaataaagtcacatgcttttgaaacatttttataggctaatgaagtatcaaatcctgctacgaccacatctgcattttcttctactatattaatatttgaattcacaaaatctttttttaaatattcattgcctaaaacaaatactcttttattttgaaattctctttttatataatcaattattacttcattagatatcatcatcatgtcattctttacatcatagcccatattagttattttttttatataaaactcagcattttttgaagaattgtttgtaaagaatttaaactttatattatttccatctaatattcttaggaattctatagatccatctaatagtgtgttacctaggtatactgttccatctaaatcaagaataaaacattttattttttttaataatgttctctcatcttcttttatatctaaatatttatttaacatgctataccctctcagctaaataatttttaatcttatatgaaaattcatctagtaaatccaaatcacctaaaaagcttaatattgtatatcttggcctaacctctttagccataactattgcatctaacattattttaagctcaattccaacatcctctggttcagctgctgcgccaactcttttgagaattgcttttatttcctctgctgtcggaatatctttaataacatcttttatttcattaatattttctctaatgctgctaattctttctaatctgctttctatagaattccttttttcttttgcggctgttttaataatttcaggtgctgctttcccataaaattgtttaatatttttctcccattggtcctgatcaaataacttagcactattaatagcttgatcaaaattaagttcatattcagataagatttcacgtaatttcgtagttatgattgtagatattcccacctttgttccatgaagtacagcttttttgccttcaaataaaaacatcatttctagataatgagctaaatgatgttctgatcccgaagcaggtcttgaattgccaacaaagctcatagcaattccagttagaactaatgcttccattagattttttattgctgtttcatctctatttatcattttctccgaattatccatacatttttgtatagaatcctctaccattttaactgttacatcacaataatattctttatttataatcttgctgagtttccaatcatttaatgcagaatactttccaacaatatcaccaaatccagctagaatcatttccataggcgcatcttttagtatattaacatctccgataattgctttaggaacatcaacttgataagtagttttaagattttcaactattaatgcagaaccatttgatgcaaaaccatccatagatggtgcagtagccacaataactgatgaaatatctaatttatgactaataaatttgcctaaatcatttaatgtacctgagcctattgttaaaataacatctacatctttatcaaattgcataaatagtttacctaaagcactttcatcaggaacaaggtcatcctctggttcaaatataaattttttatactcaaattttccttctttcaatgcagtctcaacttgatttccagctgctttataagtatttttatccgctacaactaatgaatttttaaatcctagatctcttaatatatcaggcacttttttaattgcatctttttctattaatacacgttctaaacctatattatgtgctttaccacatgtgcattttaacccactttttaaaaaatcatctatttttaaatcactgacattgtttatatttaactccatgcatatcacttcctaattaatatttttgcttaattaacaatgcgtatgttgcaatattgggcatatgtctgaaaatctttatacataggtaacttaatatagttataatgaagctcaaaattgcaacatacatatttatctgatgtctagccgctgtaacactccctcttctataagtgggagataacagcggcacgaccctagataagttcaactaagattcagatggggatcaaaccccacctgaatcaagtttcacttgatttttattaattaaaatatacctaaaactcctaaaatagctcctgcaagtataagtacaaccattaatttaattggagatgtccctcttcttaccatttttaacacaattaatgttagtgcaaacggtatcaagccaggcattagtttatctaataaatctgtttgcaaactaaatttaacttctcccatattaaaacttaaattagtttgtaaagtaatgaatcttccaactagccctcccattactagagttccgagtactgatgcagtctcaataactttattaatttttccaccttgtagtatttgttctaccgctttcttaccaagattatatccactcatccatagacttaatgaaatactagtcattattacatattgagctattaaaaatataattggaccaaaaatattcttagtatttgtaattcctatacatattgcaagcaaaataggtgtaataattccctgtgtcaatgtatcaccaacacctgcaagtggccccattaatcctgtttttattgcattaaaaccttcatcattaattggattaccactagctttctcctcttccatggctatagtaataccatgtataactgatccacaaataggttctgtattaaaaaatgctaaatgcctttgtactgctgcttttttatcttcgttatttttatataatttctttattacaggtaacatggagtgtgcaaaagccgtagcttgtaatctttcgtaattataatttgattgtgcgaaaaaaaaccatctaatccatgacttaattacatctcttttatctaaaactttagttttattatcatcaattgatttattttcaggtataatctttatatttgacatgtatattccccccttgtaaattttcttctatgcattattaggtgatgaattattgccttttattgcagttacagttaatgcgattactaatcctattatagaaatgataactatatcaagtttaaagtatactgacattatgatccctagtacaaaaaatggcattgtaaatgagtttcctattagttttaaattcattgcaatacctagtgctggtaacattgctcctattacattaaatacatgcaatacactatcattcataacacttaacattccagacactgcatctggaccaaaatatactactaatgtagctggtataaaactaagtaaaaataacactatttgcggtggtattgtatttatgagactaagtgaatctatatttcccttttctacctctctatcagcccaatgaacaaaaaatgagttgattgtcatttttcctatccataatactgtagctatagttccaagtggaactgcgattgccatagcagttgatacatctaaaccagaagttatagctaatgcagtacctgcatatcctgcaaatgatggatcccccatttgagctccacctgctgatataaatcctaaatatataacatttatacctgcacctattaatgctccctctaaaggttgtcctaatattattcctgttattagtcctgctactaaaggcctattaaatgtaaaaaatccaacataagtaaaccatggactccatgaaatatagtaaaataaccctattaataccgcttgaaaaatcgtaacatgcatataaattcctcctaaattataatttaattattaattatttctttaataatttatctaatgctatttgttttgcatcaggaacaatttgcataaaaacattcacaccacatcttataagctctataaatgcttctctttcttcatcagaaactgaaatatttttatataattgttttcttccttgccttgcacccattcctccaagatttaactccttaattccaattcctgcttttacaaggctaaggacagtcataggagctttaactaaaaccaatattttctcaccatcgtcatctttatttaaaatttcaactgcatcatctactccatatatctccactttaagtgaactaggtgctgcagattttagaaccatttgcataaatgaatcttgtgctactgcatcgtctactactataattttagttgcctttgtaattttagaccatgcagttgcaacttgaccatgaattagcctatcatcaattcttgtaagaacaatatttaacatatataatctctcccttttttgatttattttaataatgtatttaattcattaaataattcttttactcccataactcctgcttccatgcaatgcctagtcaattcatctaactcataagattctctcatagtaattgcctcaagtaacataggtaaattaacgcctgttatacatttaaatttaatatcacttactttatttgaatttaaagcaacaacattataaggacttccacctaacagatctgccagtactaaaacaccttgaccactttctaataatttaattgattctctaactttgtctcctagtacttcgatactatctccatgttcaagtcctaaagttaatatcttatcttgttttcctacaataagctcagcactttttaatatttcttctgaaaattttccgtgagtgacgagtaaaattcctatcataagattcacctcctcttgtttttctttatccgatagctagcatctgtaacactcccacttcttaaagtgcgagataacggctgcacgctcctggataagtcaaactaaattcagctgaagtataaaactccacctgaaaagtttcactttatgccttatatacaagcaactatcgtgccaataattaacttaaagtgtctcactatatatagcataatatttgacgccttctaaacactatgtccttacacattttttagttaatacaatatttttcatcataagaaaacttatttattggataatttaatatttagaaatcagcatatgtattcaatgtgtatttaatgtgtatttaagaaaagtctaaatgtaaatacacatttagactttttaatagtattattatatttttatcaattacagtaactttagcttactgctaaatctcttcttcacttttaatattatttaaatcaaaattaatatccaccatttcaactatatatgctagttcactgttaggaatgtgtattccaaatacttcttctactaaaataaaattattttttataacctcaaaaagttgctcttttgcagatttgattttggaaaattttttatatggcaatgtctcatttcttataactctttcaatcatacatgaacaatgaaataaaaatttaatatacatagcatcatcaatttctttattataaacagacgctatattttttaaaacttcatctaacgttttagacgcttttttagcacttaaaaaagttaatatttcttctagcatattcacagcataatctctacaatttgtattttctggttcaacttccataggtggattacttaattttatgctatctccaattaatgagcttacattttttacactttcaactaatatatccatagttatatcaggcatcattgcttttctagccgcttcaataaccattggagtgctaaccattttcaacgtttgtgtttttataccagttttttctgtaattacatctgagaatgtggttagggatcccatgtctactagtaaaagaactcctccttcacaatccatttccttaaccatatctatagccttatttagggctatctccaccttttcttccaatggcatatccaatgcatgaatgcagttgcagcctaaaagtgtctttgtaacttctaccatattcgttgcagtcccattcccatgagcaataactaaaacttgaatatttccatatgctctttttgtatttactgaatataaaaacatagttataaatgctacctcatcattaggcactttaattagaaattgtttttcaattttcaattttattctttcagctatattgtattcatttatatgctccctataagaactttctatatttggataaattgttacatttcctaatttcaaacgttctataagggtttcaatatgcagcgccaggctataaattaactttgtatctgtactagtagcgaaataatcttcattttcaaaaaatgattcttctataatattaacgatttcaggagttacaatttttgataaaacttctttatttatagttaaattttgagacttttctgatagcggtgagttattaaaacgatctcgaatttgactatttatattctccctaatttgatttacagacaagccatcttcataaaatttttgtgctctttctaacataacatcatagaagtcttcttcagtattatatttatcataaagtagtaagccatttaagttatcatcaaattcctcattggaactattaaatgttatagactcaaagtcatttaaatcaaaatatttaaaaagttctcgccttttatcctcaattgtaaataatccttctttaaagcgctgtgaaagctgggataacttcacgtgtacgtatttttgatcttgtgttatatattcaacaaatgcattggcacaaataagctggatatcatttttcagttggcctatgttgcctggacatttataaagcagcagcacttttaaaacttctttcgatacttttaattgagctttaattttaagacactcgtttttaaaaaattcataaataagtttcattctctcttttaaggaacgttcatctaaacttggtagtttaatagttactggaattcttcttaagaaagtacttagtatagtcgatttaggctcttcagtagtagctgctataaacaatatattagctcttcttgtattttcagattctcctaatctacgatagctacctctatcaattaatgaaaataacatttcttgcccctcaggtggtaaacgatgaacttcatctaaaaatagaattccgttattagcttcatctattaatccctttttttctttatcagctcctgtaaatgcacccttcgcatatccaaacagatgtgataataataattgagagttttctgcataatccgcacaattgaaaataacatatggcgcgttagctttcagaatccctacatttatagcatatctatacatcatttctgcaaaagtagtttttccaacccccgtgggcccaattaataatgtatgtaagccattggttggatataatattgctgcttttgcctgtttaatttgtgattttaaagaatccctatttcctattatattttcaaatatatccctagttttaatttttgtatttcccaaattactattaacttcattattattataactttctattatattcttattttgcgactctaaattcagctctttatttataatttttctaaagaaattatattcttttattattggttcatttatctctattttataggtagcttctagataatccttatctaaatataatacaggcttgcccaatatcttaattgctttaccttcatttacaagacagtttaattctttactaacattatttcttgatatttttagttcttcagctatataacttgcttcaaatcctactttctctattaaatcagtctcaaaagctgcttctgctgtaagttgctttagccttccatatactctatcttttctactcaatttattattttccagttttataatcatacaatagcccaatcccttttaacataattattcatcaaattatttctacatattgtaatatatgtattaccactcttatataattctaaatttaaattataattatatcttaattataattatcaaaaactctcctcgttagctctaactccaaattatgtggtttaactccaggcaaatccaaataaatcaatattgaaacttatgaattaaatctatatcctgttccccaaagggtttcaatatactctggatttcctggatctttttctatcttctttcttaacttttgtatatggactgccacagttgctgtatctccgtaataatcatctccccatattctatcgaataattgatctttagtgaaaactatatttggattagaagctaaaaataccataagctcatactcttttgtagtaagaataacctcttttccatttacaaaaactttatgtgaatctgttcttatctccaatgctttatggctaataatattgagttggggtctatttcctgataatcgctcatatctaagcatatgagactttattctggctactaattctgcaggactaaaaggttttgttaaataatcatctgcaccaaatcctaacccctttattttatcaatatcctcacttcttgctgatactattattataggtatttcatatttttctctaacttctcttactatttcatacccgtctttacctggtagcattaaatcaactattataagatcatatgtaccaataagagctttttttaatccttgaataccatcctgaattatttccactttataaccatttaattgaagatactctttttctagttcagcgatatttatatcatcttctataattaatatttgtttcatatgcttcctcctctttattatttatgctcttaaatgacacactgtcagatatatatgatccgtatcactatttaatcacgaaataacatctaaacactccttagcattgtaccccttgttggtataaattcagctatagttctctccatctgaaaaacttcactttattggtatctctatagtaaacgtacttcctttccccattatacttgatgcataaatctttcctccatgagcttctaccatttcctttgcaattgcaagtcctaaacccgtactcataaagtctttggtacgttctgtatctatacggtaaaatctattaaatatatttgaaagtttatcttctggaatcccaggaccattatctttaatttctatcttaatccattcattattattacttaattctactttaattattgaatctttttgccttccatattttatagcattccctataacattcctaataacttgatatattctttttccatctatgttaatttctaattcttccgacaacctatcttcaaatttaaattcaatatccttttctttaagaacaaaatcaaactcttccataagatcactcataaatgccttaaatttaactatcccaaaattaaaatctaatttttgcatatctaattttgaaaataaaaacaaatcatcaataaggttatttatataagtagtattattatgaattatatttagataattgttcactttatctggtgaagtaacaacaccatccactaaggcttcaatatatccattaattgaagtaattggtgtttttaagtcatgggaaatattagctatcaatgcttttctattttcttcatattcaagtttcatctcttcagatttttttaaggtttcagccatcttattaaaatcatatattaaaattcctatttcattatatacgtcgttatcaattttcacatcatagttacctctggctatctgttcaacaccatcttttaacttctctataggtttcataattcttttttccattctcaaagttatatatatatgagagctttgatgaataataaaaattattgcaaaaaatatagtaattgcctttacatctacaaatttaaatatggaaaaaacaagtaacatgcttattaaaattcccgttggacgcatccatcttaaatatctatgtatcctattaaattcattaaattgtttatgatgagaattatgatgtattttttgatgctcataaactaactcgtaacgcattttatttaactctttgagtttttcaaaaaattcccgatgttcttcatcaattctattatgaaaatgagaataaactcttcctctaaaccttctaatgctttccaccaccttaaaataaatttctaccattgtaatgattataacattcaaattaacttttaataaattaaattaaaaccgactattaataattctaataaaattattctatgatatacttaaattttgatttggaacagagttccttatttacttatttatttataaatgaaaatctctaaataattgaattttacatcaataatttagagatttctgaatttcaacccctctttacattaagaaatactcattttccttaatagatttttcacatcagttgcatatatatatttatcatcttctttaatcatcactctagtgcaacatttaaagcatttattatcacaattcgttgtctcaaattgaattcctctactatttagagcttcaactaattcattatactttctagtgttagtacaaataagatatttgggcatttactactatctcctaacttaattaatttaccaaactaaatctagtgatccatttacagcattttcgcctttagaagaaatttctactttctcaacttcattatctttatttgcatatatttttaatatagcatcgctgttttcagaacataataattcttttataaatttatgatgcttatggaaacctctatcatcactttccttcatttgtcttatatgctccattatcttttcttcatccattcctttatggcattctttatgaatgtccttgatttctttaaatacctctttcaattctaaagaaataatagccttttcatctttttcttctacttgcacattatttaataaatttaatataaacgtaacttttgaaagtcctccttttattccaccgtgaccgtgcatattcattccatgattatgcattcctctatgaaatccatgatgcgggcactcctttatattaaattcagaattactatcatgttttacttttttgccttcagcatctaaatcaacacttatgttagcttttgtttccccacttttagtatcagtttcaaattcattagaaaatgataatacttttacatctcctttagttgcttccaattttacgcttcctttaaacacttctttttccttcatagttttaaatacatcatataatactttaattttattcatttataacgcctcccaatattttcaaagatttattcccttgcttgttatgaattcattataaaatctaattttaaaaatcttttaaagcaattataaaaattttataaaaaaataaaaatccctcaaaagggatttctatttatactatctaagaaaagcatcaaggcttttcttcccaggtttctaattctaaattaacatatataaattgacttatttaattacattttgcggagtaccttttaaccatttttttatattatcaaaaacaataactgctctcttttcgaaagcttccgctgttgcaaatgcaacatgaggagtaactattaaattatttgctccaaacaatacatgatctgtaggaattggtggctcaatttcaaatacatctactcccgcaccggcaattttgccattatttaaagcttccgcaagtgctgaactatctaaaacaggacctcgtgctgtatttattaaaattgcactttctttcattaatgataatttttcattatttattaatcctttagtgctttcatttagtggaacatgaagcgatactatatcacaagtagccattaatgtatctaaatctacaaattcgattccttcaacatcttttttagtcctgctataagcgtatacatcacatccaaatgctttagcaattgcggcagttctcatacctatagctcctgcccctactactccaaacttctttcctgcgagttcaaatcccacaagcccattcttcgttccaccttctctagtcaccttatcacatggtataatatttctatatagagaaataaccataccaaatactaagtctgcaactgcagcagttgagtatccagcacaattgcatactaaaatgtctctttccttacagtaatccattgcaacatggtctactcctgtaaacgcaacacaaatcattttcaaatttggacagttttctattacctcttttttatatggaagattggatattactacagcatcagcatctttgcttctttctattaatgtttcggtatcttctactcttgtatcataatatattatgtctacttcatttcctaaactattctttgccattcccaataacttatccttatttacacctaatggctctaatatcactaatttcatttacttcattctcctttatatattaatttatatttaaaaatgatttgttaaaagcgctttatctatattatatatgatacatccccatcagaatcttttgaatagatatatgtgaaattttttattttaattatcctcagataaaaaaagattcggatattttcttctagagtatctaaaaaaacatccgaaccttttttcatattaaccaacatataagtgatatttctgaatgcaatttcggaaataaaattgaaatatcagtatatgatgaactacatgaatttgcagataatatttgcatatcgtatttgttgtttcaacttaataaatctcaattttattattataaataagacttagtaagttgaacatatttacgaacttagttttaaaataacaatgtatagattttgagcaatataattcattcgttataagagtgcttaccttgcattgcctgatgacttaatacagattttgatgcttaaaatttttagaacgtattgctcataaatacaactatctttcaaaatctttatacattaaacttggctgtattcctttattattctgatattttccactgctatataaatcatattctccatggatatcatgataatatatttgacatatttctacgttaggataaacttttattggctgaacgcaaaaaatttctaacgtccagtagcctgaaaatccaatatctccgaatccagctgtaacatgaataaataaccctaatctacctgttgaagagcgtccttcaagcatagggacatatttactagtactcgtaaattcatttgttctacctaagtataatttacctggttctaataataatccatcctccggaatttttataacttttgttggatttggagttttcatatctaaaatatcattttcataaactaataattcattatgcaaagacaaattataactattaggatttattttttcctcatcaaaaggttcaattattatattactaccaatattttttaatatttcttttcctgataatatcattagttctcctccaagctatatactttaataaatagttcataatgtattattttaatgtattaaatctaataaattctaaatgcctaaccaataatatcacaatatataagaaaatttatgcatttaagatttctttaaactcaaacaatacttttttaacattctcttcatctaaaggcttatagctatttaaatatcctgaagcatcaagagcttcatatgctttcttactcattgaaatccaattttcaggtatataaatccacactatatcctcatatttacaacttaataaaaaatgttctaatcctctaaatgcatattcttcaatttcgtgaagctcatttagaatcttataatccttaactattttagaacttaactcacatttatatatgtctacatagaagaaatcaaatttatttttttttgctttaaaggcatccccttttattatccgtatttttttatttttaggaaaattattattatataattttattatttcttcactaatttcatatacaattacttcttctacactatttttttttgcaatttcttgaactacatatccaatgccaagtccaattacaccaacttttccgtgagcaaaagaaattgctccatatgaactttcaactgtctctggtgttagtttaattaaatcactgccatttttatataattgaattatatctatatcatattcttcttcattttcatacatataaccttgtaattcttgctttattatggtatctttaactattttatagtcgccacaagttccttgattaattaagtcactatatcgctttatctcttggaacacaaaacttttattatatggtttcatagttaattccccttcttacaatatttaatgcaaaatctttaatagttctatattattatagcacattttccaatttatgtataatattgtataatttatttattaacattatatattcaataaaccataatataatagcacattcttagacataatataactattaatattaactttttattttaatatatatatgctatacttactttaatgatttaatatcattaatatttcataaagtaggtgtttatatatgaaaaatgttaatataagtgaagaagcttataatgaatttaaagcttttttagaagaaaataaaataactgatttcaatattagaataaattttgctggttatgcatgtagcggtccagtttttaacatatctctttcagaagctactgatgccgacgaggttgaaaaaatgaatgatatttcatttatatacgaaaaatccctaatagaacaatttggtggatttataatactttcttctgatgaaaatgaaggtaatggcttaagtttaaagcctgttatagcgcctgaaggcggatgtggtggttcttgctcaggatgccactaaaatcataataaaaaatgtagaataaatgaagaatatttattctacatttttttgttgttctgagttcttataccatctaacattccccttacaaaaagcttaattcttactctacagttaatcactttacttatttgtactatcaaccgactctattttccactgcacattcccatagtcatcacttattttatatataccttccaaaagatctatccaataatgattttttataaccttactttccttatcttcacctgtagctccatttaaattttcttcattaaattcattaaagtattcgtatgtttttgaagaaatctcatacatatatttaaaagattgtaaatcttcactttctagccttattttatttgattcatttttcatctctttacttacagtagacagcatatactcctttatcttttcatttatattattttccattatcttatcagttttaattaccttagagaaaaacggtattgcattttgagtgtatgctctatactgttgccataattctattatgtcattagacatttcatcataattcttataaagctttactaaatcttcattttttaaactattctcttcaattcctttagacaatatatccatattgctttcatttctttgcttaaaatcctctatcttagtataggattcctgacctagtttatatttataattatttaatttaaatactacatatatattaagtattatacttactacaagaagtatagataaaaaccttgtataatctgtaattttcattccttgggtcaagaatatcactcctctatactgtaatttattttaacatattaccttatatttgcctatttaaaattggttaataatttccctatctagcccagtcgtgtatagcttcatttaccattttcaatccgatattcccacctgagctttccttcttttcagtatttattcttttaatctctccataaggattttttaatgataattcttcatttccagatacaacccatatagtttttttgttaattggctttacttcaagctctctttctccaacaccatctgtaaaatatattaatacagcacttcttaaattattttcatttatatacctaaatacaggtgtaaatttcgtagatccattatctttgcttctctttcttatgtcattctcatttcttaagtcatatacttttctaatctcactatcacattcgataattgtgattttattcttaatatttgaagttatagacaatatctccactagtatcttatgcatatcactgtccttcatgctagcacttatatctattgctacaattaattcagtttgactcttaggtaacctccctcttaaatctaatctttccggctgtcttctatcccttcttgttattgtcctcttatatcctgatttcacacttgggagtatatttttaagaacaagttgccaaggtatttctgccttttctttgtacgctaaaattatgttttctaatccttttggagtgttttcattataagcacttagagccgttttcttagtcaaattgctaatatcttcatcacttatttgagcactttcccacaaatcatggacttttgacatatccacttcatatttcgaatcatcatctttatcaactttatcttgctttattctagacttaattgatttatgaatttcttctgcatattcctcgacacttctattttcctcaagtgataaattatattccatgttaactgcataaagccttttgctaaagggtggtaaatcttttatatactgattaattgaaatatctaaagcaacatttaccgcttctttactaaatctatccttcaattttctttctctttcaaaatgagaattcattatatgatatatttcatgtttaaataatgctgccatttcttttctattacaatccaaaaataaaaatggattaaaatacatctcgaatctatcacgctttggaatagttgatattggcgctgttaaggtagtatttattttccgttgaactctaagcatgaattgcccaaaaaaaacatcttgagtttgcaacaaatataatataatatcctctactagctcaaagaaatttcttttataattatcactaaatttatcatcttcactcaattgataggcttcttttaaaagttgctgtcttttttcttcaaaatccatatacaaactcagcctccttccaaagcttaattaaaaacttttatatcttaactcatcaaccaaatatattaaaaaatgcttctaagaactcttcagtacctagtaacttttcatatagtccactttccttataatctctttttatttccttcataataccaagtctcaaatctcttggatataaatttaaaagttctgaaaatagccttaaattcctttctatcggcatattttccaaataccttaacgaatttttagacaatatgtataatctagaatgattttccttttctattttttcctttagatcaaaatttaaaatatcactgctgaatatatcttcaacctttactaaaggtgtttttaggtttatcaaaaagtttccaaaatcatttgcaatgctaatcccaacatttccttttacaacattcagtagagtatctaaagagtattttcccttattttttacaaataccttatatgcttttgatactctctcccagcttcttggagtagcctttattgtttcttctgaatcaggagtatgaagatattcaggaaatgtagacaaaaattctatgatatgttcatctatatttccatcattactcattccccacttaatccattctttaatatccgagtctaactttacccagacaaatctatcttcttgagctggatccatatcaacaacatcatattgactattattaaagtcatcatttttattagaaggattcattgcagctattactttaactctctcatccaaaatatatccattaatctctctatttaagataagattcataagttcttgtgctacggcatgatcgcatctattcaattcatctataaataaaataacatctctatttatatcttcatctaatgcttttttgatttcaattagcttactatgtgtcgcatatatagtcgtcctattttcaactacaggtagtcctcctatttccccttcctttagcaagtttgcatctattgtaacaagataatatccattttctcttgctatacgcttaactaatgaagtctttccaactccactttctcctataattaaaggcacatcatttgatgcgactactaaatctactgtatttaaacactctaaataattcaatcttttcgcctccattcttatatagataatttataatctactagcaactttttggcattcttgcttccatattctcttacaaaattaattttatccatttccaaaacctctaactctaagaaatcttcaatatacttcttactaatatcttcttctttgattttttcttgaagcacatcaattacaagttctacatctatgctttcataaatatacttaactacatttatattttcatatataaatttctttatttcatctaaatcatagttggaaatataatttatagcttctccatttagctctattgcctttattttcgccttaaggcttggattctttataaatctaattgctacatagtagttttctatagccttaagctgaatttcttcagaaggattctctatatatttaattgcatcatagtccctactaacagctaataattgaagttcctcgctaggattctctataaattgtatagcccatcctttagtcttaatagcttcctctatcacctttttagtaggattatttattaactctaaagagttccacaagcttttaacacacattatagcaacttcttcattaatgtctttaatatattttgctgacagcggggtatttgcaatagcttgtttttgcacttccttactcgggttcttaatatatttaatattgttaccattattcttaacaataaataactctaattcctcatcaactttgtctatttcctgaatatattcaggattgtttctcaatctcaataatagttgatctctatccatttttatctccttatcatatatattaatttcgtactatattatttctatataaaacattatacttgatattactgacatattcactatgcttgattaataaatacaatatccccttcaaaataaaaaacatagctgcagatatttcttttaaatattgaaaatctacagctatattttaaactatttgaacaacaaaacataattttccttatgaactaaatatacaaaaactcttaatctgtatatttttcaatttctcttttaacagaaaacaataaactatttagctcccaaacttccccatcttctattaacttatttaaagttttttggaatctggctgcctctgtttccttacctagtgaaattaaagttaatagtaaattcattatatttgaaattaaatgtgatttaacctcaaataatttttgtgcatccttaatttcatctttgatttctaacatttcttcatctaatctaaatgctgcatctgcagatcttttaagtttttcctttaattgttctggtatatgttgcttatatttgtaattaagagaatgttcaatagttgcccagaaattcattgctaatgttcttatttgaaattcagccaaaatttcaactagtccttctgccatatttacaggatattttattatcatatgataacttctataaccactctctttaacattccttacataatccttctcataaagaatctgcatatctttacgttctcttaatatctgcactactgtgtctatatcatcaacaaactgacacattattcttattcctgcaatatcctcaagttcatatctaatcctatctattggtatttcaaatttgttagctttttctaacatacttgatacttcttttactcttcctgttacaaactctataggtgaatattcatttttttttctatattcttttctaattgattttaacttaactttcagttcatctactgcttgctcataaggcattaagaaaaccttccaatcattcattgccattatatcaccctttaatacattactatcatttctcaatttcatccttatctattatatcaaaaactttaaattaagtgtaattaataataaataaactatttaaaaaatattcatagactatttatgaatgcttttaatatgttataatcaatgtataatatagaattttattctagattgcatttttaatggggtgactgaaaatgagtgatacgagtatattaaatcatctttttgacaaacagatagtctgtcctgtttgtaattcacattttaaagctaaaacagttaaatctaagtcaccacgagttatttctaaggattcagatttctttataagatactctgtagtaaatccgtatttttatgatgtattaatatgtaattcatgcggctacgctgcaatgagatcagattttgaaaaactaaaatcacataaaaaagaacttgttttaagtaacgtaacaccaaaatggaaaccaagagaatatccacatattttagatgaaaaattagcaattgagcgctataaattggctttattaaatgctatgcttattgatttgccaaatagtacaaaaggtatgatttctctaaaaattgcttggttgaatagattattggataataatattcaagaaactttgtttttaaagcaagctctcgaaggatttaacactgcttatatgactgagattcttcctatatatggcttacaaagagattctttaatgtatcttttgggagaattaaaccgaagattaggaaataatcaagatgcattacaatggtactctaaaactattgttaatacaaattcttcttataaaattaaagagatggctcgcgttggaaaagatttaattaaaactgccaacacataaaaatatatttttatttatcatttcaagggggaatataacatgggattttttaacaaaaacaataataaaaatactactatgacagaaactattgtatcaaatgtttctaacagtggggaaaacaatactaacgctagtcagaaaaatttaactaacatcaatgatttaagagaaaaagctgttttaattgatagttctataaaaaacgcttcgtctactgcatcagaattagtatcttctgctgaagctcaaagcagagaaataagtaatgttaagaatatcttatcaggttttcgtgctaatatggaagacttagcaattaacattactaatgttcacattaaagtgttggatactgataaattggctgatacaggattaaatacaataggaaatttagatacatctctaaatgagcttgaagacgctttcacaatatcaacttcaacagtaaatgctttagtatcaaaacttgaatctgtaaacagtataactgattctataagccaaatcgcaagccaaacgaatcttctatcattaaacgcagctatagaggctgcaagagctggtgaagctggtaaaggcttttctgttgtcgcaggtgaagttagaaaacttgcagaaaactcaaaacttgctgttcaaagtataactagtatacttgaagaaattaaaatagacatattaaaagcttctaatgcaatgaattctggtaattcagcattaacaactcaacataactcactacaagaagctaaaactagtttttccgatattaaaacttctatagaagatgccactgaagaaattagcacttgcatagaaaatttgactactgcttctgaggcaaaagatactgttattaattcaattgataacgtaagcgttcttttcaaagaacatgaatctttatcaaaagaaattattacagatcttaatagccaagaagatgctattaaaaagatgagtaattcaatagaacatttatcatagattttaaaatctatttattaataaacaatagaaagctatctaatattttcaattagatagcttttattatttcaattatgctataatttttactcttcaatagaaattatatagctacagctaaattcttttccttcttctaggaacattattccttctttatccttaaagtctccattaaaatcgccatagtcagcatgaccaaaccaaggttctatacatacaaatggagcgccatcagctggagcccatattcccatgtaaggaaatccatcaaactccacacttaaagacttattatgattctttgattttattgtaattttatttgattttaaatcatcaaatactaatgcgtcatctttaaatatatcttttttaagttcaataatatcactattagttaaataatcttttttctcatgagtaaaatatgtattcctatcaaaacacataattgagctatcctctctctcattaaacttaagataataatcctctaatatctctgttttttcaattggacacataaatgctggatgagctccaattgaaaaatagatttttttatcatccaagttgataactttataacttacctttacactattttctttaatatcataagtaacctgcaaagaaaacttatatggatatacttcaagacttttatccgagaactttaactcaaaagtaatagattcattgctttgacttagcaaggtaaattgagaaattcttgctaatccatgagatggtaattcatattcctttccatcaactctatacttagaatcctttagcttgcctattataggaaataaatgtggtgcgtggtatttccaatattccggattcccattccaaagatattcagtaccttccttcttacctgttatagagtgtagttcgcctccatgttcactaacagtaattttaattttttcattttctaaggaataaatcataaaacgtcactccaaatcttattataattatgtaaagaaatataacctacttattccagttgtatttataataatatataaatacaattacctacttgcttattattcagattaattttaaactccaacaaattttctatttatatttgttgaattaaatttcattctatatttatctgcatcataatatctttttaggatcaaaattcaaataatctgctgatgttaatatatattctactccatctaaatatccattcaatacttttccaagtagtactggaccatgcaaatgtccatatataactttttctacactgtattctttaatcattcgtgtaaattcagattcctcaaatttatcatttgtaggagggtaatgaagcataacaattatcttttcaaatccactatttttcgcagcatctaacgaaagtttcaaccttatttgttctctggtatatattttttcatctttgctagtatatttatcccctcctgggcacatccatcctctagtcccacatatagcataatcttcataagtataaaaattattttggagaaacttagtattttcatacatcttatttaatttcgatatgctcccccaccaataatcatggtttcctttgcttataatctttttacctggtaattcatttatccagtccaaatcatatttactatcattctcttttaaagaccaagatatatctccagctataagcaccatatctttttcagttatttttttaagccaattttcttttattttatcagaatgcgctttccacttatctccaaaaatgtccattggcttttcaacattaaaacctaagtgtaaatctgaaatagtataaagtgccattttctcaccttccgtgtttcttctgtctataatctcttcttatccaaatcagtaagaaaagcaattacatgagctactgcttcatataattccgtaggaatttcatctccaacatctacattacacaataaatcagttagctctttattgtatactattggtacttcgttttgcgttgctttttctattattttatctgcaatatgccccatcccagctgctgtaactactggtgcatcgctattaaattcatactttaatgctgcggctttcttcctctgattcatactcctgtacactcctaaccaatattttcaatagtgccaaaatgtacaattaaagctaaaattccttacgatctaaaagcattataattaagactcctttattgcacattaactgcgtattttaaatgaatacactaattattataccttaatatcgatagcagaaatagttaaatcgttaaagaaatttctacaacttactaagtccacaggcttttctttcatggatacacttatattaacaaacaacccaagtgttgataacccatctgctaatttagatttattattgtttaaaatagatgcaaaatgactttcacattttaaatttacatcaattctgttatctcttaatgtcaaatatccatcgacctctcctaaattagctgttttaacactaacaaccattttagcattagtcttatctatttttttaccatcttttctattatcctttattattagtttacatggatattcttggctatttgcatttataggaatatttaaataataatactcattgcttacggaattgaataccttaatatcatttatattattttttattaaatccattattttttcatatcctgcatcctttaaatccacatgtgctattaagttcttaactatatcccttactccatctatcttgaatttcatatcagcttttatagcttctttgctatctaaattacttcttaatagtaaatcctcattttttagatcagcaaagttttccttaaatgatgttgacaattccttaggctgtatatttccacctttatcattagatactgtttcttcatagtgatcttttccttcaattctattattcaataatttattgaattctttatattcactatcagtaagtttaacttccctgccttcaatattacttaataatatttctaatttatttttatttgatgattctataagactttgtgcttgtgtcttgggttcactatcagttgtgatactattacccattgtttcctttattagctcaactatttctttattatttaatttttcaactaacgaaggtgaaagatttactttttgagtatttaagttatttttctcattatcagcaaacttttgagctatatttaattcactatcttcacttcctgctaatgtttttaatacatccagaacatttattttcctatttgaaggatcattctcattatacaacttcgatgctattgctttagttgtatctgtagtattcttcatcaagtcaatttctctatctattgttttatttttaactacagtctcaaggttattatttggtgattctataaaatttaatgactcattcatcttttttaatatttgctctattgatgaatttcctttaaacaacttgttaaaactatctatactttcttccgaaaaatccaaattattttctataaatgtaagtatatcgtcttgtgacatattcttaaattcattcaggaacttggtaagcatctctttagcagcttgaccttcctcactatttccagatatatttttactttgaagatatgtttgaataaatgcatctatttcctttggatttgaacttatctttccattaaattgaattaatcctttaattaaattaatattatctctagttagaggaagattacgcttaaccatctgttttaaaatatcaatatcttcctttgaaaggccttctttatcgattatttcctgaaagctttcatcaccagttgatttttcatctacagaatcttctactagttttaattttaacttcccattttcaaatccgtttacttggaacttaactaacttaagatcatccaaattgatatttccctcaagctcagcaataaattgccatccatctgataacttgactgtaatatcttttccatctccctttgcaactactcttcctgtaaagcgttcccctacttcaaaagttaacttgctagaaattttttttgtatttatattatatccattatttatattccaaattcctggcatattatcttctcccctactaatttcattcgtactttcccgatcactctattatacttatcgtatgaacatagcataagttaactaaaaaattaaatgttattaattacaatttagatattcagcatgattaatctattataatattatccgagtacacacctattcgatataacattatagcatttatacttgcaaattttaaggttataaaaaataaggtgaagcttccgttttaaagaaccctcacctctatcattatcttattaaattcacttaataatttatttgtattctttaacttcttcttctccgttaagtactctaattacgccttgtgctaaagcaagcatttcatcttcacctggatagatcaccataggtgctataaagcctactcgttctcttattagattaaccataggctttccatatgccattcccccagttaaaattatagcgtcaacattaccgttaagtactgttgctgccgcacctatctcctttgaaacttgatatcccatagcatcatgtaccatcttagcctttggatctccatctagtgcagcactttctacaaccctagcatcgtttgtgtcaagataagctacaaatccaccttttcctgttattttctttaagatttcttccaatgtatactttccgctaaaacacattctagccaaatcgcctgatggaactccaccacttctttctggggagaaagctccttcaccatcaagtgcattattaacatccactatttttccttttttatgtgcacctacagaaacaccgccacccatgtgtgctacaataacatttatatcttcataatttttagagttttctctagcgtatcttttagctactgccttttgatttagcgcatgaaaaatactcttcctaggaagctctggaacacctgacaatctggctatttcttccatttcatctactactactggatctactatgaatgcagatttgccaatagatttagaaatttcatttgctattatagcacctagattagatgcatgctctcctttaatactttcctttaaatccttcaacatgttatcatttacattatatgtgccacttaggattggttttaaaagcccccccctacctactactgcatctaattcctttatatctattttattatctttcaatatcttcaatataacttctgttctaaagttttgttgatcagagatatgtttaaattctcctatttcttctgaagaatgtcttatagtttctccaaatacttccttttcatcctcaaatacagatatttttgttgacgtagaacctgggtttattattaataatttatagctcacactttttcctcccttaagattttattttcaatattccaatatgacctgtaaaattaaattttatagtaattcaaaaatattaattgctactgccattaatgaaaattttgtagaaaatacaaatatgttggcgataatattatatactgtatatcggattgttacaagaaataattactatataatttaaaccttttcatcaccttactattataacctgaaactatgtaaattaacaaatacttttttcatataattaggatattcattaagcttttaaatagaaatcacttgtgacttataaataattcacaagtgatttttattttacacttagtaacttaatatattttaataggatatactatatattaataatatactttatacttcatttttttgttaaatgctattaaatttatacgtattccttctacttatatcctctttctttatccaatgcctcatctctaatttcttctctcatgcctcgaagcgcttcttctcttctatcattcttctcttttaatgtttcttgcattttaggatcatcagttttttctatcatttcatctgcaagttcgcaattcaagatggttctatcaatgttatattgaattctatctacattatcttttctgttatctagtttgtttttcataattgtatctctcctttgtttaaatattaggattacttatattcaagtaattttcattttttattatttacaagataataatttattatgtacaaacatatgatacccgtaaaaaatataaatactaatctgacttgccgatacatcataataaaatattattaatatgtttgtatgtattatagatgagactgccatatatatgatttatacttatttggcaacaatatttgaaagcttttattagtattcaaaaaaacaaaaagttgttaactaaaagtttttacaccttcaattaacaacatattttgtataataaaattatttaatttctatcttattatagtttttctttcctcttttaattaatacagcaccatcttggaagtcttcttcagttaagattctattaacgtcctcaactttgactccattaatagacaagccaccttgctcaattaatcttctaccttcttttttagatggaataattttagtacttgccattacctctaatataggtaaaccaatttcttctttagctatagtaacagttggaacatttgacatatcagctccaccagcaaataatgctgttgctgcttcttctgccttcttagcttcttcttctccatgaacaagtttagttatctcatacgcaagaactttcttagctccatttatctcagctccttcaagcgcacctaatctcctcacttcatccattggtaagaatgtcaataatgccaagcatttttcaacatctgcatcatctacatttctccaatattgataaaaatcatatggtgaagtttttgcaggatctaaccataatgctcctccaacagtcttacccattttttgtccttgactatttgtaagtaaagtacaagtcatagccatagcttccccttgagcttttcttcttacaagttcaactccagctatcatattagaccattgatcatctccgccaagctgcattttacagttatatttttgatttaattcataaaaatcatatccttgcattaacatatagttaaattctaagaatgataatcctttttctaatctttgtttaaagcattctgctgttaacattctgtttacagaaaagtgcactcctacttctcttaagaaatcaacataattaagatttaaaagccaatcagcattgtttgctaatattgccttaccatcagaaaaatctataaatctctccatttgtttcttaatagaatctacattatgctgaatatcttctttagtaagcatttttctcatatcagttttaccacttggatctccaaccatggcagttccaccaccaattaaagctatcggtctatgtcctgctctttgcatatgagccataaacatcattgctataaaatgtcctacatgtaagctatctgctgtaggatcaaagcctatatagaaagttattttttcattctccaataattttcttgtttcttcttcatgtgtaaattgttttatgtatcctctctctaatagctcatctaatacatttgccattatagtacctcctaaaattttcttatttgagttaatataaactaattgcagattacaagtccagattataaaaactatacgtatttctcaaaaaatatattttagcttcataaatttattaaacttttcatcacaactttttgttacataagtttttaacttatgctgcatttcaggttaataaagtaatattattctaaatttcatattagaattacttattatagtatatcctcaaccttaaattttggcaataattcatattttatatacacttatttagatttaaactccatgtcatttaatttcaatgctcggcaatatcaccttgaaactatgttctgctcgtgaattaataaatttaactctgcctttccctttaaaagaatttttaataattgtaaatcctcttccgctatttaaaaatcttcttttctcatctaaagaaattagtttttcatataaccaaatatttcttttattataattggttctttgcccttttacattttcatctatgaactcaccagggcttgaaataataattttattcctatctataattatttcgattattttattcaaatcaaagtattctctatatagaactgcattctttattgcttcaattattgcttgcattggataattctttggtaatatatcttttattttttcttctgcactatctatcatagataaaagatttccttgaattatgtgcaattctccattggttttttctaacttattaatgatttttatcatattgttaggaatatatatataattcttatcagaaaatacaagcaatcctccatatgtgcatttaagaggtgcgccttctttatgttcaaaggctattcctgcacttaacagtaaaaatctcttattttcttcattaatttctataccctttttgctgaaatatttattaaccaattccatatttagaatatcaatgctactttttataagagggcatgtttcaatagttaagcttagattttcctcaaataatacaattaattcttgctttctcattacatctgtagtagaacctctccttatataaaaagctccattatccctaacttgatatggcttttgtcccccatcataaattgatattacgcctattttcttatttttaatctctacaaaatcaacttctattggtattggaggctcacatcttgtcgttattatttgctgtatctgctcttctttaaacatgtcattttcttgtatgcctataatattcttggttttatcttcaactccaacaattatatatcctcttcccccactcgaattagctatggcacatatatctttagttaattctttcttacctgtctcacagaaaagctctagtttcaatttaaaatctaactttgttccttcttctctttttatcaaagatagtaactttttactatccataatataccctccttatatatttattaataaataccacaagttacaaaatattttaccggatgctttaaagataatataaatttagccaataactactttttaatttaataataatttttttacttatccactataaaatattattagcctaaataataaaaaagcattcttattaatataaataagtttgctttataatattattattagattttaaatatatttccactcagaactctattcttaccactttttttagctttatataataaatcatcagccttacttataagttcatttaagtctgtaccatttaaagggaaaaatgaaattccaaaacttgctgttatagactcatctctaccgttacaatttattttactaccttcaattgtacgtcgtatagcttcaattttggtatacacattatcctcactagtaaaatctgaaatatatagaataaattcttcccctccatatctggcgaagatatcatttttatctattccacacttaacaatattagctgtgttaatcaaaatcttatcaccaaattgatgaccatatgtatcatttaccttcttaaaatcatctatatctatcattactatggcaaatttatcgtttaattttctattatcattcttttctaagaattcaaaaaagtatttcctattatatattccaagtagagggtctctttgatttattttttctaattctttatatagcaaagaattttctattgcaatcgcaatctggtttgcaattgatctaaggaaaagtttaagctctatgttcataaatttatagagattatgttctactactatatatccaataaatttttctctcagctttattggcgatcccataattgaatgtatgtctattttatgttctccagtctgcttcaaaggctttctggaattaactaagaattcctctccattgtttatatgaacaaactccttagaagttagatttatattcatattctcaatattgcttgccttaactattaactcaccattttctatcataaatatggttgaatatgtaactcctagtattccaagaatcatgtcattaattagagatattaaattatcactgctaaaaaatgtatttatatatttacttacttctattatattagataaagaatctatgctcttttctagtcttacgtttttctcatttagttcttgtatatgttgttctgaaaacttctgatatgtttcatattctatctttagcgatttatacagcttctcataatcctgcatttgtcccaccatcctctaatcatacgaactccatgattatataacaacttaaatttaccattattttatacttaatacaattatactacaagtaataaaataattgaatacaattacttcaagctgtttgtaaattttactatatctttaaattgcatatgccagcatgtacacgccataaaaaatcataataaggttaattataattagttttttataacgatttttactatattcttcatctctcttcaattactaggaaaattttcatgaattgcatctttcaatttaggataaactaatattacaaaattaattttacaaggagacaaaataatgagatttatacaatggcttttaggtgtatttatatttttattgatatgtacactatttatacaatttggtaattcggtattaaatattgtattacttatttcactaattatatttggtataagattcttaattcaaaagtataccaatcgttattagtttctaaaagtttaatttctgatattagattttcatatacatatcaaaactactatcgttatgtatattttataaattaataaatcctaaaatatactttaggatttattaatttaattactcttaatttattttctaataattattttcccatggcttagaacttaaataatctataaattcatctcttaattcatctttctttaaggcaaattctattgttgcttgcaagaacccaagtttatctccaacgtcatatcttttaccttcaaagttatatgcatacatggcctcagttccaattaaagtttttagcgcgtctgttaattgaatctctccaccttttcctggcttagtattttctaatatattaaatatttctggtgttataatatatcttccaagtatagcaacattacttggtgcttcttcggtattaggcttttcaactaaatcttttaccttataaactctatcttcaacatgtattccatctactataccgtacttggaaacattttctttagctactgtttgaactcctaggatagtagttttatattcgctataacagtctattaattgttttaagcatggtttttcgctatcaacaatatcatcacctagtaaaacagcaaatggttcatttccaacaaaagtttttgcacaatgaattgcatgacctaatcctcttggttctttttgtcttatataatgtatatcaaccatatcagatatatctcttactaattcaagtaattctgattttccagacttctctaattctaattctaattctactgatttatcaaaatgatcttctatagattttttgtttctacctgtaatgattaagatttcttcaattccagaagcgattgcttcttcaactatgtattgaattgttggtttatcaactactggaagcatctcctttggttgcgccttagttgcaggtaaaaatcttgttccaagacctgcggctggtataatagctttttttactttcacaatatatcatcctctcatcttattattggtaatttaaatatattaagccataataaacaattctaattaattttgcccaacacattttttaagtattcctattttatatatactttttacatatttatgaaataatagtttaaatgtattcaacaacttaatacatttaaactaaaatctttgctaattctctttcatatctaatgttttaaaatctgttaatggaaattttactggcattcctgtttttcttgatttatatgctgcaagtattatagacattgccttcttaccttcttctcccgatactagcggatctctattatcatttatagaatctattacatccttaaataacggtgtgtgtccttctccatatacattatctattttaacatttacagacttcttaaccgcttcttcatcttcgccttcaaatctccatgtttcaagctcattaactgcaagaccaccaattgatactgctcctgtttcgccaaatatacttaatgtttcttctagatttttaggataaacacaagctgatccctcaactattccaatagcaccatttttgaatcttattattacagcaccaaaatcttcagcttcaatatctcttagataagtatcacattcggcataaactctttcgatttctccacccatcatccattgaagtaaatctatattatgtatacactggttcataagtgtaccaccatctaatgcccaagttcctctccaaggtgcttgttcataatatcccatattcctattccaaagtattctagctgtaccattaactaattttccaaactttttgtcttctatagcttctcttaatttctgtataggcttattaaacctattttgatgacaaactccaagcttaacatcgttttctttagccaccttaatcatttcattagcatcttcaatagacatagccattggcttttctactaatgcactagctccttttttcatgctatgaatagcaatttcagcatgatagccactttctgtcgctattgtaaccacatctatatcttctttttctaacatttctttataatctgtatatacatgcacagaatcttcagctgctccagttttttctatgtattcagatttctttgcttccgctttttctaaaaccacatcacaagtcgctacaagttccgcttcttctacatttttagctaatgcttcaacatgcttatatgagattcttccgcaaccaataatagcaaattttaattttttcatattaatctacctctctcaaattaaatacttttaatcaaattcaatagttcataatttcctttaaagttagttttactaatgcatttagaacaatattttaaatacatacgctaaaatcacaagttaagagactaattttaaataatagtattttaacttcattagctatcgaaacaattttctttgattaaaggcatttcactattgttttaagtattatataaatatctaaaaatatattatttttatttatatattctagatttaatgcaagtttatctggcataattgtgtttatgtaaaaatcatcaggattttctgcttctccaagtaaatcattttcatctctatatctaattgatgctaaatctgttatccctggtttaacttctagaacccttctctgttcctcattatacatctttacatatctaggaacttctggtctcggccccactaggctcatgtcccctttaaatacatttattaattgtggaagttcatcaagtttatattttcttaaaaaagcacctattttagtaattctgctatcatttcctacagtaatttgtcttcctaacttttctgcatccacaaccatagtcctaaacttcaaaatctcaaattcttcatttttttcaccaattcttatttgtttaaaaaatacaggtccatcagaatctgtttttattctaatggcaataactatcaaaatcggacttaaaactataagtcctaaagtagaacatatcaaatcaaatattcttttaactactttattgaatgtattcatctatttactcctaattcatttatttcagaacatataatattatattaactattttacaactttttagtcaattcagctcatattattgaatttcttcataaatttttaagttattttagtgcatctaaaaatttctctgcaagcccgcgataagtatgattttccaacacataatccttaccattttggcccaagttatttttttcatcttcgcttaagtttctaatatccataactgctttcacaacagcatctggatcttctgctggtaccgtaataccacaatttgaatccttcactggatcattcgaagcctcaactgcatatattactggtcttgctgccatcatatagtcaaataatttatttggacttacgccataattaaataaattttgcttttttagtcctatataacatatgtctaataatcttagtacattatccatattatctttaagtacaggatctagaaattcaacattcgttacattactagttttagcatattgtattaattcatttttcacgtttccatttccaactaatacatactttattttttcatctgtagttttctttgcagcatcaatcatcgtatctaatacattagctggcgagtgatttcctgtatatccaactaagaaataaccttcatcttttagttcttgtaatctttcaatagttttttccataggagcattttttttctctccaacaattattccatttggaacatgaacataattatccgcactaaatcccctatctttcatatgcctatctgcattaggtaaaattgaaataattttatcacaatttttaaaagcaaaatcctctgctctttgaagcataactatagctggattattcttagaataccctcctatttccattggcgttaaaggccataagtcatgtatctcaaaaaacagtttagcattactcctctttgcaatcctatgagctggatatatatctaaaggataagtcgaagatgctattactgcatctggtctatatttatcggcaagtttcttataattcattctcaatttgaacatgaatgttgatatatttttaattcttccaactccatttccctgatattctggagttttaacccatacatatgtaattccatctataatttcttcttcgaaatcctcttttatttgtgggtttttctttcgtaaatgtgaaaaatcagcaccaagtatgattactttatgtcccatatcaacccattctcgccccatataataaggtctaaattccattccatgataatcagaccctgcgtaatgatttataagtaagatattcatcttaattgctccttttttgcattataatgttaattaacgctatagattataacataagtgaagctcaaaatctatgattttgctaactgaacttatccagcgagtgcatgcgagtcggatttcctttaaaaaaagaactttaaatctaccccctaacattatattaataccttctacttcattatccaactatgattttgctagtctaacttatctataaaatgaaaattatcaacttttctataaatttctctcaattaaaaatcctcatctttacttttaattttattttcaaactatcattttataagacttaattacttgactatatagcttataaatatttctcttaaacctaaaatcgcactaataattcttttttacttcacagaatataaactagcatctataatgttccattcattacagatgctagttttatgataatctatttattaatattgctttcatttatattattagcaccaatactacttgtagcactactatcaacacttcttgtattattactattgttctctttgttcgttttttctttgcttccagcataatcataatctagttctgagtctggattaagcaataatccatcatgtcctaatttatactctttcccatttttcccaagaacaattgcatccttttgcatagttccatctttgtaaaaataataccaccccttttcagtcttcaaccaccctatagctttttcatcatttttataataataccagtcaccatttccttttctccatgatgaatcagattctctataatccttttcttgagtggtcttaatattagattcattatcttttgaagtattctcttttgaaatctcctcttttggtataatatcttttggcatttgctcaggctgtttgacttcttcagtatttaatttagacttattattagaatcatcatattcattaatatttttataagtatttttcaatgttaatttatcattatcacttcttaacttgttggtgttatcttgaaaatattgtgataaatcatagactacatatctattttttatttttttattttctttatcatgatattcttccttaactaatacattttctgaatcaaccatacggatactgattttactatcatcaccatataatttaggaatttcaataagcatatcaaatccatttttctcaagcttagctaaataaattttattaacacttttctcatcatcttttttaattagtatataatccttgtaaaaatcatcataaccatataggcttatattgtctaatctctctgcaactttattaactatatcatattggttaatgttaatgctatcttgatatttatcattgcaatccaaacctatatatgcctgtccctcaaaacaatatacatagctatttttaaatttttcttcctggcttactagatttttattaagaacttttatatcatcatatttttctatagtaaaattaccttcattaatctgtatttgttttactacattattttgacacattgcatagaagtcttttgatatatcatcataaaatatgccacttataacatcttcactattgctgttacattcaaactcgtatttatcattgctattaatgttatataatatgtactttttattttgctccttatcttcggaacgtaaataatagtcactatttccagaaacagaataccatcttgactgaaatacattatcttcatcagaaagtagtttatattcctttccagactgccaattaaaataaccattccttccaaaaattttatcaccataaatatttaattctccatttaaataattatctggcagctttactccacattctttactacttccatctttatttaaaataaagatattattatcatataattttttattaatataatcatattttattaagtatacacttccattattgtagcccaatggaatctcctcataatcatcattaatattattttctatctctatgatactctttatattattaatacttacatctgtatttaatacttcaatctcctcatggcctttctttatgtactcaccataatacatgcaagaaaatataactgctaataaagctataaaactaattatctttttcatctttcccctcccagcacaatacacatataaataaaatagtaatataaaataaatcagagcagccttataattactttctaagctaattcaatagaaataattataaggcaaacttattacataattgttaaatcaaaatttaattgtaatacagatattatttaatccaaccaccatctgtacctaaaacatatttactatcgtggtctattatagttgtatttttttgcattacaccatctttattgcaataataccacttaccattatcttgaatccatcctttctctttatccccctctgaattcatatgataccaatttccatctacttgtttccactcatacttatcatcatcaaatgtaatgtctggtgtacttttattagttaatgctccatctgcatttaatatacaatcattacctttctcacttttaactgttatacttttttgcatttttccatcatgatcaaaatggtagtataatccattatctagttgccagctgtcaactattttaattccttggtccccaaaataataataccaatcattacctatctttttccactgtttatgactctctttataagcttcagagctatcgtaagtaacttcttctccattaacaagatcatatccatgctcacctacaactacgcccttttcattgagctttacttctttgccagtaagatctttaactgttgtacccttttgcatttcacctttttcattataataatatattttaccatctacatcacgaacccatcctgtttctttatctgaatcattacagtagtaaattttcccatacttaattttaatatgtgctccatatttatttaattcttccttcgacttatcagttatattgtcgctaacttgagttccatcttcatcaagcgctattccattttcatcaaatttgaaacttttgtcatttatctttaaagttgtatttttttgcatttcgccattctcattaaaatagtaccatttcccactaatattaatccaacctgtttctttttgacctaatccattataaaagtatatcttaccattctctgtaatcattcctgtttgagttttcacttctgcatttgctgctgtcatccccactgctaaaatacttccacaaactaaaactgctgcaattagttgatttaatacttttttcttcattaatttattcctcctcagataataaatatttaatttgtacacttggtacatcacctataataaacccattttatatactttcaatgctttttacatttttgtaattttcttgtagtattttattaatagttattacttatttaacacttctgtaacatttttgtaatactttgaaatgatttttatatacctaaaaggatgctatagatatctaagttaagaattagatttatagacggaataaatagaaaaatatttcatctttttttatttcatattttaaggaaaacatattcttttgagctaattcattgcataaatatagtcctaatccagaacttgaaatactttcttctatatttc

SEQ ID NO: 40 - DNA, 47565 bp, Clostridium beijerinckii
atatttaataagtattttctattaatatattttgagggaaaatcggattcaattatatataatacatttatatttcgtataatgaaattatgcaagttatagcataaagaatagtgtttgtttatattatctttaaatattttaatttacttatttaagccaagtaatattaatactttatcacctaataaattgatcaagtaatgataatattattaaattttacttgaaattaataaaagatatcatatgattattatcaattgataaaggagtagatgttggctattaattttttagtagtaagataacataatttgaagtgattcaagaaatactacaattgttaaaataaggtgagtaatattaaaattaggttaagttttttaaaaagagtttaaaaatgttacaaaatagaatatacttgttactggattatgatatttaacaatatgtcgaatatttatattttatagggagatgtgataatatgtttaatttaaatccaaaagaagataaattctataaaatgtttatagaagctgcacaaaatgtagaggaaggtgcaaaagtattaagagaaagcctaaactcattatccaatattgaacttaatgttagcaagatcgaagaattagaacataacggtgatagattagtaaatgttatggttaaagaattaaatgattcatttataactccttttgatagagaagacatgtacttattgattaaaagattagatgacattttagatttaatcaactcaacaatacatagatttgtaatgtttaacgttactgaaagtacagaaccagcaaaatatttagctgatatgataataaaatctacaaaactcatatctgaattaatggatgaacttcatttaatagctggtaaaaataatataaatgaaaagatagtaacaataaaccaaatagaaagtgaagtagatcgtttatttagaaatacagtaggtgacttgtttagaaatgaaaaagatcctatagaaattataaaatggaaagaaatatatcaaatattagaaaacactattgataagtgtgaaaaaattgcaaatattgtagagggagttgtcattaagaatgtttagtactatgactataacagtattaatagtaattacagtattaatatttgactttatcaatggattccatgatacagcaacagcggtagctacttctattacaacaagagcgcttaaaccgcaaacagctatagtaatatgtgcaatttttaatttcattggtgcattctcaggaacagcggttgcaaaaactgtaggagaaaacatagtaagtcataattctatgcctcaatgggttatattaggagttttaatttcagcaataatatggaacataataacatggtattttggtattccaagtagttcatctcatgcgttaataggtgcactagttggtggcggaatagcttataatttgaaatttgatgtagtaaattggtataatctttttcatgatgttgtaatatggatatttattgcaccaattattggttttacagtgggatacatattaatgatattattaaattggatattaaaaccatttaagcctggaataataaataaaatctttttgaaattacaagttgttgctggttcacttatggcattaaatcatggaagtaatgatgctcaaaagtctatgggattaataactatggcattattaagtggtggacttatcagtacatttgaagtgccaacatgggttatagcatgttgtgctatagctatggctcttggaacagcatctggaggaaaaaaaattatcaaaacaatgggaagcgggatggcaaaacttacaccagtaaatggatttgcggctcaaacaggaggcgcagctgtaatatttttagcaacactatttcacgccccagtaagtacaactcacattatttcaacaactgtaatgggagtaggagcttctaaaagaattaaatctgtaaaatggggagttgctcaaaatatagtttgggcttggattttaactattccaataacagcagctctttcagcatttattatatttatagctaagctatttatttaggtatttaagtaataagttggagaaacttatgttaagatcttatatatgcaatagatgatattttaaaataataaacctatagatttcatataactgagatttataggtttatttttatattatatgaataatttattaatataaagataatcaatctaatgttatatggaggaagaatgaacagtttgacttatgaagagttgatacttctagataatctgatatatttaaaatgggatataaaagaaaatgaaaaacttataaatcttgtagataatttattaaaaagtgagaattttgactatcttatggaagccattggagattgtataataagaatggatacaaaagaatggataatgatattaaatcaaataaaagttaaaccaaatttaagtaatctaagaattaagaatataaatgattataataatggaatggaatatgcctgctttgtaaacgaggaggggaatgcaacagtaatttttagaggaacagctacaacaaaagaatggaatgacaatggtaaaggtgcttatgaatatgatacacttgaacaaatagaggccttaaaatatataaataaccttgaatatagtgatattacggtatcaggccattctaagggcgggaacaaggctcaatatgtatcaatattctctcctaaggtaagcaaatgtgtttctattgatggacagggattttcgaaagaatttatcagtagatatggagaagagattagtaaaaacaaggaaaaaattatatctataaatgcaaaatacgattatgtaaattgtttatttaatttgatatcagaaaagaatatatatataaaaactgaaatccagattaatccatttgattaccacaaggcaagtgtgcttttagacggaaatggcaatttaagagatgagacaaatgaagctgaattttcaaaaataattaattacttttcttccagcataatatcaaatttacccgataatttaagatatttagtgatagatggcattgtaaatgtaatagagctcatgttgtgcaggactgatggtaaggataatctatttaaatcattaggcgagtatttaataatgttttgccatgatggttgttctaactataaagaattttttagtataggatatgctgtatcagagatattgatcttaccattattgttttggaaggattttgttattgtagaggaaagcaattcaaaggaattgcttaataatgtagtagtaagaatgaagttattggaaagtatgtcgataaaaaaattacaaataatagataagagccaaatagatttaatacagagcatatcaagtgcagttgatgagctgatatataggattgagaatgagatttagaggtataaaaaatagtattgaaagaaatggagtaaataaatgattaaaaatttattgacattatcaggttttgctttaatctctgcattaatatatttagataataaaattataaaattatctaaatatgaaataaaaagtaataagattccaaaagaatttaataaatttaagataattcatttatcagattttcataactataattttatcggaaaagataatttccaggtgattaaaaaaattgatactgaagctccaaacattatcgttatgactggagacatggttaataaatatgataaagattttagcgttttttttaagctagcagaaactttgagtaaaagttataaaatatattatattataggtaaccatgaacagagattaaaaaaacacgatttagattttattacaaaaaggctgagtgaatttaatataactatactaaatgatgaaaaactcactattcaagaaaagggtagttgtcttaatatttatggcataaatatccctctttcattttataaaacaagaaataggccttcaaatatagaagaagtaattgggaaagtattaaagaggtgcgattccaaagaatataatatattattagctcataatccactatattttaaagaatatacaaaatttgacatagatttagttttatcaggacatgttcatggaggaatgattagattaccatttataggtggaatactttctccagaaagaaaatttttccctaagtataacagtggaatttatacaatagatacgaaaaagcttattgtaagtagaggaatgggacatagtaaacccggtataagattatttaatatgccagaaatcttaagtataactttaagaaatgaatcctagaaatttaaagtttttttaaaataaacttagttattttactttgggagttaaaacctaatttggaaattccaagttatggaaagcccatggaagggagcgaattgagagaacatctaaaatatctcatagataatttagatgaaattgcaagacctgagcaaggaaaatttgtttaatttgattatttatacagtattggaagtatcatttatatactaattaatattacatataaaaaacataatatatttttataaggtgggaacaatataattacacccaaataaaattaattttttaatttaaggaggtaattatttatggtacatgataaagaacattcagcaaaagagggttctaataacaggagcataggtggatggattataagattggttttaacagttgtagttttaggcataacatctttcttaacacctggctttactattacaggaatgtggtcatttttaatagctgcggtggtaataagtgtaatagattatctagtagaggcgttcatgggtgttgatgcatcaccttttggaagaggtataaaaggatttttcatagcagcaataatattatatgtggctcaattttttgttccaactatggcagtatctatcattggagcaattttagctgctttagttattggaatattagatgcaatattgcccgggaaagtaatgtaaatatttaataagtaataatattttcacaatattagggatgattattttataatcatccctataattttgcatcttgttttttataaaacataaatatataattttatataatttagtgcttaaaaaggagaattttatggatataaatcatatacatcatattgcgataattgcgtctaattatgaagtatcaaaaaatttttatgtaaatatattaggatttgaaataatacgagaaaattataggaaagatagggattcatataaactggatttaaagataggaagtagtgaaattgaacttttctctatgccaaatgcgcctaagagaccatcatatccagaagcatgtggactgagacatttagcttttcatgtaaaagatattgaagaagtaataagagagttaaatgaaaaagggattgaaacagagccaattagaatagatgaatatacaaataggaaatttactttttttagtgatccagatggtctgcccttagaattacatgaataagcacatgaggcaataaaaattattaaggagggtatttttaatgaagtatgattttgaaacactagtatctcgaaataatgtaggtgcaagtaaatggaatttgatgagaaaaattaataatgatgttagtgaatctatagtgcctttttctgttgcagacatggaatttaaaaatccaccagaaattattgaagggcttaaagaatatatagactctagtattatgggatatacagaagctacatataagtattataaagcagtatgcaattggatggaaagaagacatacatggaatatagagaaagaatggattactgaattctcaggtgttgtgccagcactatatacaattgttagagcgcttactaaagaggaagataatgttttagtgatgacacctgtatattatcctttttataaagcaattacagataataatagaaagataataaaaagtgaattaatacttaatgaagatcattatgaaataaattttgaagatttcgaagagaaagccaaattagaggagaccaaattactaattttatgtaatccgcataatccagtcggacgagtttggagtgaagaggagttaaaaaatattggtagaatatgttgtgataataatgttattgtagtatctgatgaaattcattttgatctaataatgccagggtttaaacatacagtttttgcaaatatatctgaagaatttgcgaataattcagttatttgtacagcaccaagtaagacttttaacttagcaggtcttcaagtttctaatattgttattaaaaataaaaaaataagagataaagtcaggtatgaacgtagaaagtttacaggaaatttaggtcttaatatttttggatacaaagcatgtgaaattgcttataatgaatgcgagcaatggcttgaggaacttatacagactataaataagaatagaaaagttgtagaagacttttttaggagtaatattcctgaggtcaatataataaacctagaaggaacttatttgcaatggctagattttagaacattggagaaggatcataaggtattagaaaaatttatgataacagaagcgatgtttttcttagatgaaggttatgtttttggcgatgagggtaaaggattcgagagaataaatttagcatgtccaacaaaggtgcttaaagaagcattggatagattattagaagctgtagaaaggtgctacagatagacatgctaaatatcatccttaagtaattatcttatttaaattcaataaaaatgaaactatatttatatgaacaattatttatagaaatatagttttaaagtaatatatgattaaatttatctatgtatatagaaaaatatgtttctatatacataggaacatatataaatatttataggaataatgcgggttaaataggataaaacttacaatggtcttgaaaaagtattataaggaagactatcatagaaaaagtactggaaaactattattgacaaaaattatactataagatatcataagtgagagttcaaatttcatgattaacactttaaagttaatcatgaagtttatgtgagttaaagtaataatataatatataaaagcaatgaaaaagaggagtagaaatttttgagcattaaaaggaaactaactcaggagagtttaggagtacggttcttttagcaaggaaactcactcagacgagctgaggagtacagttctttagctaaatcatagatttagaaagaactagcaagaactaggaagagagagggaggcgctgaaaacccttatgcaagaaattttgaaggtagcttttgagcttctttagtgaaataatagtagctaaagacggtttgtctgaatcgttatttaaattaagagtccattaatgcagtaattctgtatatgtggaaataaaggtggtaccgcgagctttcgtccttttgtgatgaaggctctttttgcgttgagaatcaaaattttatatttgcttcttggaactttcacagtctgtattttatattcgcttattcgaaagccaaaagagactgaatgtgagtcggatttaacttattaagacacagcaattgcagtgcatattctaaagaatatatattcttaggaataaatattctttacaatatttattgtttagaatataaaaatttaacaagttaattgttagtttaactaagtttggaggaattaaaatgtcagaagaaataaaaaatatatcaactacatatgatccaaaagaatttgaagataggatctataaaaattgggaggagaagggatactttactccagtaatcgataagaataaaaaaccatatacaataatcatgccaccaccaaatataacaggtcaacttcacttagggcatgcatttgatgatactcttcaagatatgcttattagatttaagagaatgcaaggatattgtacattatggttacctggagaagaccatgcgtcaattgcgacagaagttaaagttgcaaatcagttagcagaacaaggttatgataaaaaagaaatgggaagagaagcattccttgaaaaagtttgggaatggagtgacaagtatagagctacaataagaaaccaagttaaaaagcttggggtatctgcagactttacaagagaagcatttacaatggatgaaaaccttagtgctgctgtaaaacatgtatttgttaagctttataatgaaggtttgatttatcaagggaatagaataactaactggtgtacacactgtcaaacagcattatcagatgcagaaattgaatatgaagaacaagcaggacatttctggcatatcaattatccattagctgatggaagcggggttattgaaatagcaacaactagacctgaaacattgcttggagatagtggtgtagctgtaaatcctaatgatgaaagatataaacaccttataggtaaaactgtaatacttcctctagttaatagagagattcctatagttggcgatgaatatgtagatttagaatttggaactggtgcagttaagatgactccagctcatgatcctaacgactttgaagttggtaaaagacacaacttagaaatcataagagtaatggatgataagggaattatcaatgaaaaaggtggtaaatataaaggtctagatagatatgaagcaagaaaagctatagttaaggatttagaagaagcaggtctcttagttaagataaaagatcacgctcataatgttggaactcatgatagatgcggaactacggtagaacctataatctcaaaacaatggtatgttaagatggaaagtcttgcaaagccagcagtagaagtagttaagaatggcaaaactagatttgttcctgaaagatttgataagatatacttcaactggatggaaaatatccaagactggtgtatttcaagacaattatggtggggacatagaattccagtatattattgtcaagattgcggagaaatgatggtacttgaagatgctccaaaggcatgtactaaatgcggaagctccaatattaaacaagataatgatgtacttgatacatggttctcttcagcattatggccattctcaacacttggctggccaaacaaaacagaagacttagaatacttctatccaacaagtacattagttacaggacatgatattatcttcttctgggttgcaagaatgatattctcaggacttcactgcatgggagaaactccatttaatacagttcttattcatggtttaattagagattctcaaggtagaaagatgagtaaatctttaggaaatggtgttgatccactagaagtaattgaaacttatggtgctgatgccttaagatttatgatagctactggtaatgctccaggaaatgatatgagatattatcctgaaagagttgaatcatcaagaaactttgcaaataagatttggaatgcttcaagatttgtaatgatgaaccttgataaagaagtaatgaacaaatataaagactgcaaagaatattctttagctgataagtggatattatcagaaatgaatactttaataaaagaagtaacagaaaacatggaaaaatatgaacttggaattgctatgcaaaaagtttatgactttatgtggactgaattctgtgattggtatatagaacttgttaaacctgtattctatggagaagatgagaaagctaagggaatagtttacaacgtattaaatacagttttaattacaggattaaaattattacacccagctatgccatttataacagaagaaatattcactcacttaagtgatgaggaaactataacaacttcagcttggcctgaatttgacgaagctttagtaaataaagaagcagaagatgatatggcatttgtaattgaagctataaaaggtttaagaaatgttagagctgaaatgaacgtaccaccttcaagaaaggcaaaagtaatctgctatatagctgaggatgctaaaaaagcatttaactcaggtgtagcatacattgaaaagttagcttctgcatcagaagtagaatttattagtgataaggctaatgttcctgcaaatgctgtatctctagttgttaaaggcggagaattatttatgccgctacttgacttagtagacaaagataaggaattagacagattaaataaagaagcaaagaaactagaaggagaaattgatagaatagataaaaagctaggaaatcaaggttttgttgctaaagcaccagcagcagttgttgacgctgaaaaagaaaagagagttaagtatgttgaaatgttagaagctgttaaagttagaattgaagctttaaaataattttaatgaaattcagtaaaaaagatattgctaagttccttggaacttagcaatatctttttattttttttaggtgttcatattacgctgaaagataaggaggctattagagcatataacccaatatgcattgaattattaacctcacaataattttaattatcatatagttagtaagataaaaaagttaaaaatttttgcaaggtaaggatataataggaggattattaatatatataattctagaataatatatatggaggcgtttgaattttgaaaacgagaaggcatttacttaacttaattttttggatatccttatcaatcttatttaatattattatatattacacacgaggtgaaacatcagcaatagaatactttggtggttacatagtagaaatgtcgttaagtttagataatttatttttatttctgatgatattttcaagttttagaatacaggaagaataccaggaaaggatacttctatatggcgttataggggcgatggtattaaggttaattttcattttacttggcgtagctatggtaaataaatttagttttatattatctatctttggagtattattgctacttagtggtgcaaaaatatttcttagggaagatgataatattcaatttcatgataatttggcagttaagattttaagaaggataatgcctataacaaatgttttgcatggaaataaattttttgttaggcagaataagattatttatgctacacctctttttatagtacttttaataatagaattttcagatattatttttgcaatagattcaattccagctattttttcgataacaacggatactttcatagtttatacctctaatatttttgcgattttaggacttagaagtatgtactatatattagaaaagatgaataatatgttcaagttcatgaaatatggagttggatgtatattaatttttacgggaataaagttagtaatattgttttgggaaattgaaatttcagttacaaattctgtgttgattatattgtctattttattagctagtatattaatatctctattattaagtgaatttgataagtttagaaattggtgtaaaagaagattatagatattatgaaaagggcgcaaaggcacaatacgaaacttaaccacagtcaccttcgatttttttcttgaagaattatagaataaatttagttcagggatgtttttgtttagcatttaattagtcatttcactagaattaagatataatgtaaagtaaatacatactatttagaatttgcatttatagaaaaacataaaagacaaagaggtaagaaaaatgagcatgacttataaagacgcaatggattatattacaagcgtggggaagtttggatctaattatggacttgaaagaacttttagaattttagagttacttggaaatccacatgaaaaacttaaacttattcatattgcagggactaatggcaagggatcaactacagctatgatatcaaaaatattgattggaatgggatataaagtcggaatgtatacatccccatatttagaagaatttgaagaaagaattcaaataaatggaagtaatattagcaaaaaatcattagtagacttagtagaagaaattaaattagtagttaataaagtaattgaagaaggatatgaacatcctactgagtttgaaatcataactgcattaatgtttttgcatttctatagagaaaaaatagattatggagtaattgaagttggtcttggtggaagattagattctaccaatgtattaacgcctaaggttagtgtaataacatcagtaagtttagatcatataaatatattgggtgataatttaagagatatcgcaaaagaaaaggccggaattataaaagaaaatataccggttgtactctatcctcaaaaaaaagaggcagaagaagtaatattaaagatagcggaagaaaaaaaatcaaaagtatattttgtgaatgaacaaaatggaaaattggttgatatcaattatgatgatttttatcaaaatgtagttgttaaaagtattaaaaatatatataagattaaatttcctttgcttggagaacatcaaatattaaatttgggagttgctttaagtgcaatagaggtattatgcgagaatgaaaaaatagaattaaatacaagcttaattgagaaagctttacaggaagttgtatggataggaagactcgaggtcttaaaaaagaaacctacgatagtaattgatggggcacacaatatagatggaattaaagctcttagaaaaaatatagaaaagtattttaaatataataaattatacttattgcttggtattttagcagataagcaagtaaaagaaatggtacaggaaataacaccattagctgaaaaagtttatgcacttacaccacatagtgaaagagctgaacttagtgaaaatttgaaagaggaaatattaaactataattcaaatactattgcattagaaagttatgaagaggctttttctctagcgttaaaagaagctaaggaagaggatttaattgtagttagtggatcattatacatgattggagatatgagaaaaattataagaaataaatttcctaataagtagaattggggcacatatattttccgaattagtctaaaagaatataaatcaaaagattccgaggcaagcttcggaattttgattaaaaggagtagtgaaagttatatggttaagatagaaatagaaaattacatcaataataagaactcaatctattatgatttaaaagaatttcgtgatagaaatccagatacactatatagctatcaagactttgaagtggctggaagaagggaatttaagattattacgaacaaagttcgtaaacttcaggattatgaaaagaataggctagctagtgagctagtaggacatttatgtaattatgctttggatgaagaaaaattatcaagtgtccatgattatattacgttaaatccaatcatcggttattatgaaaacttgattaaaatcttcaaagactcgatggagaataataaagagatgttacaagcaatgagcaagagagtaaataatttacttaaagagagttcgtattcagaagcggtgaaattagggatattactttcgcctatatgcagcattaaaaacttgaaggatatattaaatgtgttttctattcataatgaatatattttctatacaatcaagtcatatgaatatattggaagttgtaataatataatttttgagatttcaaaaagatctaaaggatatgggaagatattttgtataatgaatcttactcctacaacttatgagataaaaaaatggatgattgaaaaaggttgtgataatagtgttggcattacggaattattatcttacactatgctttcattagatcttctgagctatttggaggatacaaaattttcaaaagaagagattgaagtttttgcaaaatctttcagtacattgctttcagactatagtttggatgatattaagtattcaacaaaagtttgcaataagttattagaaattattgataatataagtggtggcatatattcgttatatgctgtagtttcaattttatattcaatagaagctattattattgatgaatataagaataaaggaaattcaaattcgtataagttaaataatgattataaagaaatagtagataattgtaaaaaaatttgcaagaaagagttgtggcataatgtaattgcgaatgaagttcacaatatagaaattgaaagtagtgtattaataagttgtgcagatagaacgaagtacagattaaagaaaagtgaatttgaattaattataaaaagagattatacaaatgcacttttatataaatatgcattttccattggaaataaggctataaaaaaatgtgcttttaaattagggttgggaaaattaccaatgactgaaatattaagcggacaggatgaattaaaaatagaaaatttactttatgaggatatagcacaaatttgtttctttataattataaaatatgcacaatatgaagattttatagatgagtataaggatattaactttcaggcgctaaaatcacctttaattgagactagaattcaagcggctgcaaatcttcaaagatttaaagacgagtttgattcattggataaagaaactattaaggacgctattagcacagagattgttagtgatgtacgaagagcattaaattcacttttgattaaatcaagtagcaaaaagaataaaaaatatgtccaaatagatgagaatatgcatattgatgctcatgttaaagatatatatttaaccagtgtaaacattgctggaacaagctactttgatatgagtgaaatatacaataaattattggaagaggatattgtatatttaaaaagagattttgataatgaatatgataaaaatgcaattgaagttataacaacagaaggatttgtaatggggtatgttccaagagacaataatttaatattaaagaatttaatagataaaggtaaatatctttatggaaaagtagaagagataagtgaagattatagtgttataaaaattcaaatatatctaagttataaagatgtaattgaggaaataacaaatactttatcattactatctggggagagagaagactatttgcaataaaaatagtacggattgaagttcaataaaacataaaaaccatgcataagaaagaagagtttctttacttatgcatggtttttatgttagcaaaattgaataaattattgctagaaatttataatctatttttagtttatataattttctttcttccaagctaatagtgcttttgatagctgatcaggacaagatgttcctttatttctgcaatctattccacctaatctttttattatatcatccacaggcatacctttaactaattgaccaatgcctaataagtttccagcacatcctccaacgaattctacatttttaagaatattattctcaatttcaagatttattgtagatgaacaaacaccagttgttttatatgaaaacattccacacactccttaagataaaatataactatatacatgaaaagtaagcagctataaagaattttccaaaattacttactttgaaaatgtaattagttaagctcactttattatacaagaaatttgtcaataaataaagataatgaagttaataagttgtaccaataatatatattcagaatatattatagatagtagaatgattatcttaaaagggggggatggagtgagttatattgttttatgcaatactggttcagatagtttgaataaaataaacactgagaatctaaatactcaaaatatagttttatctattggtgaaggtccatttggccctcatggattatcattatataaaaataagctattagttgcaaataactataataatagcatatcgttgatagattttaatagttttaaagaagaaggcaatatatatgtaggagcgcatccaaatgatatagtggcttataatgatattgcttatgtttcgtgcggagaatctgactctttaataatatacgatttgctaaatgataggattaatttcaaaataccaacaggaagatttcctcataatatcacattattaaaagatagaaatttagtttttataagtaatatgggagatgacagtatatctataattgactatataaataataaggagataaaacgaattaaagtagaaaatactcctgcaaagataagcgtatcacaaaataaaaaatatttatacgtatgtatgagttatcttgggcgtgataaaaatggtagtgttggaataatagatttaaatactcttgaattaataaataaaattcaagttggacactcgccagtagatttatttgaagaagacagcttcctatatgtttctaatttatgtgatggttctataagtattgtaaatttaaatgaacttaaagaagaggaaaaaattgacattggcggaatgcctagaggaatagtgaaatctagagataacatatttgttggagattttttgaatggagtactgaagataatagatatgaaaaataggagaataaaaaccataccaataggaaatgaacccaatggtatgactttaacttagacatatgaaagaaaataacaagtccaaaataccatgattattttttatcaggcaaggaagtagaatggcctcatagcctgatattagggcattccgctgataaacagagaacccaaatctatgatttggtgtgaatcgcttactcagtgagcgcatgcgagtcaaacttccaattgtggaaaataggcgtggccgatggaaatattatttttttgattatgtcttaaatcgataaaagtaactttaattaattaataaacttattatattggtataaatttcggaaggattttctttccatttagcacaaattgaagtagcttgatttttggatggaactgataattttaattccattaataacgagtcgttttctacagctttaaggttaacaataaaactatcgtttgcacctaatgtgtaatcagaatgtatagttaattccttttttatagactctattttttcttttatatagtcattaatagtagacatttttgaaggggatattctatctttaaataaagagagaacattatctcctttttctgttaatatcaataattttttatcatttacatcatgatattcaacgaatttagattcctcaagctctgataaatattgctggaatgtaaaataattaataaagttattttcaagaattatttcagtaagctgagtatttgatataggattttttattgattttaaaacatataacattaataacttattttctgctaattctgatgaactttcgtacataattacctccataattgatgaaaatctccttttattataacacaaatttttttttagtgaataggagtatatcataatttataagtttaagtttacttaatagcataaaaaaatatgtaatgcatatagtttaaatataaaatataaagttaaaaggagcatggaaagtgacgtggaagaaaaagagaatcggtattgacatatttttgattatctttttagtatttatatctatagggattagcaaagcgatacaggcaatgggtaatattcaggaagaagatcctatatattgtgttgatactaatgaaaaagttattagtttaacatttgatataaattgggcagaaaaagataatttgaatgtaatattagacatattggacaaatataatgtaaaaggaacattcttcataatggggggatgggtaaattacagcgaggacaatgtggagaagcttaaggcaataaaggagagggggcatgaaataggtaatcatagctacaaacatcctatgttcactaaaataggagcagatagaatgaaagaggagatagaaaagactaatgatacaattgaaaaatatacaggtgaaagacctaagctatttaggtttccaagtggagattataataaagagtctttttcaaaagtaagaaacctaggatatgtaccaattcaatggagtgttgattctgtagattggaaagagatatctgaagaaactgaatataacagagttatgaaaaacgttaaaccaggatctatacttctttttcataataatgcaaagtatactccaaataatttagatagaattattaaagaactaaaggataaaggatatgagtttaaatcagtaggtcaaatgatatattcagataactatagcatagacaatcaagggattcaacataaaaataattaatatttattgaaaataaactagtttttgtattataatggtaatatatgctagtgggagcatatattacacaaaataaaataatttccgatggagagagggattacaatggataatttgatgttaaataacaaaatttaccttgaaggcaaggtaacatctggattagagtttagtcatgaaatgtatggggagggtttctacacttttgatttagatgtaatgagattaagtgattcagtagataaattaaatattactgtttcagaaagattactaagtgacataaagcttgatgagggtgttgaaataattgttgaaggtcaacttagatcttataacaagtttattgatggatctaacaagctaatacttactgtttttgcaagaaacattgaaccatgtctagaaagaagtaaaaatcccaatgaaatatttttagatggatacatttgtaaggagcctatttatagaactacaccatttggacgtgagattgcagatgtattacttgccgtaaatagagcatacaataaatcagattatattccaactattgcctggggaagaaactcaagattctgtcaaactttaaatgttggagataatattaaggtatggggaagacttcaaagcagagaatatcaaaaaaaggtatctgatagtgaagttgtgaaaaagattgcatatgaggtatcaatctcaaaaatggaaagagctaataaggaagagagcactggagaagagggcgcagtatagaattgtttatttaattaaaataaatattctaaattcgaaaaagctataagcattatgtaacataaatatagtattttttttggtaaataaaaaggtttcaattaatatagatttattgaaaccttttatttaattatgagaaataaccagtatattaactttatacatctgataggtactttctcaataatatattatgtaattttgaatttctaataaaaaataattactttcttaagtcatctaatatttgagttttatcttttgtcttgtcatctactgccttgattatcttagcaggagaaccagctacaacaacgttgtctggaacatcttctgtaacaacagaaccagcagctacaacgctacctgcacctatcttaacgccttcaaggattacagaattagcaccaattaaggcattatcgccaatcatacatggttctttgcttggtggttctaatactccagcaacaacagcaccagcacctagatgaacattcttacctaattgtccacgagcaccaactacagcattcatgtcaaccatagttccatctccgatttcagcaccaatgtttattactgcacccatcattattactgcatttttaccaatagtaaccttatctctgatgatagcacctggctcaattctagcgtcaacttcaagtaaatctagcattggaatagcagaatttctcctatcattttctattctaaagtgttttataaggtgtttattatctaaaactattttagttatagaatcagattctcccattagtatataaaatccgttagaaccgtaccactctacatcattcatttcagcattgcttaaatctccattaacatagacttttactggagtagatttttttgattccttaataaatctagcaatttcataaggatccgttaaattatatgacattatatcaccctttccattattttcgcaatcatccttattataataaagattgaacgcaattaaaaggggaataagtaaaaaaacacaaatagtttgaatcaattttattaatgaggtaaaataagtttatattgcaaaacgggggcgcataaattatgaataaacaagtagagaaaatacaaatctcgggaataagaagatttgccgagaaagttaagaaagttgaaggagcaatatcgctaaccatcggacagccagattttcctgtgccaatagatatatctgaggctatgattcaggctataagagataataaaacagtttatacatcaaatgcaggtgttgacgaacttagagaagaaatttgtaattacttaagaacatttgatattgaatataataaagatgaaatatgcataacagttggtggaagtgaaggattatattcagtattatttgctgttatgaattcaggagataaaatattaatacctggacctgcttatccagcttatgaaaatatttctataatgataggggcagatgtagtaacatatcctttaaatgaagattttacattaaatttagataaaattagagaaaaattagagaatgaaaacattaaagtattaatgttgtcatttccatcaaatcctacaggtgcaattttatctaaggagcaaagaaacgaacttgttgaattaataaaaaataaaaatattatagtaataacagatgaaatgtattcgtctataatttttgatgattattattcagtagcacaggcaaaggaaataaaagataaagtcatatatgtaagtggtttttctaaaatattttctatgacagggcttagaataggttatgttgcatgctgtgaacagtacatgaaagaaataatgaaagtacatcaatatggtgtttcgtgtgcaccttctattgcacaatatggagttcttgaagggctaaaaaaatctttaaatgatgtagaaaatatgagaaagacctttgaaagaagaaaagactactgtttgaatagattaagggatcttaatttggaagttgcagaacctaagggagcattttatatatttccttcaattaaaaagttcaatgtgtcttctgaagagttctgtgaaaagttattaaatgaaggaaagcttgcttgcgtaccaggtacagcctttggtgatttaggggaaggatatatgagaatttcatattgctatagtgatgaaattttaaaagaggcatttgatagatttgaaagatttttaaaactaaattttccaaatttctaattaaagaattttaaaaataatgaaggggtaaattttattaacttttcatttttataaagtctttatataaataaaaatatatagggggggcgtcacaatgggtgaatttaaaaatgtaacagcagttaaaaaagctaatgtgtattttgatggaaaggtaactagcagaactataatatttgaagatggtgaaagaaaaactttggggataatgttacctggggattacgaatttggaactggagataaagaggtaatggagatcctaggaggggcaatggatgtaaaattaccaggttcagataaatttgatacatacaaagaaggagatacttttatagtacctgcaaactctaaattcagtctaatagtaaaagaagtggcagattactgttgctcttatattaaagaatagttaaggtattaaaaatacttataaagatatagatatgaaagcatctgtttttacaggtgcttttttcttcatggtatgccgagcgtgggaacttgctaaacaaagtaaaaaactcaataactatccgaaataggcttaagtaaatttaacaggtaattcattataactacttttcactgtgttacgttgacacaatatttatttttttgttagtattatatcatcaaaacagaagattaaatattaaaatatggtgcaaaatatcgcaatgtcttcaagcaaggattattataaaaggtgaatgtatgaaaaagataatgaatgaacaattaatttatgaagtactttcagttgtagaagaaatccctgaagggaaagtagctacatatggacaaattgctattcttattggcagagacaaaaatgcacggcttgttgggaagattcttagtcaggcagaattttatgggcaatatccatgtcatcgtgtggtaaatcatgctggaagattggtaccagggtgggatgaacaacgatttctgctattagaagaaggtgtatcctttaaaaatagtaatcatgttgatatgaagaaaaataagtgggaatattagggtggagatgcaagatgaatgaacagaattatttaaattctattgattccctttatatagaatatttaataatacaagtagatgtaatattataaatgcttatatcacttaaaataagtaatataagcatttataatatgtttcagtggaatttagatggttattattcttagaatcatccatctaaattcctagaaactatagtacagttatttattttaattagtaactaatttattgaattcctataacatcactcatgtcatataatccaggttgagatacagaagccatatattcacacgcttttagagcaccaactgcgaaaacttctcttgaaattgctttatgagttaattctattacttcaccagttccggcaaagataacatcgtggtctccaattataccaccacctctaactgcatgtataccaatttcattttcttctcttttggaatttccttctcttccatagatgtactttgttgtatcttctatagagtcttttatggaatcagcaagcataattgcagttccacttggagcatccaccttttgattatgatgcttttcaactatttcaatatcatagtttccatagagtagaggagttactttctttaaaagagaattaattaaattaataccaaaagacatgttacctgacctaaatagcttaagagtagtactcttttcatctattaaagataaatcttctggtgtaaagccagttgaacatattactaatggtttgttagttttttctgttatttctaatagactatgaagagcatcagctcttgaaaaatctaataaaacatcatattggatgtttaaatcctcagtgctttcaaagataggatatggagcattacttggaaatttatcaattccagcaacaatctctaagttcttaaatttatcagcgcactctgtaatcatcttacccatcttacctgagcaaccatttaatactatttttatcatattatcaccttatatcaatttataatctagcaaagcagcttttagtatttcctcattgttattatccatttcacaaagtggaagccttaaaggaccaacatcgaggcccataagattcatggctgttttaactgggattggattcgtttctaaaaataaagtattagctaaagataatgtgtctaattgaatatctaaagcttccttaaatttattagctaaacatttttcagctatttcatgaactttacttggaattatattagctaaaactgaaattacgcctatacctccaatagacattatagatacaatttgatcatcattaccagaataaatatctatagaatctctgcaaagcgccttcatttgaagtatttggctgatatttccgctagcttcttttatcgcaacaacattgcttaattcagcaagcttagctaaagttttaggtgcaatattaacacctgtcctactcggtacgttataaagtacaataggagtattaacctcatcatttatagctttaaaatgttttatcaaaccattttgagtagttttattgtaatatggtgtaataacaagaagtccatctactccaacgctttcagcatatttactcattgaaatagcagcagcagtattgtttgaaccggttcctgcaattacaggaattcttttgtttattacatcaactgtaaatttaattgcatcttttttctctttttctgtcatcgtagtagcttcacctgtagtaccacaaattacaatggcatcagtaccttctttaacgtgccattctaataaatttttaagtgattcgaagtttattccattttcattaaatggcgtaactatagctacagctgagccttgaaatattgacattcagattcctccaacttaattactaagaactatttattatcttttatcattatttcagcaatttgaatagcattaagtgctgcaccttttcttatgttatcaccaacaacccataggtttaaaccattatccacactaaaatctcttctgattcttccaacataaacgtcgtcttttcctgaaacttcaagagcagttggatattttaattcgtctactttatcatatacagttacaccttgagtgtttccaaataattcgaaaatatcttttatatcaaattcagaattaagttcaacattgatgctttcactatgcccattaagtactggaactctagctgtagtagcagttactcttaaatctggttcatgaagaatttttctagtttctttaatcatcttttcttcttcttttgtgtaaccatcttctaaaaatacatctatatgaggtaaaacattaccagcaataggataagggaacttcttaggtgcaacacccttaacaccatcttctaaatctcttataccttggacaccagccccagatactgcttggtatgttgaataaactattctcttaattccatatttgtcatgtaaagctttcattataggcattgcttggattgttgaacaatttggatttgcaattattcctttatgaagtttgatatcttctggattaacttctggtactacaagtggcacctcagggtccattctccatgcactgctattgtcaattactactgccccatattgcgcaaaaataggtgcaaattctgtactagcatctccgccagctgaaaatagtgcataatctatttttttatcttttatattcttttcacaagtttcttcaactacataatcctttcctctaaatgatagagtacttccttcagatctctttgatgcaaaaagatataaattatttactggaaagtttctttcttctaagatttctaaaaattttctacctacatttccagtagccccaactattgcaatattatacacaataatccctcctaaatttatttattaatatttttatacatacaattactatagttaaatattgaataaatatcaagtcaatgagcaaaataagttgaaaaaaactattcataaagaattatttattccattaattaggggggaaatgaaataatgtgtatatttatgcatatatatgcaagaagctgaaataattattagcagctattatgtcgtataaatattataaattaaatgtaatttttgtaaaaatatatttttatagaatagtaaagtgatagaaggaaataatattggatgaaaagataaactttacaatttatttttatagtgtaattcaagtaacttagaatttttttatttcttttattcttttcataaataaataaatatcaataaaaaactaattattaagattggtagggataaagaatgggtaataaatctgtaaaaaagacaataaaagcaaaacttaaagcaaataaagagcttactgaagctgaaaaaatgagagaaaaagttaaatatgaaattgcagaagaacttggtttaatcgataaagttaataaagaaggatggggcggactatcttctggagagaccggaagaataggcggaataatggctaaaagaaaaaaagtgccaaagtaaatgacaagcttctatatttttactaatttgactaagtaaataattacgatataatatactagatgaattagtaaatttacgttaagggcgtgataaagcagatggcttataaagagtttgccaatatatatgatgaattaatatatgaagatattaattatgataaagttgcagataagattataaatatatgtagaaaaaataagttaaagtttgaagattatttggatttagcatgtggaactggaaatgtttcgattaatgtagcaaaatactttaaaactgtttatgcagtagatttgtcagatgatatgttaaatgtagcttttgataaatttaaaaagaataaaattaaagcaaaagtaatttgtcaagatatgtgtgagttaagtttaaataaaagatttgatcttataacttctgttcttgactcaactaattatataactgaggatgaagatttgcttgattatttctcaagtgtatatgaacatttaaaagaaaatggtatatttatttttgatataaattcgtattataaactttctaccgttctcggaaataatatatacacttacagttctgaagaaattttttatacgtgggaaaattcatttgaagatgatgtattaaatatgtttttaacattcttcgtaaaaaccgaaaatgaactatataaaaaatttgaagaagagcattttgagagagcttataaagaaagctatatagaagatatattaaaaaaatgtaactttagaataataaataaattttcaggatattctgatgaggaagtaaatgaaaatagtgaaagaatactttacatagtaagtaaataagacgtgaaataggagatgagataaaaatgcaagataaaatagttagagcaacagctaaggatggaatggttagaataatagcagggattactactaatttagtaaatgagggctgtaaaatacatgaatgtacgcctgtagcttcagcagctttaggaagaatgttaactgcaggtacacttataggaactacactaaaaagtgaaaaagaagttgtaactttaaaaataaatggtaatggggaaataaatggaataacagtaactgcacatagtgatgcatctgttaaagggtttattggaaatccatatgttgataggcctcttaatgaaaaaggaaaattagatgttggaggagctattggaacagatggtattttatatgtaataaaggatttagggcttagagatccatatattggacaagtgcctatacaaactggagaaatagcagaagattttgcatattatttcacagcatctgagcaaacaccatcagcggtatcacttggtgtattggttgatagagatttatctataaaggcggcaggtggatttatagtgcaaatgatgcctggcgcagatgaacttcttgcagatgttataacatatagattagaagaaattccaccaataactacattaataagtgaaggaaaaacaatagaagaaattttggagtatatttttgatggaatggatttaaaagtattagattctttaactccagaatataaatgtgattgttctagagaaagagttgaaaaagccttaatatctattggaaaggaaactcttcaagagatatatgatgacaaaaagaatgaggaaatagtatgtaacttttgcaatactaaatatgaatttactaatgatgaaataggagaattattaaataatagtagataaacatactaaaattatagaataaaaataataaaaagatacagagaataatttggaaaactatgaaaaagcagattattctcttttttcgtgcataaatattataacagaatattttttattttaattaaggagtgcatgttatgaaaaaaaatttggatattatctttggcatgattattatagtatatattgcagtaataaatattataagcagctctaaaatctcatttagtattcctatttttattttaggagttactttaataatatatcattttattaagaggggaatagaaaataataagtttatatataggtattttaaagttttaaaagtactaatttgcataggaggtatattttttttaggaatagaaatttttataattaattatcctaaatataataaggggaatgcagattatattattgttttaggagcaggacttgatactaactctaacccaagtttaatccttcaaggaaggttggatgcagctttagaatacataaaagaagataattgtagattcattgttttatcaggaggacaaggatctgatgagaagctgccagaatcacatgcaatgaaaaaatatttattaaatagaggagttgatgaggaaaaagtaataattgaagataattcaaggaatacagatgaaaatcttaaattttcaaaagcaaaaatagaagagaatagtgggaaacctctagataaacttaatattaaaatagtaacaagcgattttcatgctcttagaagcagtatcttagcaaagagaaatggatatgtaaattatagcaattattctagttgcactgtatggtatttaattcctataacatatacaagagaagcttttgctattgttaaaagtataatatttgattaatattaatatacaattgaattttagtagcttgaaaggatagcgtaaacaatgaggataaataaattatttagtaactatggaatttgttctcgaaaggaaacaaatagattgattgaagaaaagagaattattataaatggaagatattgtgttgagggacaatgggtaaatgattcggatgaaataatatttgacggcaaaccaatttctacggtggaaaaagtatatattgttttgaataaaccagttggaattacttgtactgcagagaataaagttagtgataatataatttcctatatgaaatatccacactatatatttccagttggcagattagataaagactcgcaagggcttattttaatgactaatgatggtgaagttgctaataggattttagaaagcgataatatgcatgaaaaagaatatttagttcaagtaaataaaaactttgatgatgaatttttaaagaggatgtctgatggagtggagattacagggaataaaagttctggtgttagaaggataagtgataaattaggtttatataataaaatagaagataaagaaaatccactaggggaagaaaatataggtgactcatccatagtacagttgaaagaattgaaaaatatagaacgtgaaaaaaataaatttgttaaaacaagaccatgtcgagtagaaagggtagatgataatacatttaaaattatactaactcaggggatgaataaacaaattcgtaagatgagcggagctttaggttataaggttattaaacttgaaagaattagaataatgaatataaagcttaataatctggagataggaaaatggaggtacttagaggaaaatgaaataaaaagccttaaaaatgagttgcttaggtaaaaaatattttagttaacatcaattttaggctaatattgataagtatataagtaaactttattgaaaaggatatatccctatgagataattaaattaaatatagtaaagttatagttaaaattataagtaaattctataatatagggatatttagcctttttattatataaaccactatagttttgaagaaatattttgattcacatggagagatagtatgaaaaaagaattgataaaagcaattgaagcagcagaaagatataatttatttttaaaggtagtgacatcagttagaagctacgattcatataacagcttttttaatatttacgatgagcatgaagaggcatgcagaagaattgttgtacttactaagacaaaggaattggaagaagtttatgatgaagatccaacggaagaaataaaagagtgcaaaatagttcagggtaatttatggataaaggattattccctgttgacgaatccagataaaataaatttatcaagtttatatgttattaagaatttggttgaggaactattatgaaaataaagaaacgtctaaccatttcaaatatattcatgttaattatacctgtaattatcatatttattattgcatttataatgaatattccattttcaaaggcttatgaaaataaatttgaaggttatagggagcatgatcagaatgcttatttcattcaacaaagtttaaaaccagatatgagaaatatagaaaataaaaatgatttagataaatttccagagcaattacagaaatttcttgatcctaagggatatcatctaataataacatatgatggggaaattgtgtcatcaaatattgaagataaggataaagaagctatttcgatgataggagatgatgtacttttcaaatctaattcattagttttagagatgaactccatatctttagttaaaaatagctttgttaaggataataaagtagtaaatattattgcaataaatccatcatataaacctgtaaggattgacataaaaaatgaaatgtcaactttggtaataagctatataataatagttattataatttcgctaattgttgttacgataactaatgttatactatccagtaagatttataagaaattgattcgccctttagaacttttaagctatggagctgaacagataaaaaacggaaatctggattttgaaatgaattatgaaagtgatgatgaatttggacaagtttgtggtgattttgatgaaatgagattaagattaaaacattcggtcgatatgcagctaaaatatgaagaagatagaaagcaactagtggtaggaatatcccatgatctaagaacaccattaactgcaattaaaggttatgtggaaggattacgtgatggggtagcaaatactcctgaaaaacaaaaaaagtatttagacacaatttatactaaggcttgtgatatggatgtattagttgatagtctgttccttttttctaaattagatacaggccgatttccatttaaatttgatgtagtaagcattagggaatatatagagagattttacaggtgtgctaagaaagagttttatggaaaaaacgttgaaatttcatttgaaagtaaatgtgagaattcaacattagtgaaactcgattataatgaaataaatagagttcttctgaatatattggataatagtgttaaatataagcaaaagaatttagttaaaataaaaattaaattgtatgaagatgaggaatttgcaatattagaaattagtgataatggttcaggggttcctgatgaagagctttcaaagttatttctaagtttttatagaggagatgtttcacgaacaaagcctaatgaaggaagtggacttggattagctatagcaaaacatataatagaagcgcatgatggagagattgaagcttttaataatgatggacttacaataagaataacattacctaaaagataattgtaaaacagatatatattataaggtagggaggatagtcaatgaaaaagatattgataatagaagatgatgaaagtatagctgaattagaaagagattatctggagataactggatttaaaacagaaattgctcaagatggatataaaggactagatcttgcgctaaatgaagaatttgatttgatccttttagatgttatgctgccaggaaaggatggatttaaagtttgtcaggagataagagctgttaaagaaatacccattttgatggtaactgctaaaaaagaagatatctataaaatacaaggactcggcataggtgctgatgactatattgtaaagccatttagtccaagcgaacttgtagcaagagtaaatgcacatatttctagatatgaacgtctcacaactattgaaaaaaatagcgataatgaaaaaagttcaataactattgggcgtattaaaattttacttaaagcaagaagagtttatatagggaaaaatgaagttaaatttgctaacaaggaatttgaacttttaatgttcttagcttcaaaccctaatatcgtattttcaaaagatacattgctagacaggatatggggagaagaatctttaggagatagttctactgtaactgtacatattaatagaataagagagaagattgagttagatagcagtaatcctgagtatattgaaactgtgtggggagctggatatagatttaacttataaactaataattatttcatattgaataaaaatatgtttattttgataatggtttgagtttatactataaattttaaaaaccacatgggaaaataatgaaattatgaaatgttggctagaggtgcaagtaacttttgtaagaaaatgcaaaagttacttgcacctctagttttaatttataatattaaatttaacatgaatttaacatttatttatattctgtttatatatgtgtaatagagatgttacaatcctttattataattagaaaataaatttaaaatagaataatattactaaatgacaaatcgaggaggagacaagattgagaaagacatttataagttttttaattggaactttagtggtttctggtggcatatcaattcttaatataccaggtgcatatgctgctacgactgataatagtgcagttaacgaagtgtctgatagtggtacgattaaagtatcattagaaaacataagagatatcatgactgaaaataatttagatattaagattaaacagaataatttaaaaatagcacaagaggaatatcatgatgcattagatgattatggtagtgcaaagagctcatatgatgcttatagtgataaggagaatatcgagtcaaactatgaatcggcaaaaaatgcttatgaaaattgtacagatgacgctcaaaaagaaactcttaaagtagcttatgataatgccaaagcagcttatgatgcgaaaaatgcttatgataatgctgatacaactttaacgacaaagcgagatgcttttaaaacagccagggatgattataacaaggaaattgaagatcaagtttacgcagctcaacaggcatacataacttatttgtctgatttaccaaatgaaaaaataaaagaagatacagtgaatattaatactaagaaagaacaaatatataaacttcaatatgatagtggctttatatctaaaaataaatatactgaattattacaaggaaatacttcagttgacgacttggattcgtcaaagaatacagcagagcttgataaacttaagctatttaacttacttggaataagttctgagagtaaagttacatttgaaaatgatatagataaaaattttgatgttatatctaaaattaattatgaagatgatttgagcaaaatgcttgaaaataatattgatataaaacttcaaaatgatgagattgatgatttagatgatgctgaagatgattatgataataaagatatttatgataataaagttgaagaagcaaataacaaattaaagtcgctaatgaatagtactgagacaagctttaaaaaacaatataatgatttaatgacttcttacaattcaataaaaagcagttatgatgtaataaaccagaaacaaaaagaatatgaaattgagcaaacaaaatatgattatggatttgtttcaaaaaatgatgtagatgctgcgaaattgactctagataatgataatgcggattttataaataaaagaaatcaatgctatttgtcttatttaaagtacattgaaatgaaagagggttactaaaattgaagcttttatttaataaaaaaactttagctaataaagaaattatggaaacaactgaagcaagcaagaaaaaatttttaactaaaaagaaagttataagtttagttgcgatattagttgttttagcaataggagcaggtatttataaggttaaatttgctaaaacgaaagtaacacaaagcagcgttaagtatacaactcttaagaaaacaaatattgctacaacaattagttcatcaggcgctataaagagtggagattcaactaatatatattcaaatttagaatataatgttgcatcaattaatgtttcagttggagatgtagtaaaaaaaggggatgtgcttgcaacaatagatacatcaactcttcaagaacaacttgctgaggcagaacaaactctaaatgcaaatgagcaaaaaaatcagttatcattaacaagtgcaaaacaaaaatatgacaatttgcagtatttacatgataataacttacaaactgatataataaatgcagaaaaatctgttgatagtgcaaaactcgatatggaagataagagtaaagtttatgaatatgataaggtcatgtttcaaaatggcgaaatctctcagcaagatctaaatacagcaaaaaccaattatgaaaattccaaaggagtttatgataaatcaacagttgcattagaagcagcaaaagttaattctgatcaagcattatctgaagcaaaaacagcttatgaatctgctcaagcagcagctaatgataagagtaatagacttgcatatgaagacaagaaaaagaaattgcaagatgctcaggttgtagcgactgtagatgggacagtaactaatgtaaatgctgtagtaggtatacaagcatctggggcattatttgtaattcaggatttagacaatttaattgttaatgcgagtgttgatgaaacagatgtcgcaaaagtaaaagtgggacaaaaagctcaaataacaacggatgcttcaggttctgatattattgatgcagaagttttaagtgttgaaccagtttctagtactgccagtgcgagtacaagtacaactagtagtagtaacggtaaaactagcactagtactagtagcactagtaatacgacaagcagtgatgtatctttcacagttaaggtacagttaaccggtaaaaatgataaggtgaaagtaggtatgaattcagtagtaaatattatcacagatgaaaaagatgatatttattcagtaccatatggagcagtaattaataacagtggacaaaacgaggtttatgcagcagttgaacagggtgggaaatatatcgttaaggagattccagtaactaaaggtatagaatcaaatgcaaatgttgaaattgatggttctgatctatcagatggaatgattatacttaatgaaccaacaagctataaagttggtgatccagtagaaataaattctagaaaaacaaagtagggggtgagtgtctttgagtaaaaatataatagaaatgaaagacattacaaaaagcttctatattggaactccaaatcaattaaatattttaaaaggaattgatattagtgtaaaagaaggagaatttgtagcaatagttggttcatctggttctggaaaaagtacattaatgaatattataggagcacttgatagagcaacttctgggaactatattttagatggtacaaatatcaatgaaatatctgataatggtttatctgaagtaagaaataaacaaataggttttgtatttcagacatataatctaattccaagaagttcagctttgaaaaatgtggaattgccaatgctttactatggaatgagtaaaaaagatagaagaatacgtgcagaagaacttttagatcttgttggaatgaaagatagaatgtctcatcaacccaatgaactgtcaggaggacaaaagcagagagtggctattgctagagcattagctaatgatccaagtataatacttgcggatgagcctacaggtgcacttgattcaacaactggaagattggttatggatttgtttcataaagttcatgaacaggaaggcaaaaccattgtatttataacccataatagcgaacttgcggaggaaacagaaagaattataactttgaaggatggaaatataatatctgaaaaaaagaatgatatgtactacagaagatttccaaaagaggacaaagtatgtttataaaagaaaatataatgcttgcagttgcggggcttaaatccaataaaatgagagcgttacttacaatgcttggaataataatagggatagcgtcagtaattggtgttgtttcagtaggaaatgcaatgacctcttctttaacaagttcaatgtcttcaatgggtgcaactaatattacagttaacgtgcaagaaaaaagtactacaagtacattaaattcgttgaattccgataattcgaatttaaaggacaaaaataattcgaattcaaaaaattcaggttcgaaaaattctaatagttcaaactcgaaaaactcaaatggcaattcaccaaataatagtggaggcgcaaagtcaggcggtggcgcaccacaaggtgggggtggagtgccaggtgcaggtgcaatgaaagcagcaagcggaggaggaatgcctccaggaggttcaggaagacaaggaaaatcaagtagcactgcaaaagatattgaccttatgacaatggaacagataaatgatttacaggaaaactttagtgacgaaataagttctataagtgtatctgaaagtggtagctcaggtaaagttaaaaatgattcaacgtattctaatgtaagcacagtagggacaaatgttggatataaagatgttaaaaatttggaaatggccgaaggtagatatatttcacaaaatgatattgatggagcaaaagatgttgcagtagtttcagataaattagtatctaagatatttggaacaaatgtagatcccataaatcaagatataaaagtttatacatcaaatgcaatttacacatacacaatagttggagtatataaatataaggcttcgggaggaaatagaacaacatctgatgaaaatttaactactgacctatatattcctgttactgtaacaaagaagacagcaactaataaaaattaccagacatttcaaataaaagcaaaagatgaagtaaatgttcagtcatttactaatgaattatcagactacttatctaagctttatgcaaaaaatgcaaagtttgaagctcaagcaagcaatatggaaagtatgcttgaatcaatgacatcaatgatgactacagttgcagtggctatatctgctattgcaggaatttcgctagtggttggcggaattggagttatgaatataatgctagtatctgttacagaaagaacaagagagataggaactagaaaggcacttggagctaaaagcagtcatataaagatgcaatttatagttgaatcaattataatatgctccattggtggtattttaggaatattacttggtttaggtgcaggagcaattggttcaaaagctatgggatatgcaactacagtatcgccattagttattttagtaagtttttcattttcaatgtttattggagtattctttggatattatccagcaaagaaagcagctgaactagatcctatagaagcacttagatacgaatagaatggattttagaataagctaatgttctaaaaataatttttaatgccatggatatattctgcattactactccatggcattattatattattattaaacaaatatttcataaattccgaaagcgattaatacaattccagaaataaaatttgaatatctaatcaaatattttgaaaaattgatatttcgattaaagtagcctatatatacaaataagatagaaataataaaatttaaaaatacacttatactaagattaacacctgttatacttgcagcaaaatttgtacaaatattgtttacagatagtgagatggaaagagctaaacattttcttagatttatattatgagagttatctaaatttagaatataagaatcctccaagaggtttttatatttaaaagaactttcataataaaaggaagtatcgtaaccaagacgttttttttctaagcgaatattctcaactataaaagaaataccaatataacttaaaagaatagcaccaaatatattactgaccttaggatctattaagggcagaattaatttaccaatatacatagaaacaaatgtactagcagaagttactattgcaagtaaaatactatttgatttagataaatgtattttcttaattccataagataaaaaaaatgataatgttactatatttgttgaaatagctagtaaaagaggtgatataagaatcatatggaactcctaaaaattattttagtataatatattcattttatttaaaaaaagattgtaatatgataaatttataagatattttttgtatttgattgaaaaaagaatgagatatttaaatattaaaagtcgtgttgtaaatttcgcttaatattttataaacataaaggtttgatattaggtgatgcaacaaacatataaagaaatggatttgtcgtaaaaattcagttgtgtttaagggctatatgtaagattataaaggtataggaaattcgcctatagatgtgcttaagtaagatccatatataaacgatagaatttgataaatattaataatagctattgattatgtaaatataataacataatcaatagctatctttgtttaattagtttgattactccattttttgaaattaaaataattaactagtatgataataaaaagcataacagcaaatacgcataacgaatactttatactaattcctaaaaatgtataaagcaaaattattggtgtatctgcaaaaaatattgttaaagtatatttaataaagctaatttcagctaatacagaaaaaaaacaaataatgtcggtgggaacaactggtgaagatacccctaaagctagaagttgcacattatttttttttatcatgttgtatattttgggatatttatttactattttattctggtaactcattccaaacgtaagtcttgcaaagaaaaataatagaatttcacttaataaattcgctgttgcagttaaaataaatgcttcatatggattaaataatattccgccaataattataaaaattgtacaaggaattagtgtgaaaattcttagtgatgcaattatgaaaaataaaattgcactgaattttccatatgtatttaaaaaaaatattatcttattaactccatcactatataattgatatttaagaaaaacaaataagatagatatccaaaatataataacaatacccttgaatagcttactcattaaatttaccactcctttcatattgaacttagagacgtagaaaaaaagcttataatactcatatttccaccttactataaaccattttaccaataaattataagaaaatgttaaaaaattggaaatctttcgtttattttaagaattattaataacaataaagtaatagaagatattttagacttagggtataatatagtaaaaacataacatactagggggcagttgtatgagtaaatattggaatgataaagttagagaaatagagccttatgtgcctggggagcagcctaaggatagaaagtacataaaactaaatacgaatgagaatccgtatccaccatcagataaagttttagaagccatgaggaacgcggttaatgatgacttgaaactttatccagatccaacatgtagtgagttaataagtgaaatagctaattattataagttagatgagaatgaaatatttataggaaatggttcggatgagattttggcattttcgtttatgactttcttttcaaagaacaaaaaaatattatttccagatataagttatactttctataaggtttatgctgaactttttgatttaaattatgaattagtaaaattagacgataattttgatataccattggaagagctaaaaaagacaaatggtggagtaataataccaaatcctaatgctccaacaggaaaatatataaatacagaaagcttaaaaagtttaattgaagctaataaagatagagtagtaattattgatgaagcttatatagattttggtggccagtcaatggttaaatatatacatgaatatgataatcttttagtaattcaaacattatcaaaatcacgttcattagcaggattaagagttggatttgcgctaggtcataaagatttaatagagggattaaacagaattaaaaatagcataaattcttatactatagatagagtggctttagctggggctaaagcagctattcaagatagtaaatattttgaggaaataactaagaaaatagtaaaaacaagagaaaaagtggtcaaggaattagaaaaattagattttagagttttaaagtcaaaatcaaattttgtttttgctagtcataacagtgcttctgggaagtttatttatgagaatttgaaatgtcaaggaatactagtaagatattttgataaagaaagaatagataattttttgagaataacaataggaaccgatgaagaaatggatattttaattggaaaattaagatttattttgagtaataattaaaaagaattatgataaaagtatagcaaagttggatgcaatgcgctaaataggattacttttggaaatcctatttagtgaattgtatctaattttacttattagagaatgttattagtcatatagagtaagagttaaggatattgatataatgaaatttttgtctgaatttatgattaggcatttttgaaattaacaaagagattttaatttttgaaggaaggttgattttatggaattatgtgttaataaagaatacgttttagatgttgcaaaggagatattagaatttgatagtccaactggcttctgctttgagataattgataaaataagagatatagttaaagaactaggatatagttttgaaactaccaataaaggttgtggaataataactataaagggtaaatcggatgaaaaaatattaggattatctgcgcacgtagatacgttaggagccatggttagatcaataacttcagatggaaaaataaagtttaccttacttggaggaccaattgttccgactttagacagcgaatattgtacaatacgaacaagggaaggaaagaaatatacaggaacattcttaagcacaagtcctgcagcccatgtttttgaggatagctcaagtaaaacaagagatccaaaaaatatggaaataagaattgatgaagaggttcattcaaaaagtgatgttcaaaagttgggtatttgtgtaggagattttatatttattgatcctaaaacaacaattactgagagtgggtttataaagtcaagatttattgatgataaaggtagtgtttcttgtttaatgggtttattggaattatttaatagagaaaaaatagttcctaaatatactaccaagatattaatttcaacttatgaagaagttggacatggagcatcatatataccaagcgatatagttgagatgatagcagtagatatgggatgtattggcgatgatttaacttgcagtgaatatgatgtatcaatatgcgccaaagattcaggaggaccatatgattataatatggtaacaaaactaattaatcttgcaaaggataatgagcttaaatatgctgtagatatttatccaatgtacggctcagacgtaggggctgctttaagaggtggaaatgatatacgcggagcgttgataggaccaggcgtccacgcatctcatggcatggaaaggactcattatagtgcttttgaaaatactattaaattattatattcttacttaactaattaaaaaataatcataatctattagtaggattgcaaaattaaatgtatgttatataaagtagcttttgagataaaagataagtgatatagatacatttaagaaacgattttagtaacttttgcataattctattatgcaaaaggaggggatggattatggatatagagaatttaaaaatgcaagcgagttttttaaaaagaaaatagaagaatttaatgagatattaagtggaattagttcatttagatatatttatacagcatgcgaaaaagataagattagtgatgaaggtatagttgaattcgatacgtttgaggaattgtttagatcattatagcaaattctaaagcgatgtaaagtttatgtattttattaatttggaggtatattatgaaagcatttatatttgatatggatggagtaattattgatagtgaaccaattcattttgaggtggatatgcaaacaataagagaattaggttgtgatatttcagaaaaagaattggaaaaatacgtaggatcaacaaatgaatatatgtatacggatataaaggaaaattacaatataaaaaaatcactggaagaaataatagactataaagtagaattgactaaaatgaagattattgaatctcatttagagccaatagatggaatcaaagaattgttaatagaattaaagaatagaaatattcctgctgcaatagcatcatcatcacctaaagatttaattgatatagttgtatcaaagtttaaattacaagaatactttaaatatattataagcggagaagaagttaaaagagggaaaccatcaccagatatttatattgaaacatcaaaaaaattgggaatatcgccaaaagaatgtgtcgttattgaagattctaggaatggagtatttgctgcaaaagatgctaaaatgaattgtataggatttaaaaatattaactctggaaatcaagatttatctaaagcagatatgattgttaactcaattcgagatatagatttaagtaatattctagaaaatcatataatttaaaagtatatagaataagtgagaaaaaagcagatactattaaatttcctaaaattgatttttttaaaattatttgagattatacgtctaaaatggtataatttatatgaaaaaaatcaagggagacgattagatgcgacgcaatagagtaaaaaaaatagcaatattagcagtatttttatgtattaatagtattccagtaataacttatgcaaaagacgcaaggattagtggggaagttgtagaaaagagtggtgttgaaattaatgacaactggcttacagaagaagtggccaagcagttaagtaaaaaagtggacaacttaacagaagcagattttttgaatatcaaaaaaattgatttaagccataaaagagttggtaataatataccggaagaaataaagatgttaaagaatctagagtatctaaacttaaattcttgctatatatatgaagatattcctgattatttgggagatttacctagattaacttatttagatttaggaaataatcaattaaagagattacctaaaaatataactcaaaaaatagtaaatggtacttatacttattgcgatgttgaaggaaataagtttaggttagataaggggtggtattttttaaagggtaaatggtgctatctggatagaaatggaaataggcttaaaggaactgaaactatcgatggtaaggaatatcagttcaatgacgatggtaatgtaaaagatggttgggaaagcgataaggataagaattggtactattatgatagaataaatggagcaataaaaaatgattggaagcagatatctggaaattggtattactttgataaagatggaaaaatggaaaaaggattgcaaacaataaagggtgctaaatactttttcaatgataatggagcaatggcaactggatgggtaaagatagacaatagctattattatttttcaggatcaggagcaatgcaatatggatggttaactttaaatgataagatatactatctggatggtacgtcaggtataatggcatcaggggatacggttataaacggtaaaaaatatagattttctagtgatggttcattaattaaaaatgtgtggatagataattatacatatgttaatcctagcggtgaaacagtgaatacttcctctaattattcgcattcaggtacaaactatcagctatttaaatatatgactaatgtaaataatcaattaagtgtagatagtactgctgttgcattgcatgacggaattactagtaataactgcgtatattttacatctgaagcgttaagaagaataggtgttaatataccaacttcaacagcaaatacatatcagttagagaacatattaaagaatatgggatttgtctatagttatgatttctctcagattaaaccaggagatattgtatttacaaataattatactcatgtttatatttttatgggttgggataaagatggatatgcttatattgtagataaccaaaggacaagctttggaaattcggtattacataaaaggcttattcttcaagatactgcgacaacagatagagctactcatttcttctattatccatattaattctgttgttaatatgaatagaaatatatgtgaatttttcttggatttttataaatgctagataaatttatagctataagttaaagtatatatctaaataaaatagtagcataacatatttaattatttcatttagcttaggctataacgagggtccttataattaataactttttattaattataaggacctttttgttatgaaaaattgtaaataaattttattcatatatattgagcaattatagtataaataaaaatatgaatataatgtatgattgcaatggaaggagaaaagtttgatgaaagttcaagttgatatattttcaggttttttaggtgctggaaagacaatgttaatcaaaaagttattgtcagaaaaggtttatgatagcaatacggttattatagaaaatgagttcggagaagttggaatagacggagacatattaaaagaaagtaatattgaaattaaggaaataaattctggatgcatttgttgtcaggtatctggaaattttggagaagctgttttagaagttataggtaagtataatccgaacaatataataattgaaccctcaggagtagcaaaattaagtgagatattaaatattctccaagaaaagaagtttcagcatgagctcgaaattagaaatatttttactttaattgatattagaaattatgatatgtatttgaaaaattttaaggaattttatgagaatcaaataaaaagagcaaaaactatagttttaagcagaagtcaacttgtagataataaaaaaattgatacaactatagattctataagaaagttaaatttgaaagctaaaataatatataaaccatgggagttgttaaaaggaagtgattttcttagtacaaatgtaataaatgaaaaaagaaaaatttttgctgcaaattctagtactagctctagcgcaagtaagcagatgagaagagaagtaaatcatagtgcaaatgaaatttttgaaagttatcctatagatcttgaagaaaatataagtatgcttgaaattcaaaaaaaattcgaatttatttcaactaatgataagttcggaagaataataagagctaaaggtgtttttaaagcaaacgatggagaatattatcaatttgattatgtacctaatgaatttaaaagtaggaaaattagatggtcaaataagaaagtggtttcaataattggtagtgagttaaataaaagggaattagaacgtctatttattaggcaaatataagaattattaattattaaaactttgtagagaggtggtggaattatgaaaatacatattgagattgtgacaggttttttaggagctggaaaaacgtcatttataaattcacttttaaaagaaagtttagttgatggagaaaaagcactggtttttcaattagagcaaggagaaaaaaatattgtacattctaataacataagtaattttgtaagaattcaggatgctttagatattaaagatttaaaagaaaaaatgatatactcaataaaaaaatataaacctaacagaataataattgaatataatggaacctctgatttaaaagaattattcgatatattgaatgaaagaatttatagagaatgtagtaagattacgactatattctttgttgcagatggtaagacattaaagcaatatattgacaatatgggaggctttataataccttttatacaaaacgccaatatgattgttattaataatatagattattgcaaaaaagaaattttaaatgaaggttttaaaaaagttaagaatataaatcctaaagcatttattttacgagttagtaataagtatattttgaattctacacttagggaagcaagggtattggacaatgggtgtttaaaaaagataaaaattaaaatgataaaccacaaaaaaagtactaacataaaatatgagggaaatgaggaaaatgtatgaatctttataagaagaaggttaaagctttctttattataagtgtagtaatactatcaatatatatttacaataaatatccaacccttatatatattgaagttataggagattttgcaagtatatttacaagtataattcttgaggcaatgccatttatcataataggatctctcatatctgctataattcaaacatgtatatcagaaaggattattgctaagataatacctaaagcaaatattttaggatatttaggagctgctttgataggtcttatttttccggtttgtgaatgcgcaattgttcctataacaagacggcttataaagaaaggtgtacctgttgggttcggagtaacatttatgcttgctgtacctataattaaccctgttgtaataatgtctacttactatgcattttacgataaaaaaattatggtgcttcttagaatagttggaggatttatagctgcaattctaattggaatgatagtaaattcgcttgaaaaagataagaaaggattagtgatagattttatagataatgatagctattgtaactgcggatgtaattcatatgtggaaaatcaaaacaaattaagaggaataattgaacatacaaatagagagttcttggatataatgggatacttgatacttgggacatttatatctagcgtatttcaagtggcagtatctcatggagaaataaactttatttctaataataagattctaggaatagttgcaatgatgttgcttggattctttttatctctttgttcagaagtggatgcattcgtaggaaaaagttttttaactaactattcacttagtggagttacagcatttttgattttaggtccaatgcttgatttgaaaaatcttattatgattattggagcctttaaaaaaagttttgtacttaaattaagtataagtacaatagttgttgtatttataatctcctttttattcatgatgtgcggaatataaagatgcactttaaatgatagcaatttaaatataaaaaggagctgaaaaataagtgaaaagatttaattttgatgagtttttatggtttattgttcttatattgttagatttctctataatatatttaatatctactggaagtataggtttttatat

SEQ ID NO: 41 - DNA, 47012 bp, Clostridium beijerinckii
aatatattgcattaaattttaaataaatatccaaactaatagaaaatgtatttttacaagtattattctaaaatattctcaaatatatcatttctaactatcttactgttaaattttccgatataaaatataactaaaattataaaagaattgattttatagattcatatctataaattggaggtgcgaacttgacaaaaaaagaatatgaaagcatgactttaacaaagttaaaagatattgctaaagatttaggtgtgaaaaatatatctaaatataaaaagaatgagctaatagaagaaatattgaaagttcctagtaactttatagaaaagaatggtgttatattaagagaaaatatagcacctaagaatgtagaagagactagaagtgttatgcctagaagtaataatactgagtcgaataaagaaagcaatgattcagaagtaaaatctagaacaaatgaaattgggaatgtggaaaagaaagaaaatttaaaagaaatgataaatgaatccaacgttgcaaatggaattttagaaatacttgaaaataatagttttggtttcctaagatgtaaaaactatttaactagtagcgaagatgtttatgtatctccatctcagattagaagatttaatttaagaacaggagatgaagttgaaggtaaagtaagagaagcaaaggaaactgagaagtttaaagctttattatttgttcaaaaagttaatggagagcatccggaaaaagctataggaagaaaatcctttgaaacattaacaccaatatatccaaaagaaagattaaaattagaaacctctgatagtaatgatttatcgtctagactgatggatataatatgcccaataggaaaggggcaaagaggaattatagtcgctccaccaaaggctgggaaaactacgctattaaaaaagattgctcaaaatatatctaaaaattatcctgatgtaaagcttattgttttgcttatagatgaaagaccagaagaagttacagatatgaagaggtctattaatggagatgtagtttattcaacttttgatgaggaaccgcaaaaccatgcaaaggtagctcaaatggtcttagaaagagctaagagaatggttgagcaaggtaaagatgttgttattcttatggatagtataactagattatcaagagcatacaatttgacaataactcctacaggtagaacattatcaggtggtcttgatccaggtgcgcttataatgcctaaaaagttttttggagcagcaagaaaaattgaagagggcggaagtttaacaatactagctactgcactaattgaaacagggtcgagaatggatgatatgatatttgaagaatttaaaggaacaggtaatatggaggttcatttagatagacgtctacaagagagaagaattttcccagctatagatatatataagtctggaacaagaaaagaagatttgattttatctaaagaagaattagaagtagcattctccataaggaaaaagatgtatagagatggaaactcagatgatattacagagaatttaattaatatgttatctaaaactggcaacaataaagaatttatagatgtattccagaaaaaagttcaatagataacaaaaaaagatgaccattttattctagtggccatcttttatttttttgaaattaaatcatctgctatatcgactattttagttaaagaataagttgatgataactctttgagctttagtttaattttggatagctcattggggttatttattaaataatttattttatcatttagcttgcttaaatcttttacatatattgaataaccttcgctagtcagaaaatctatattttcattttcttgacctggtatggcaaatggaattattaatggaatgttctttactatagattctgtaacagttaatccaccaggttttgatattaggatatcagaataatccattaaataagagatatcttttgtgaagcctaatatatgaagctttttgttttcaaatttattttcattgcaataactaattaatctattctttaagttatcatttttgccacaaactactgtgattcttaacttgtgtggattttttaacaattctttaagaactgtaaaaatagtagttaacccaagacttcctcccataagcaataaattaaaatattcatcatcttttaaatcgtttgctgatgtaacttcagtataaaatttactacttataggtatgcctattggataaattttattaggattaatacctctatctactagagatttttttgtatagttacttccggttatataagcatcaacgtaagaatccacatataaataatgagccttaaaatctgtaaccactaaaataaaaggtatatccaatccattcttttttagatctgaaattacgctaatattaattgaatgggtagctatgatgacatctggttgtattttgtttataagtttcgaaaccttctttcttgccataaagaagatgagttttaatagtttattagttaaatttgtgtcagttagtttgtaaaagaaaccataagttttgggaaacttcgatgccgaaaactcatatccaattacaattatatcgttaagaagcttgctattcttggctaaaaaatcaagctttgtaatctcataaccagaattattaaatgattcctctaccgaagcagcagcttgattatgtccctgtcctgtagatgttgttaagattaaaacttttttcatgaaagtcactcatttcaacattattatattacatagtttaccatgtatagtatataatttaaatattaaattatatacgctaatatattaaaatttagttatttaaattttaagtatgtataagtttgcaaacaattgcagtaaaatatatatttctaatatattagaaatatgaataaaaaaggaaagacatcgtctttcctcataaagttattacttgttgtcaaggttgaatctcttgttgaatttatcaactcttccaccaacgtcaacaattttttgtttaccagtgaagaatgggtggcatttagagcatatttcaacttttagttcttctttaacagaaccagtagtgaaagtgtttccacatgcacacttaaccactgtattgtggtggtattctggatgtatgccttctctcattatttttcacctctttcaattatataaactatgttaattattcaataacaaccaccatattatatcatagtagaattttagcgtcaataataaatccgtgtatgtaaataatataaaaatgtctttttatgatcactattaaatgatataatcgattatgataccttaaataaggagagtattttacagatgagtaaattatattttagatatggggccatgaattctggaaaatcaactcatttaatgcaagttgcttataattatgaagaacgtggtatgaaggtggtaattattaaacctagaattgataacaaaggtggagacacacttgtatctaggttaggagtaaataggcgggtagatttattagtttcagatcaggatgatatctttcaaataatcagtaattatataaaagaaaataataaaatagactgtatactagtagacgaagttcaatttttaagagaatcacaaatagatcagttgtttgaaattgctgtaaagattaatatacctataatatgttatggtctaagaactgattttaaaagaaatggatttgaaggtagtacaagattgttattgttggctcatagtattgaagaaatgaaaacaatctgtgcatgcggtaggaaagccatatttaatggaagaaaaataaataataaatttgtatttgagggagaacaaatcgcaattgatgatgaagataatgttgaatatgagtcattgtgtggagagtgctactataaatacaaagaaaattaattaggagagtaagtgatttttataaatggaaagacgtgatgttggagggcaagctgtcatagaaggtgttatgatgagaggaagtaaaaatcttgcgactgctgttagaactcccaaaggtaatatagaaatagattttaaagataatagaccagtaacaaaaaaatatccgattttaaatataccttttcttagaggttttttcgtactagtagaatcaatgaaggttggaatggaatcattaaactactcagcatcatttttggaagaagataatgaagaaccttctaaatttgaaaaatggttagatgacaaactgggagaaagggctaatagtgtattaatggcaataactatgtttatttcttttcttttcgctataggacttttcgttgcattgccaacaggcatagcatcagttttcaaaggtgtaggtatttcgaatgtaatgctgaatctgatcgaagctcttataagaatagtgattctcttgctttatatgttttctataagcaaacttaacgatatatatagagtgtttcaataccacggagctgaacataagactatattctgttatgaagctatggaagaattaactgtagagaacgttagaaaacaatcaagattacatccaagatgcggtactaactttttatttttggtaatgtttgttagtattatagtgttttcttttactgggtggggtggaatcatagaaaggttagctcttagaattattcttataccagtagttacagggattagttatgagataataaaatggcttggtaaaaatgacagtatgctagctcaaataatagcgtatcctggtcttaagttacaactgttaacaactaaagaaccagatgattcccaaattgaagtggctattgcatcgttgaaagcagcagaaggaataaaagatccaaataaaaatattgaagagctgataaaaacaggtacatttacattaaaagaaaatggcatagatactgctaggttagatgcagagctattgttaggaaatattattgagaaagatagggtttacttaattacacataaagaagatgaagtaagtaaggaagatgctgaaaaatattttgatttgattgaaaaacgtagaaataaaatgccagtaaaatatattctaaataaatgtgaatttatgggtatcgaattttatgttgaagaaggtgttttaataccaagaggggatacagagatacttgtagatgaagttcttaaaattatagaagaaaatcaagaaatgcaaatatgcgatttgtgttctggatctggtgcagttggtatatcattagcacattttaggcaaaatataaaagttgatttaatagactattatcctattccggaaaaagtatcactaattaatatagagaaaaataagttagaagatagagttttctttataaaaagtgatttgctagaagagtcgataaaaaataataaaatatatgacattatagtatcaaatcctccgtatattgaggaatgtgaaattgggaaattaatggaggatgtaaagaattatgaaccgcacactgcattaaatggtggaaatgacggattagatttttatagaaaaataattgaccaaagccaatatacattgagagaaagtgggatattagcatttgaaataggatataatcaaggagaagcggtgaaactattaatggaaaataacggttttactaatgtgaaaattgttaaagattttgctagccttgatagggtggtagttggaattaaaatttaattgaaacagatcttttaggtataagaacgaattaagaagtcataggatgtataatttataaatgaggttagttggttaagtaattaaaatatgatataatgtagaaatgtgaaaaaagaagtacggagtgatcaaatgttattagataaattagaatttatagaaaacaaatatgatgaattatcagtgaaaataagtgatccatcaattatgcagaatcagaatgaatggagaaaactatgtaaggaacatgctgacttagaagttatagttaatagctatagggaatataagaaagtagttgaagatttaaaagctaacaaagaaatgttaagcggtgaaagcgataaagagatgagagaaatgttaaatgaagaaataactgatctcacaaatagagaagaacaactagaaacagaaatacaaattttattattaccaaaagatcctaatgatgataagaacgtatttgttgaaatcagagggggtgcaggtggcgaagaagctgcactatttgcatacaatttatttagaatgtatacaagatatgctgaaactcaacgatggggcgtagaaatcatgagtttgaatgaaacagatcttggtggttttaaagaagttgtttttatgataaaaggtaatggagcttattctaaattaaaatatgaaagtggagttcatagagttcaaagagtaccagatactgaatcaagtggaaggattcatacgtcaacagctacagtagcagtgctaccagaagttgatgatgttgaaatagaagttgcagataaagatgttagaatagacgtatttagagcttcaggaaatggaggacagtgcgttaatactacagactcggctgtaagaattactcacttgcctacagggcttgtagtttcatgtcaagatgaaaagtcacaattaaaaaataaagaaaaagctatgaaagttttaaaatcaagattatatgaacaggcagaaagagaaagagcacaaggaatagcagaagacagaaagagccaagttggaactggggatagaagtgaaagaattagaacatataattatcctcaaggaagaattacagaccacagaataggactaactttatataagttagatacatttttgggtggagatattgatgaaatgataaatgcacttattacagctgaccaagctgaaaagatgaaattaatgggaaacacacaaatgtaataactataaagcaaagccttgcattttatatatgtagggctttaaaagtacattggagattgattatggatatatataaggctgtaaaaaaagagcgattacatttaaaaattttcttaattaccatggttattattgcgttttttcttccaacagttctaataataaccggattaactactattttttatattagttatgtgatttttatagaatttttaatagttatagctattataattaagatgaatgcctatattgttgaatataggtgcttaaataataggttgattttcaaggtcggtatttccattaaagaatatttaattatatgtgataaagttgtacttgtacatacaaataaatctgactatgatttagaaatagttttaataacaaatgttgtttttaaaaataagggattgagacctgttgatgatgggtttttaagaagatatccacaaattattgaagattataattctataaaacaattaaattctcagaaagagtattattttcaagtaataaaaagaggtggactaaagaagtatttattattagattcaatatataggaattgcgttaaagctatttacactgatgaaagtatacaaaatataaaaatatcaagaggccagcttatagtttaattaggaatttttttataaacaataagtttagaattaggggaagaaggtaatatgtttgaaaactaaaattagtatgatcaaaaatgttagtgaggatgaagagaaaataagagaagctgctgaatgtataaaaaatggcggtactgtagtttttcctacggagacagtttatggattgggtgcagatgcacttaatgaagaagcggtagaaaaaatatttaaggccaaaggaagaccgcaagataatccactcataattcatgtttcgtcgaagaaacttgatctatatgcaaaagaaataccaaaagtagctgatgaacttataaatagattttggccaggaccactcacaataattttgagtaagaaagatataatacctaatgtaacaagtgctaatttaaactctatcggaataagaatgcctgataatgaagtagctagaaaactaattgaattatctcagacaactatagcagcaccttctgctaatataagtgggagaccgagtccaacagattttcagagatgcatagaggatcttgatgggaaggttgattatattcttggaggagaacagagtgacataggtgttgaatctactatagtggattgcacagtagtaccacctatagttttacgaccaggtggtattacattagagatgcttagagaagttgacccaagaattgaaatagataaagctataatggaaaaaccaagcgaaaacttaaagccaaaggctcctggaatgaagtataagcattatgcaccaaatgctaaagttacaataatttctggggaaagaaaaaaaactattgaaaaaatccgcgaaatggtacactataatatagaaaaaggtaaaaaagtatgtatcctcactgttgaagaaaatgttgatgaatatacagaaggaactagtatagtattgggtagtctaagtgatttatcaacagttgctagaagtttatttgaagcattgagaaagtgtgatgacctaggagcggatttagtttttgcagaaggatatgaagaaaaaggtgtaggggtagctattatgaatagattaaataaagctgctggatttgatatcataaatgtataataattatgcatgttgaaaaatcacaaaataaattaggagatgatttaattatgaaaattgcaattggatgcgatcatggtggatttgaacttaaaaatgaaatcataaagtttttagaaagtgaaaagcatgagattaaggattttggtacatattcaacaggttcttgcgattatccggatattgcattaccagtagcagaagcggttgctgcaaaggaatatgagtttggtatattaatatgtggtacaggaataggaattggtattgcggccaataaggtaccaggaattagagcagcactatgttcagatacatttagtgcccatgcaacaagagaacacaataatgctaatatattaactatgggccaaagagttgttggagcaggtcttgctttagatatagtaaaaacatttatatcagctaaatttgaaggagataggcaccaaaaaagaatagataagatttcagatattgaaaaaaagtatacacattagaaaaaagcagctatgctgcaaccaagatcatttagattagaaaaaagcagctatgctgcaaccaagatcatttagattagaaaaaagcagctatgctgcaaccaagatcatttagattagaaaaaagcagctatgctgcaaccaagatcatttagattagaaaaaagcagctatgctgcaaccaagatcatttagattagaaaaaagcagctatgctgcaaccaagatcatttagattagaaaaaagcagctatgctgcaaccaagatcatttagattagaaaaagcagctatgctgcaacaatattaatttatattattagaaagctaaatggggtatataaatataaagggctataaatactaaaagcaaacttggaggaataataatgagcaaagttatagaaataaatcatccactaatattacataagttggcaatcttaagagatgaaaaaacaggttcaaaggattttagaaaattagtagaagaaatctcaatgttaatggcgtatgaagtcacacgagatttaaatacggaagaagtagaagtgaaaacaccagtagcagttactaaatgtaaaatgctttcaggaaagaaaatggctgtagttcctattttaagagctggtcttggaatggttgatggagtacttaatttaataccagcagctaaggttggacatattggattatatagagatgagaaaacacttcaaccagttgaatatttttgtaaaatgccacaagatattgcagaaagagatattatagtagttgatccaatgcttgctacaggcggatctgcaatagatgctttaactatgttaaaaaatagaggtgcaaaaaatttaaaattaatgtgcttggttggagcaccagaaggtatagaagctattaaaaaagcacatgatgatgttgatatatacttagcatcaattgatgaaaaattaaatgaacatggatatattgttccaggtcttggtgatgctggagatagattatttggcactaagtaattagtgatttattagaattaaaagctatatacataagtttctgaatgacccaagataattttactggggggaatatagaaaatggagagacgagataagaaaaattattacttggatattgctgaaacagttttagagagaggaacttgtctgaggagaaactatggttctataattgttaaaaatgatgaaataatttctactggatacacaggagcacctagaggtagaaaaaattgcatggacttgaatagttgcataagagaaaagttgaaagttccaagaggtactcattatgagttgtgcaggagtgtacatagtgaagctaatgcaataataagcgcttctagaagagatatgattggagctacattatatttggtaggacgagatgcaaaaacaagagaatatgtaagggatgcaaactcttgctccatgtgtaagagattgataattaatgctggaatttctaatgttattataagggattcaaagcaggagtatagagaaataagcgtagattcatggatagaagacgatgactctctaagaatagtaaaagacgcagggtattaattttttagaatttgcatatttgaataaatccaacaagcattgcgagttggatttatttttaaagtataaactttaccagatagatagtatgcgtaatacgcttttttctttaatgaggagataacggctgcacggcgctggataagtttcaactaagattcagatggagactaaactacgcctgaattaagtttaacttgattttaaatatacataaagacagtacttagaaatagaatgagaaaaatctataattgcttaaatataggaggaaataatttgagtacaaagaaaattattacgatttttggaactagacctgaggctataaaaatggcacctttagtaaaggaattagaaagaagagaagagattgaatcgaaagtttgcgtgacagctcaacacagagaaatgttagatcaagttttggaattatttgatataaaacctgattttgatttaaatataatgaagacaaaacagactttaacaggaattacgagtagagttttagaagggttagaggaagtttttaaagaagaaaagccagatatgatattagttcatggagatactacaactacatttgcaggttctttagctgcattctatcagcaaattaaagttgggcatgttgaagcaggtctaaggacttttaataagtattttccttttccagaggaaatgaatagaaaacttacaggaagtctagctgatctacattttgcaccaactaaaggttcgaaggagaacttactaagggaaggaataaatgcgagtgatatatatgttacaggaaatactgtaattgatgctatgaaacatacagttgaagatgattacatctttgaaaacgaagagttaaataatattgattttagtaagaaagtaataatgataactgctcatagaagagaaaactggggagaaggaatccaaaatatatgtatagcattaaacaaaatagttgaacagaatgaagacgtagaattagtgtacttagttcatttgaatcctgtagttaaagatgtagtttatgagagacttggaggaaaagaaagaattcacttgctgtcaccattagatactaaggaaacgcataatttgatgaataaatcgtttatggttatgacagattcagggggattgcaagaggaagcaccacatttagcaaaacctgtacttgtgttgagagacgttactgaaagaccagaagctgtagaggcaggcaccgttaagttggttggaactaatatagatcaaatagtatcagaggcaaacgagttacttagaaaccctgatgcttattgtaaaatgagtaaatctataaatccttatggagatggaattgcatctagaagaatagcagatgctatattaaaatattttggtttgacaacaagagaagtagaagaatttaaaagataaagtttgtttaaattttaacaatttatgcttgataaaagaaataataaaaggtataatttagttatgttaataatttaacgaaagttaataaaataatctataaaattttaggaggtcaaacatgagagaggtagttattgtaagtgcagtaagaacagcattaggtagttttggtggagcattaaaagatgtctcagcagtagatttaggagctttagtaattaaagaagccgtaaatagagctggagtaaaacctgaattaattgaagaagttattatgggtaatgtaattcaagctggtcttggtcaaaataccgcaagacaatcaacaataaaagctggattaccacaagaagtttcagctatgactattaataaggtttgtggatcaggtcttagagcagttagtttagcagcacaaatgattaaagcaggagatgctgatgttgttgttgctggaggtatggaaaatatgtcagctgctccatatgcattggacaaagcaagatggggacaaagaatgggcgatggcaaattagttgatacaatgataaaagacgcattatgggatgcttttaacaactatcatatgggagttacagctgaaaatattgctaaacaatggggattaactagagaagagcaagatgctttctcagcttcatctcaacaaaaagctgaagcagcaatcaagtcaggaagatttaaagatgaaatagttccagttgttattcctcaaagaaagggagaaccaaaagtatttgatacagatgaattcccaagattcggaacaacagcagaaactttagctaaattaaagccagcatttattaaagatggtactgttacagcaggtaatgcatcaggtattaatgatggagcagcagcttttgttgttatgagtgcagaaaaggcagaagaattaggacttaaaccaatggctaaaatactttcttacggttcaaaaggattagatccagctatcatgggatatggaccattccatgcaactaagaaagctttagaaaaagctaacttaacagtagaagacttagatttaatcgaagctaatgaagcttttgctgctcaaagcttagcagttgctaaagatttaaaattcgatatgtcaaaagttaatgtaaatggtggagcaattgctttaggtcatccagttggagcatcaggtgcaagaatattagtaactcttcttcatgaaatggaaaagagagatgctaaaaaaggattagctacactttgtataggtggcggaatgggaacagctcttatcgttgaaagaatttaatataaattaagatttaaaaaggttactatgataattctcatggtaacctttttttattaaataagagtataaaataaagttaaaagaagaaaatagaaatgcatgtattaaattagatagagccagtggaaaatgaaattattatgtatattcattatctgatacaaggggtaaaaatattatcaaaataattactatatataaaccagtggaaaaaatgaaagaatttttaatcatatatttcattaaggtgttttatatacttcataacatagttaatgcgaggatttgctaaaaaataatacatataaatttggtaattgtagattgaaaaaaaataaatattgaataaggattaatttctgtattcaataatatgaaatgtataatagtaagtatagctttataaaacccaaaaatagtataaaattcaccaaatttttgaaaattgatgacaaaatttgtaatgaaaatgttaacaaaaataatattttgtagataaatgttacggaatatttagaaaattgaataaagcaagtttttaaaaatcattaaatgagaaaaatgaagaaataaccaatattagctgagcattcacgagtatatgaaatataaattcattataaagtaaaaataagctgattttactttcaaatagtgttttattaaagataaatataaagatataattactgatattgaggttaagggggttatgtatgaataaagaagtgaataaactgcttctacagacgataaaatatgatttggggagcggattattgatatctttaataatagtcttaatttccacctttataaatgcaggaatctatatgataggcatgtgtgtttcgttaataaattttctagcaagtggttatatagttggaaagtttttggataaaaatagagcatggattataattcctacgtattttattaggatggcattcataattgccacaatatttccttttttgggaaacatggaatacgtaatatattatatgataggttttgtttcacattatgtactacttatagtttttcgtattaaagaaaataggaaaggaagtgtttagagtggagcccgtgatacctatattttcacctgaaatttttggcgttacagtagatattactgcagggataataattgaatggattattatcgcaattttagggataggtgcttttctattaacaaaaaacttgaagttaaaacctggtaagacccaagcggctttggaaaaagtctatcaagcaataagggactttatggttggtactatgggtgaagaatatgaatcatttctgccttatataggaacattaatgatctatttgctaatactaaatctagttggattattaggatttaagccacctacaagtgatttgagcataacagcatccttcgcaataaccacatttttagtagtgaatttaaatgctattagaaagaatggaatacttgggtttggaaagggattgttacatccatttatccctatgctgccattaaacataatagaaagaattattttgccaatgtctttggcgctaagactttttggtaacatggtcgcagcagtaatattattagaattggtgtatcatggattgagttcaatatcaatttttgcacagtttggtatacctgtaatattacacgcatatttcgatttatttgatggattaattcaaatgatagtatttacaatgctaactatgattaatatcaaacaaatagcagaagaataagtttagaaaattattaaaaaattaaaattaattaatatcttaggaggaatcataatgagtttaggagttctagcagctggtatagctgtattatctggtattggagcaggagtaggtattggaattgcagctggtaaggcagttgaagcagtaggaagacaaccagaagcatcaggaagagtaatgacatttttcatattaggtgcagcactttgtgaaactacagcaatatatggattagtaatggcatttatgttaatgaacagataataaatttgtatgagttaattgcattgactccgaagggaggatataagtaaaaatggaagtaaatgtatcaacaattatattcaattggattaattttggtctgataatcttgattttaaaacatttcttttgggataaaatcaaaggaataattgaagaaagacaaaatctcgttaatcaaacgataagtaaagcagatgaagatgctgaaaaagctagaatgtatttggtaaaaaatgaacaaattttacaatcagctaaagaagaagggaagaaaatcactgaagctcaaagagcaaaaggtgataaactttacgaggaaattgttcaaaatgcaaaagttgaagcaaattcaataaaagaaagagctaacttagaaattgaaagagaaaaagaaaaagcagaatatgagattaaaaaacaagcagtagatttagcggtagagctttcagttaaagcattagagcagcaggtagatgaagcaacacatagaaaacttattggcgattttattgctaaggtaggtatgtaagtatgcaggagtatttagaaaaaagatatgcgttagctctgtatgaaattgctgaaaagaacaataaagtggatgaatatttgcgagacttaacagacatatgtgatatatttgatgaaaataaagagttttatgaagtaattaatcatcctaaaataaacacagcaaaaaagaaacagttatttactgatttgtttaaaggaaaaattgatgaagaattactttctttcatgatgatattgattgaaaaggatagaattcttcagttaagagaaatactagatcaaatggaaaagattgatctggaaagaagaaatactataagaggtatagttaaaacagttgtaccacttttagatgaagagttagaacaattaaaagctatctttgaaaaaaaatacgaaaaaaatattttatttgatactaaaatagacaaaagtctcctaggcggagtttatgttaaagttggaaatgatattattgatggaactataaaatcaaaggtagaagaaatgaaagaattaatgcttaagaaagaatagaggtgaatccatgaatattaaaccagaagaaataacttctattataaagaaggaaatagagaaatacgaaaaagatatcaaaacagtagattctggtactataatccaaattggagatggtgtttcaagagtttatggattagataattgtatgcaaggggaattattagaatttcctaacaatgtatatgggatggttttaaatcttgaacaggataatgttggttgtgttcttttaggagaagaaaaaggaataaaagaaggcgatacagttaaaggaacaggaagagttgttgaagttcctgtaggcgaagcaatgattggaagagttgttaatgcattaggagaaccaattgatggtaagggacctataagcacaagccaaactagagcaatcgaaattccagcagcaggtataattgatagaagttctgttaatgagccattacaaactggaattaaagctatagattcaatgattccaataggtagaggacaaagagaacttatcattggagacagacaaacaggtaaaacagctatagctatagatacaatattaaaccaaaagggtaaagatgttatatgtatatatgttgctatcggtcaaaagcaatctacagttgctcatatatttaatacattaactgaaatgggggctatggattatagtatagttgtaagtgctacagcttcagaatcagctccacttcaatatatggctccatattctggatgcactataggagaatattttatgcatcaaggtaaagatgtattaataatatatgatgatctttcaaaacatgcaactgcatatagagcaatgtcattattacttaagagaccaccaggaagagaagcttacccaggagatgttttctatatacattcaagattacttgaaagagctgcgaagctatctaaagaattaggtggtggatcaattacagcacttccaattatagaaactcaagccggagatgttactgcgtacataccaactaatgttatatcaatcactgatggtcaaatattcttagaatctgatttatttaatgcaggacaaagaccagcagtaaatgcaggtatatcagtatcaagagttggtggtagtgcacaaattaaagctatgaaacaggtaagtggtactttaagattggaactagcacaatatagagagctagaagccttttcacaatttggatctgacttagatgccgattctagtagaagacttgaaaaaggtaagagattagttgaagtattaaaacaagatcaatatagtccacttgaagttggaaagcaaatcataatattatatgcagctgttaatgatttcttatcggacattaaagttagcgatataaagagattcgaaaaagaattcttagagtatgttgatactcatcatagagaaattgaaaaatcaattattacaggaaaaactttaactgatgaaataaaatctatgttagaggaagcaatagttgagtttaaaaagatatttttacaagaagcatagcttaaattcttaagctatgcccttcttaggaggtggagataatgggcgcagctggacttcttgaaattaaaaagagaattaaatcagttgaaaatacaagaaaaatcactaatgcaatgggacttgttgccacttctaagttaagaaaaactaaaaatgagttagcagtaaacaataagtttattgatataactgaacctgtcgtaagaaatcttgcaactacagctggtgaagaaggaagcaatgtttattttgaagggaatgatagtcaaaataaactatatgtagtaataacatcagattcaggattgtgcggtgggtttaacagtagtgtagtatctcaattagtaagtcaaattaaagataaaaaggatactgcaaagattgttttagttggaagcaaaggtcttggttatttaaagagaattaagatagaaccagtaggagaatatgttggtattgaagatgtgccaacagtaagcgaagcaaaagaaatatttgataaagctcttgaaatgtatttaaatggtgatgtatcagaggttaatattgtatactctgactttatatcatcagttaaacaagaaacaaagtcagttaagattttgcctataagtaaatctgaaggcacaacaggatcatttcttattgagccggatttagatatagtattagaagatgctcttaatatttatctaaaaggaaaaatcagaagcattttattaagttcgaaatgtagtgaacaaagtacaagaatgacagctatggacggagcaacaaagaatgcagatgatctattagacaaattaaagcttaaatttaatagaattaggcaaggtgcgattacgcaagaaatatctgaaattgttggaggagcagcagctcaaaattagtaaggaggtatcttatgcctggaaagatgggaaaagtagttcaagtaattggaccggtaatagatataaagtttgattcagattctctcccagatttatataatgccattgttattaaggcgggagattatgaattagtagcagaagttgaacaacacgttggagatgatatagttagaacaatagctatgtcagctacagaaggattaaagaggggaatggatgctgttgacacaggagcacctatttctgttccagtaggagaagaagtattaggaagattatttaatgttttaggaaagcctattgataagtgcggggatattgaagtaaaacaagaatatccgattcatagaccagcaccaagctttaaagatcaatcagttgagcctgaaatgtttgaaacaggaatcaaggtagtagacttacttgcaccatatcaaagaggtggtaagataggtctatttggaggagctggagttggtaaaacagttttaatccaagaattaataaacaacatagctaaacaacatggtggtttatcagtatttactggagttggtgaaagatcaagagaaggtaatgacttatatcatgaaatgagagagtcaggagttattgataagacggcattagtatttggacaaatgaatgagccaccgggtgccagaatgagagttgcattaacaggtcttactatggcagagtattttagagataaaggtcaagatgtgttactattcatagataacatattcagatatactcaagcaggttcagaggtttcagcattacttggaagaacaccttcagcggttggatatcagccaacacttgcaactgaaatgggtgcacttcaggaaagaattacatcaacagttaatggttctattacgtcagttcaagctgtatatgttccagccgatgacttaacagacccagctccagcaacaacatttgcacatttagatgcaacaacagttttatctagaggtattgcggaacttggtatatatccagctgttgatccattagaatcaacttcaagaatccttgatccaagaattgttggagaagagcactataaagtagcagctgatgttaaacacgttcttgaaaaatataagcaattacaagatattatcgctatcttaggtgttgacgaattaggagatgaagataaggctgtcgtggctagagcaagaagaattcaaagattcttatctcaaccatttacagttggtgaacaatttacaggattaaaaggtaagtatgttccagtaaaagaaacagtaagaggatttaaagaaattcttgaaggtaaatacgatgaattgccagaatcagctttcttatttgcaggaactatagatgatgttatagaaaaagcaaaaaaattaggataaaggggatgagcaattatggctaatacctttttactaaaaattataacacctggtcgtgaagtgtataatgatcaagtagaaaaagtaactttaaaaagtgcagatggagaatttcaagtacttgcaaatcatcaaagtctaatatctactactataccttgcatcgcgaaattcaaagatgctaagggaaatgatgaagagttatttatttctaagtcacttgttcagattaataataacgaaatggttataagtagtgatgctgctgagtttgaagaagatattgatgaagaaagagcagaacgagcttttagaagagcagaagatagattaaaaaactccgaaaactacaatagaggaagagcagaggcagcattctttagggcaaagcaaagattagctctaaaaaaatctaatagataatgttactataaattaaagtgtaccatcttttatataggaaatatccgtataaagatgctacactttattttttattattttttattctagatattgacaatctatcacaaaattttaagaaatttatattatatattatatagctggatagaaaagagaataaaagttaaaggagatggccataattaagaagataaattaagggggtcttaatatgaatataaaaatgagtatagtaatttttatattattatctttttttaatataggtgctatttccagcgatatagtcagcgctcaaaattcattcaatactttagaaatgaaagtgaaagatataagtgagtttcaagaaaatggtgtaaaacttcagtataggacgaaaaataatatcgcaaatgaagcttatagaataaaagaaaatttacctagaaatatggctctttcttataaagatggtggaaatgatgagtttgaagcgtttaatagtgattttaatattgatataaaaatatggcgtgaagatgtatatagttatgttgaaattatattaacaaacaagaatcctaaatatgggacaaagtatttgaaaaacatacttaagaatattgaaaattcaaaattagaaaatatgcaatattttctttactatgaaggtaaagaaaaaggattagatagtgattattttacaaatggattagtcagtgaatataacataaggaaggcacaacttatgaaaatcagtaatggatactcaggaacaggttatttgaacgatggagaaaaaattaattttgcattagttgattatgatactggttcacatataataattggtacgccaataatatttacaacatattaagacatattgaaaaagcttttcaatataacctttattttgctttgggtagagtatagatttgcttattagcaaagccttattggatttatctaaagtagagtatatgtaatattttggacagttatttttcatatgcttaacaattcattatggaggataatatggagaaaatagtggttaaaggtgtaaaagaactgagaggggaagttaatataagttgtgcaaaaaattcaattttaccaataattgcagcaactatattgtgcccagagcctataattattgataatgcacctaggttagaagatgttgaggttatttgtaagttattaagcgaactaaactgtgacgttaatatttcaaacgtaaacgatagattaacaataaatacgaaaaatatagtagaaatggatgctaatgaagagcttatgaggaaaatgagagcatcatttttaattatgggacctatgcttgctagatttggatattgtaaattatcattaccaggcggatgtaacataggaagtagaccaattgatttgcatcttaaaggatttaaattacttggagcagaggttgtaataggtcatgggtttgtagaggtgagagcaaagaaaatagtgggcaacagaatttaccttgattttccatctgttggcgctactgaaaatattatgatggcatctgtctttgctgaaggaacaactataatagagaatgcagcagaagaaccagagatctgggatttagcgcaattcttaaataagatgggggctaaaatagaaggagcaggatttggaaagataactataactggtgttaaaaatctaaaaggaattagttatacacctatatatgatagaatagaagcagggacatttatgatagcagcagctattacaaatagtaaaataaagataaatggagtgaatgaagagcatttaagacctgtaatagaaaagttaagagaatgtggaataggttttaccaattacaaagatcattccattgtagtagatggacggggaagtaagaggccattggatatcaaaacacttccttatccaggatttccaaccgatatgcaagctcaaatgatgagtttattatctattgttgaaggtgttagtgttattacagaaacagttttcgaaaatagatttatgcatgttgctgaattgcaaaggatgggagccaacatcaagattgatggaagaactgctataattgaaggcaagccaagactcacaggctgcgaagttaaagcaactgatttaagggctggggcagcaatgatactaagtggattagtagcagatggtgaaacagtggtaaatgatgtttatcatattgatagaggatatgtaagaattgaagaaaagtttaggaatttaggagcagaaatatatagaataaatatgtagattaagatatgaattgtgtgtatgcataattagggttcatagttatgaacaaggtatacaaatttttcatgtaagttttataaaggaatttacatgaaatttagttacctatccctaattatgcttttttattctttgggaatttatattttagtaaaatctgtggacgaggtactccttgaggggataaattaaaaaaggttgattaaatagtttgggtattttaaaaagaataaaaaagaaatcttattcgcctgacttttctcacatgcgttcgaaaagctagatgcgtgaaaaaaatctacacatatgaaaagagtgcgaagcacaatacggaacttaaatgaaaagagtgcgaagcacaatacggagcttaaccacagtcgcttgggatttttttatctctaatagcttatatttaagttaaatctatgcgtaagttataggagagactaattaagaaagttatggtttatctaaatttgggtagcttaaagttaacataattaacataattattaggctaagacaatatactttagagtgcaggctttaggaggtagagtatgaagataattaatgctaggactacaagtataaagattagcaataatgtgaaaataattgcagctatgactttgatcatttttactatattaatagcattaccaatagctttcttagaaaatggtaaagggaaaattgattcgtttaacttgagtgacaaagatataatgaagagttcaaaaataacatttccgtctaatggtaaagttaagctatatcataggtcagaagatagagttgaggaaatagatttggaagagtatgtaatgggagtagttgcgagtgaagtaccagctaattttgaggaagaagctttgaaagctcaagctgttgcagcaagaacattttatatgagtaaaagaaataaccctaataaagaagaaaaagagaaaggagctgaaatttgtgatacaacccactgccaagtatatatgagtaaggatgagagaatctctaaatggagtaaaagtgaagctgaaagtaattgggagaagatacaaaaggcagttctagatacaaaagggcaagttcttacttatgacggttcagtgttggaatatcctcaattttttgcaaccagctctggaaaaacagaagatgcaaaagatgtattttctatggatgtaccatatttaaaatcagaagacagtaagggtgaagaaattgcacctaaatataagacgagcacacaaattcctataaacgattttataaataaaattaattctaaatataaaggtgttaatgctaataaaagtaatttgtcatcactaattaagatattaagttttacagaagctggaagtgtaaaagaaataaaaataggcaatgagattgttaaaggaactgaatttaggacattgttcaatttgaattcgaccaatttcacattagactttcaacaagattctgtagaagttaactgcaagggttatggccacggtgtagggatgagccaatggggggctaatgcgatggcaaagagtggatcgaagtatgatgaaattcttaaacattactatagcggagtcgaaatccaagaaataaattacaactaaggagagagtatttacgttaacttagacatagggttggcataacttcatatgaataattgaataaatttaaagaggatacttgtttatttttttatagcaagtatccttttctatttttgactataaattagcatggggtatatcctccaattaattgaatttttgtatatgtatgtttaaaaaaagtggagatggacataatttagaacatcactacttaaaacagaaattataaagtagaacttcttaaattagggcctaaatccctgatggatatatctattgtttaataattaaattatatgtactttttaacactagatatacacttataacaataattttaaaatacctttaaatgtaaataatacatgataaaaaagcaaatttatgtattatttttcataaaaagggaactataacaattggaggtgttcatattggacaaaaatttaaaagaaaaacttaaaaacttatttaggaaggagggattttatatcgccttattcctatgtctctgtattgtagtaactgttggaactatctcttataaaatgctcaacagcaaaaaccaagttaataaaacagaagacgtaaataaagatctaacaatgaattctggaaatgaaggaaattctaataattcagttcaaaatgctgaaagagtagagaatgctcaaaataatagtaataaagacaatgcagataaaacaaaaatagaaaaggctgcatcagtatctacaaataatacggtaacatttgtaaatcctatagatggagtagaaagtagaaaatatacttatcctgcgccagttaagatggaagaaggagttttcagaactattagaggtattaatctacaatcaacagtaggatcagaagtaaaggcagcagcagatggtgttgtggaagttgcagaaaatactggtgttgaagaaggggttgtagtagaaattaaacatgctaatggcctaaagacaagatacggaaatcttgatgcaaacttatcagtaaaaaaaggagataaggttaaagcaaatcaagttattgcaaaagtaggagatagcgcaaaggtatttagtaaagatgtatttggtgaatttttaaatttacaagtaattaatgctaatggagaacaagttaatccagaaaaatattttaatttaaaatctaaataagattttatgaaaatatatattagtcatttgtttttttcattaaaataaatgactaataaatcaaaaaataaatgataataaaatgataaaatcaaggaagtggtattttgaaagactatattgaagaaagagttttagatgttgcaagatatatcatagattcaaaagctacaataagaaaaacagctaaggtttttggtgttagcaagagcacaattcataaagatatgacagagagattgttaaaaattaacccagaaattgctcaagaaactcattctattttagaattaaataaagctgaacgacatattagaggtggaaaagctacacaaatgaagtataaaattattgaatcttagtaggattaagtctataatatattattagtagaattatgtaaatataggtattaatatgtattataggagtgaataaaaaatgtgcttttggagaacggggatagacctcgcaattgacttaggaacggcaactgtactagtttacgtaaaaggtaaaggggtaatattaaaagaaccttctgttgtagccataaataaaaataataataaattgttggctataggggaagaagcaagaaaaatgataggaagaaccccaggaaatattgttgcagtaaggccattaagagatggagtgatttctgattacgatataacacaaaaaatgctaaaggaatttataaaaaaagcgtgcgggaaaagaagtataagtgcacctaaagtaattgtttgtgtaccatctcaagctacagaagtagaaaagagagctgttattgatgcagctatgaattcaggagcaaaaacggtccatttaattgaggagccgctagcagcagccattggagcaggattagatattactaagccgaatggatgtatggtagtggatattggcggaggtacttgtgatatcgctgttatctcattaggtggagtggtagaaagagagtcaataaaagtagcgggagacaagttcgatgaagccataataaaatatgtacgtaatgaatataaattaatgataggtgagaaaacagctgaagatttaaaaataaatattggatcagcatttaaaaactctagaaatctaacttgtatgatgaaaggtagaaacctcattacaggattaccagatgaaatagaaattacaacagaagaaatacgaaatgcaataaaggaacctgtggaaataatagttgatactgtaaaaaaggtattagaaagaacaccgcctgaattagcctcggatataatagaaagaggaatattaatgactggtgggggggctttaatacatgggttagataaacttatagagtttaagactggcgtagtagcaactatagccgagaactcagttgaatgtgttgcgaacggtacaggcaaagtgcttaattatatagataaattagatagtcaagttaattctcagcaaatagttcttatagaatagctttataaatagcagtcattagtaatttcactattgactgctatttatttagttaaatataaaatacctaaattttaggatatttccagtgacttaaactataggcatcaataaatattttggatataattttagccatatccataatgaatgagagtcttatgcttcgcgaaaaaaagaattcagcattatcactagagtccacaatgcctataactgatgcaattcctacctcgggaagttcttttccgactcctttaccaggatgtattgcatagtcccttatacgaatttcaccaatatcatcttcgtcacctaagcaggcatcaacaccaattattgatgcattagggtgattactatatatttcatttaagcgttcatctatgttcaaagcatgaattggagaagataaagttccataaacaggtaaaggaaaaaagttttctgtgagtatagatccaactagaggacctaaacaatccccaatacatttgtcagtaccaatacaaactattatggtgtcttttgatataaattttttaacttctaaagctaaattataataaaatttaggatcaagtttaatatctggcttgctcaagggacatatacctcctttataaaatatatatatgagtaattaacagaagatagtataaaaaaatgttttttggaaattaatagtaaataaggaggtgcatatgaaaaaagttttaatgtatttggttttagttcctacaataataataaacatgtattttctgttatattggcaaccgcaagatgaaaattctgcaaaagaagttgttgtacaagaaactgtttcgtattcgaagccattatataaaataaataaagaaaaagcgttaagtcaattatctacagataataaaaaggaacttgaaaaaataataaaaaaattatctgcatttgatataggtaaaataaaagaatattatgaagatacgaatgataatgaaagcctaatagaaatatttaaaatcttaaaaaggagattaacaacagaagattataagaaaattcaagaaatatcatcttcttttttagatatacaagagattaacaaaagaataaaaaataattaggattaacatattaaatgagagcatattgtagaaatagagagtaatatgaatttaaattatttatatgggtgtatattggagttgaaataaaatcgctttaccgatatactaatcattgttgaccggcaaatgaggcaacaaggtataaaaaataaatatggaggaattcccgagtggccaaagggggcagactgtaaatctgttacgtttcgtttcgatggttcgaatccatcttcctccaccaatttataatgggcgcatagctcagctgggagagcacctgccttacaagcagggggtcacaggttcgagccctgttgtgcccaccattataaattactaatctaatatatatgctggcatggctcaacggtagagcagctgacttgtaatcagcaggttgtaggttcgattcctattgccagctccaataaaataatatggaggaattcccgagtggccaaagggggcagactgtaaatctgttacgtttcgtttcgatggttcgaatccatcttcctccaccaaaaagaataaacttaagtttattcttttttattttttatcttatataaaaattgattgataatattgactaattatacagcatatgataaaatacttttgaaaattgaattatgttactcttatcaagagaggtggagggaaagggccctgtgaaacccggcaacctgtattatataaggtgccaattcctgtagagttttctacaagataagaaaatgattgctaaattgcgctcttcttatcgaagagcttttttatttttttaagtttgcgcatgcttaaattataaaagaaacaattaataaaatagtttgactattatttattgtatttaaataaggtaaagtttttataaacgattattattctataaagctatgtatagtttttaataaaataattttattcgtgaagataattataatatttaaatctaaggagagaaaagatatgagaagattatttacttcagaatcagttacagaaggacatcctgataaaatgtgtgaccaaatttcagatgctatactagacgctattctatctaaagatccaatggctagagttgcttgtgaaacttgcacaacaacaggtatggttatggtaatgggagagataacaacaaattgttatgttgacattcctaaggtagttagagaaacagtaagagaaattggatatgatagagcaaaatttggatttgactgtgatacatgttcagttcttacatcgatagatgaacaatctgcagatatagctatgggagtagatgaagcatttgagtcaaaaaaaggtgaaaaagatgaagttgaagcagttggtgctggagaccaaggaatgatgttcggttttgcaactaatgaaactgaagattttatgccgcttccagtatatatggctcataaattatcaagaagacttacagaggtaagaaagaatggtacattaagttacttaagaccagatggtaaaactcaagtaacagttgaatatgaagataatgtgccaaagagaattgatactatagttatatcaacacaacatgatgagaaggttactttagagcaaattcaggaagaccttaagaagtttgttatagaggctgttgtaccagcagaattattggacagtgagacaagatatttcataaatccaactggaagattcgttgttggaggacctcaaggggattcgggattaacaggtagaaagataatagttgatacttatggtggatatggcagacatggcggcggagctttctcaggtaaagatccaactaaagttgatagatcagctgcatatgctgcaagatgggttgctaagaatttagttgcagctggtgctgcagataagctagaaattcaattagcatatgcaattggtgttgcaaagccagtttcaattgaagttgaaacatttggaacaggaaaagtagatgaagataagattgttgaagtagtagagaaggtatttgatttaagaccaggagctataatcagagatcttgacttaagaagacctatctataagcaaactgctgcatatggacattttggaagaaatgatcttaacttaccatgggaacaactaaataaagtagatgaaataagaaaaaatctatagcataattcttaagtgaatttttattatcaatatatataatagaagtttttgtagaatggtaaaaagtcgtcttaaatctagacggctttttattatggagaaatttataattatatatttgaatagtatatatatagaaatttaatagattgagtgctcaactaagattaaaatttataactttaattgcaaaacagataagcatttaaaagcacttaaaatctgagcactttagaatttattaaatatttatagttttattttgtatactccatttaaaagttattttatgtagggaagaataagaaaagattatgagttataagtgattagttttaaattggtataaatatttatgatataattataagaaaaaatcaaagttaaatttgacgctaaattttaattttagaaagtttaaggtaaatatataaagatttggagagattctatatggaagttctaaatggatttgttgagaatattgtttttaaaagtgaagatactggttatgtagtttgtagaattagaaacgaaaagacattaattagtgctgtaggaacagttcctttcttgagagaaggacaaaatgtaaagttaacaggatactggacagtacacaaacaatttggtaatcaatttaatattcaggattatgaagaacttcttccaaattcattagatggcatagaaaaatatttaagtgcaggaataatacatggaattggaccagtcacggctaagaaaataatagagagatttggtgaagaaactctagacataatggaaaaccatattgagaggcttatggagatagagggtataggggaaaagaaatttcaaataatatatgaatcctatatagagcaacaaggtttaaaagatataatcttatattttcataaacatggagtcactaataatcagtgtgtaaaaatatataagaaatttggtccaaatgcgaggcagatagtatctgataatccatatatattatgcgatgaaatatcaggaattgggtttaaaacagctgacagaattgctatgagcattggcattgaaaagaattcagagtttagaattcaaagtggcattaaatatgttatgaatcaattttgctctgcaggaaacacatttatgcctaaaaataatataatagaagaatgcgaaaataatttgttaatatctaaggaattaattgaaaaaaatatatatgacatggctgcgcaacaaaaaattattgttgaaaacataaacggtactgaagtcggatttttgcttcaatattattattgcgagctaggtgttactagtaaaataataactttaggtttgcagcaaattcagactataaactcggatgttgatttcgaaattaacgtttttgaaaaggaacaaaatataaaatttgcagaatcacaaagagaagcaattattggcgcatttaataatggtatagaaataattaccggtgggccaggaacagggaagactacaattataaaggcaataatacatatatatgagaataatggaatgaaagtaatacttggggcaccaacaggaagagctgcaaagaggatgactgaatcaacagggagagaagctaaaacaatacatagactattagaaatgggaatttctgaggatgatgaatcagtatttgaaaaaggagaatcatcgcctctagattgtgatgtaataataattgatgaggcgtctatgattgacattatcttaatgcagaatctactaaaagcaattaatttaggaactaggttgataattgtgggagatgttgatcaattaccttctgttggaccaggaaatgtgctaaaagatcttatagaaagcgattatataaaggtggtaagattaaaagagatatttaggcaaggatcagaaagtttaattgtagtaaatgctcatagaataaatgagggacagatgcctttgctaaatcaaaaagatagagattttttctttattagcgaagataatcaagaaagaattgcaaatactataatggatctaataaatagaagactccctaagtttaataagtcttggaataaactgaaggatatgcaggttttaactcctatgagaaaaggtgtgcttggagtcacaaatttaaatacgaagcttcaagaaatgtttaatgcatcatcaaaagataaaaaggaaaagacttctcgagatataattttcagagaaggtgataaggtaatgcaaacaaaaaacaattatacattaaagtggattagggttagtggttatggcgaaaatgaaggagtgggagtttttaatggtgatctgggattcatagaaagcatcgatgaagaaagaaaaacacttacaatcatatttgatgaagaaagaaaagttatatatgattttaattttttagatgagttggatttggcttatgctactacaatacataaaagccaaggaagtgaatttaaggttgtaataattccggtatttatgggatcgccatttcttatgaatcgtaatttgctttatacaggtattacgagggcaaaacaattagtagtagttgttgggtttcaaaaagcattaatgtatatgattaataatacaaatagtatagaaagatactcatctttgagatatagaataagagagataataaccaaagatgaattcgaagaataagggaaaggagataggtgtatgaggaatttatgtaaagtaactttagaagatttaaagtatgcatttgataagatagattattggtataagaaaaatatcaaatttttaacagtaataacagttccatttaatacatcgtgtgttttttcaaagataataagtaaagtttcacaaaataatgggagggtcttatatgtatggggaaaagaaggtgaaaacaaagaattagtaaatataacaagagaaatgtattctgatataactcattcgtatattgtaaaagaaatttcaaatgctaaacttacttttacgcactacaataacttaatgaagattaagcagaactatgatttggttatttttgatgatataacatacttctccaatctaagtaatgtaaatataagagagatgttagaaatgtgttcaaatataggagaaagagttttgctatatagcatagaaaagacgactttagtaggcgaaaagttcgaacttgcagcatataattataaaaaaccgtttgtggagcctagggtattaactacacgaatagatttgaattcagatattccattttctctatatgactatcttaaatggttcagggaaaatagccataaggtggctatttatgtacccaataaagagaagcttgacatagtatatgattatttttgtaataaactaaaactttcaaatgtaaaagtaataaaagtttcaggaaatgatgatataaaaaagagtgaaaaagtatcaaaatacaaggataaggcaatatttataataactaataaaatagaggagttacttgaatattgctatatggatgatgcagtagtactttttgctgataatgaaagatatacttataaaaagcttttgtatatatgtggacaaataagaaatgtaaatctaaaattaccagaggttcttttggtatcaaacgatatatcagaagatattgagaaggcaaagaatatggcaagagatttcaataaaaaggtatgggaaaagcgtttaatagaattataaaaagtatattagaaggattaattgaagtaatatatccaagagaaaattattgcattatatgtaaagaagataactgctttggtatatgcgagcattgtatgaaaagtataaaaacaatagcagattcgtatcaagatgaaataataagttatgggtattatggaggagtattaaaagatttaatacttaaatttaaatataaaagcaattttacagcaggagatatattagcagaatttttagaagaatatattataagaaacttgaaatatcaggagtatgtaataacctatataccactatcaaaaaaatctaaaaagattaggggatttaatcagtgtgagtatatagcaaagaaaatagctaatgatttatcaattgaagctctagaagttttgataaaggataaagaaaccaaagaacagaaaaaattaaagaaggatgaaagatatgaaaatataaaagatgctttcaaaataaaaaagggattagaaattggaaaatataatattatactggtagatgatgtaacaactacaggtgcaactcttaaagaagcttataaattattaagaaaatatcaagtaaaagacataaaactcttgaccttagctaaaagtcatatataatattaatgtaaagctaggtttgtggttgaaagtcgaagctagtcgcaggcaaaacgatccacgtaatttagacaaaatgtctaaggagcatggtgcggtatagaagtaagtcctgccagattgtattctgagagggttagtagtgagggattaaattctattagcaaaagctccagcaggcgagtgtggggtcaaaaaccaggtcaactagctttacctctatttattttaaaattatcattaataggaaatgtgaggaatctaatctaaagtttgcgattagatttattttttgtctttagttttcagaatttactgataattctcttgttaagttaataaaaaagtgataaaatattaataacttaaagatattaagtttaaaaactttttcatatgagaggggctggaatttatgaaagtcacagttatagcaaaaaatatggaactaacagatgcgctaaaagaaatagtgcaaaaaaagataagcaaattggaaaagtattttgaagtgaatgtagaagctaaggctacactaagtgttcaaaaaaatagacataaaatagaagttatgattccttttaatggagtagtattaagaggcgaagaatcaacttctgatatgtataaatctcttgacttagtggaagataaattagaaagacaaattagaaaacaaaaaactagattatctagaaaacatagtgggtcattgagatttggagaaataaataatatagatattaagccatcagaagaggacgatggtaaattggttaaggtaaagaaatttggggtaaaaccaatgaattctgaagaggcaattcttcaaatggatttattaggacataatttctttgtatatcaagatgcagatagtagtaaagtaaatgtaatttataagagaaaagatggggattatggtttgttagaaccagaattcatataacatataagagattttaataatggctgtccaatgtgcttatttaatttgcatcattggacagttatttttcatatcaaatgattgaacagataatgacaatatttttacataaaattttcaattaatattaataatttgtgattaaaatattaaaaaaaagttaaaattgggtgctttatataggatttaatacaaaaatcatgagttttattgaaaataagataagtaaaatgttataattataaaatacgtgatttataaaataaattacagattatgaattatggatagttaaaatatattggaaattaacgtgaaatatataatttcgaaaggatgacattatgggactattaaatgccgtatttggaacatatagtgaaagagaagttaaaaggctcaaacctactatacaaaaaataaatgatctagatgaagagctgcaaaagctttctgatgaggagttaaaggcaaaaactccagcatttaaagaaagattagcaaatggtgaaacattagatgatattttaccagaagcattcgcagttgtaagagaagcttcaaaaagagttttaggaatgaagcactatgatgaacaacttatgggtggtatgatacttcatcaaggtagaatatcagaaatgaaaacaggtgaaggtaaaactctagttgctactttaccagcgtacttaaatgggttaagtggaaatggtgttcacatagtaacagttaacgactatcttgcaaaaagagatgctgagcagatgggtgagttatatggtttcttaggattaactacaggtgttattgtacatgaattaaataatgatcaaagaagagaatcatatgcgtcagatatcacttatggaactaataatgaatttggatttgactacttaagagataacatggttatttacaaagaggaaagagttcaaagaccattaaattttgctgtagtcgatgaagttgactcaatattaatagatgaagctagaactccgcttataatttcaggtcaaggtgaaaaatctactgaattttataaagttgcagactattttgcaaagaagttagttgcagagaaagattttactagagatgaaaaagcaaatgcagtaatgttaactgatgaaggtgttagaaaagcagaagtaacatttaaagtagccaattatgcagatgctgaaaatattgaattacaacactatgtaactcaagcgttaaaagcaaactttgctatgagaagagacaaagattacatggttaaagatggcgaagtaataattgttgatgaatttacaggaagacttatggagggaagaaggtattcagatggtcttcatcaagcgatagaagctaaagaaggagttaaaatcgctagagaatcaaaaactttggctactataacattccaaaactattttagaatgtataaaaagctatcaggtatgactggtactgcattaacagaagaaaatgaatttagagaaatttacgggttagatgttattgtcataccaacacatagaccaatagcaagaaaagataatccagacttagtatttagcacagagcttggaaaaataaaggcagttgcttcagaggttgaaaaagctcatgctaaagggcaaccagtgttagttggtacagtaagtattgaaaagtctgaacttgtatcaagtatgcttaagaaaaaaggagtaccacatcaagtattaaatgctaaattccatgaacaagaagctgaaataataagtcatgctggtgaaaagggtatggttaccatagctactaatatggcaggtagaggtactgatatcaagcttggcgaaggtgtagttgaacttggtggtcttaaaataataggtactgaaagacatgaatcaagaagaatagataaccagttaagaggacgttcaggaagacaaggagatccaggtgaatcaacattctttatttccttagaagatgatctaatgagaatattcggatcagaaaaaattcaaggtgttgttgaaaaattaggacttcaagaagaagaagcaattgaaagcaaaatggtttcaaaagctattgagaatgctcaaaagaaggttgaaggtaataacttcgatattagaaaacaattattgggttatgacgatgtaatgaatatccaaagagaagttatctacaaacaaagatcagaagttcttgaaggcgaagatgtaaaagaagaaatattatcaatgacaaaggatattattgctgatgctgttaatacttatgttacaggtgaatcagaagattatagagaagaattcttgcatctaatggttgctttacaagatatatgtatagcgccaggtacagttaatttacctagtcttgaaaatctgtcaaatgaggaaataatcgaaagcttatttgaatcagcacgtaagttctatgaacaaaaggaagaagagtttggtgcagaaagattaagagaagttgaaagagttgttcttttaagagctgttgatactaaatggatgaatcatatagataatatggatcatttaaaacaaggtatagggcttcaatcattcaaacaaattgatccagttcaagcgtaccaaatggaaggtagcgaaatgtttaatgatatgattaaagcaatcaaagaagaaacagttagactattattccatgttagaatagaagttgcaccagaaagagtaagggttgctcaagaaactgcagcaattcatgaggaatcttcaagtgctgctgctccagggccaggacaaaatcaaccaggtggacctagtgcagggccagtagctccagttagaaatctagataagcatggaagaaatgaattgtgcccttgtggtagcggtaagaaatttaaaaattgttgtggaagagaagcataaacaagtttgaaactttgtaataagctctaaagagtttgaaaaatgataaatatgatataataaattccgtagaggtttgaagaattgttatttagaattaaatacagttttaagaaggcttctgcggaattcttattaatactggattttttgaaagaggtgaataatagatgataattgaacttgaaaaggaattggttaaacttccaggtataaaaaaatctatagaagaaatgggggcttcactttgaccgagataggttagaaaaggagctcaatgagttagaatatcaaatgcaagaagcaggtttctgggatgatataaaaagggcagaagaagttacaaaaaagagtaaattgataaaagataaaattgaaaatttcgataagctgaagtctcagattgaagatatagaagtactaaaagaaatcatggaagatgatgatgaagaatctgctaatgaaataatacaaactttaagagatatacaagaacagattgatgactataatatgaaagtactactatgcggagaatatgataaaaacaatgccattttgacgcttcatgttggtgttggaggtactgatgctaacgattggacagaaatgcttttaagaatgtatacaagatggtgtgaaaaacaaggctatagtattgaaactctagatttgcttcctggagatgaagctggaattaaaagcgttactttaaaagttactggggaatatgcatatggttacttaaaagcggagaaaggtattcacaggctggttagaatatccccatataacgccaatggtaaaagacaaacatcatttgcatctatggaagttcttccggaacttacaaaggaacaagatatagagataagatctgatgatttaaagatagatacttatagatcaggaggagccggaggccagcatgttaataaaacggactcagcagttaggataactcatattccaactggaatagttgtacagtgccaaaatgaaagaagtcaattttctaacagggatacagctatggaaatgttgaagtctaaactagtcgagctgaaagaaagagcacataaagaaaaaattgaggatttaaccggagaattaaaagatatgggatggggaagtcaaataagatcatacgtatttcatccatacagtatggtcaaagatcatagaactaatgtcgaaacatcaaatgttacatcagtaatggatggtgagatcgatatgtttataaatgcatatctaaagcaacaataaaagaatatatattctcttaatgaaaaaggcttctatcaaatgattttatgatagaagtctttttgttaagagaaattctaaaagtaaagtttatataaaataaatagtaaaaataaactggcatatctgtatagctaagcagctttatagaatatatcgattaaagaatagacggcaataagaattatgcacacatatagggaaatattaagtccaggttttagtatagacatgattcccccaactaccaatgctgtcattattactacactaacaaatttaaaaaagcctgatttgtttgttagaagagttgtaacagacgaaaacataatcaaaattaatactagaaagtaaaatatattttttaagttaactgagtaactcattatttgaaattcgtttaaagcaagtattgagagtaaaaataataatgagaaagagcaaattctactaatatttttaaccataaacccatcacctctggtaattatttacataataattataccgttagatctttattcaatcaataacaaatttatataaaataagtattcttatatgattggcatataatatcagaattaataattgaaattaattcctaaaatggtatataaatatgataaaatatattcatattagtggaggagttgaatttatgaatattctaatagttgaggatgaaagggatattagaaatcttatttcattgcatatgagaaaggaagactatgaagtttatgaagcttccgatggacgagaagctttaaatatatttgaaaataaaaaaatagatttaattttattagatataatgatgccaaatgttgatgggatttcagtgatacaaaaggtacgagccatctctactattcctataatctgtattacagcgatggggaatgattctgataaagttttggctttaggacttggagctgacgattatttagtaaagcctataagtccgatagagttatctgcaagagtggcatctaatctcagaagatgctacaaatatgctgagcataaggatgtaatttattcgacaggagagttaaagctatttactgagacttttgaagtttataaggggaacagaaagattgatctaaatccaaaggaattcaagattttaaagttattaatttcaaatttagggaaagtatttactaagaaacaaatatatgaagaagtatgggaggaagcttatttcggagactctaataatataatggttcatttaagtcatattagagagaaaatagaagatgatcctaagaatccaatctacataaaaaccataagagggataggttataaaattgagagggttgcaatgcatgaaagctaaaagaataaaaaggagtgttacaacagagttattttttatatattttttgggatatatagctataaacataatactattaatagcgattattggctcaattgttgtttatggaactttatgcggacctaatacatataattcttattttggagggctacaaaataagcttgtaaaagattatacgagtataactgatggggatttgtctgatatagatggttttatggtaaaaataaataatgataataaagttctttacatgaggggacatgttatcgaggaatttaaaaatataaatttgcaaagctatatgtatttatttggattaacaaaggataatgaagaatcactaaatgatgatattagaacaatgtttgcattatcagatttcaataattcaataattgaaacaaaagataatgttaaatattcactatatagcaagtatctaaaagaagaagattctttagtggtagttggattcccgtattcagagattacaaagccgaatagaatcaccaaagtaattcctcataatctaataataaaaataatgggtgcgttcaatgttctattaattctctcaatagtgtatattttagctaaagcaacttctagcgcatttataaaaccaataaagacattattggctggagtaatagagatatctcatggcaattataatatacgtttagatatagataaaaagaatgaatttcttgaattagcaaatggatttaatatgatggcaggaactatacaaaatgaaaaaagtcaaaatgaaaaattacagaagataaaagaggatttaatattagatatatcgcatgatttaaaaaaccctctttcatcgattttaggatatagtgagattttaattaataataatgatttagatgaaaaggaaaagttagaatacttaaacataataaataagaattcacaaagagcaaataaattaataacagacctgtttgaattttcattatatgataattctgattataaaatgattacagtaaaagcagatatagctgaatttgttaggcaaataatagcaaactatattctagaatttgatcataaaaaattcgaatatgattttgaaataattgaagagccctattatgtaatgataaatgaagaaaagttatctagagctataaataatgttttagacaataaagttaaatacaatcctgtaggaagtagaataggagtaaagacagaagtgagagagaattatttctacattatattatcagataacggcgaatgtattcctcaaaaatacagagaaaatatatttaacccatttgttagagttgataaatcaagaaactcaaaaactggaggaacaggacttggattatctatcacaaagaaaatattaaataaacataatggtgatattagaattatagatagtggaatagggacaacttttgagatcatgttgccacttgttgtgtttaagaataaaatctaaatttaaagcttggattagcaatttattttttaggttaatttaatattgttgtaagcatcttttaataaaatgcatttatactaagtatagtggaggaggagtttgagcaggcattatacattattcttagtatagtttattaaaagtaactttagcttaatgctttaatatcatgtataagaaagagaaggaaaatttatggacaacgataaaaatgaattagaaaatattgattcaaacatagattatgataatttgaaagaagaaactgataccattaatacggaagaacactttgaggaaaatggtttagttgcaaaattaaaagataaaaaaggaattttaggagtagtaggagcttttctattagtacttttgaaatttaaagctattttatttttagtgctaggaaaattaaaattcttaataatattattaaagcttggtaaatttgcatctacctttatatctatgatactaatgatcgtcatatacgctaagatgtatggagtggcatttggagttggctttgtattactgcttttgattcatgaaatgggacattatcttacggctaaattaattaaattggatgtaagccttccagttttcattccttttgtaggtgcttttattagcatgaaagaagaacctaaagatgcagcaacagaagcgaaagttgctataggagggcctgtgttaggaagtataggtgcactaatttgtttgttgttttactttatatctggagaagactttttggcagcactagcctatgtaggttttatgttaaatctatttaatcttatacctgttcatccacttgatggtggaagagtggtttcggctatatcaccaaagttatggctcataggaataccaattggtataattgctctcttcaaggctttcaatccaattattgtattattacttatacttggaattgcaaaagttattgaacaatatagaaattcagataaatcgtattatgaagtaaagacatctattaggtgtatgtttgcattaagttatttcggattaatgttacttttgggacttggaataacatatatccatgggattcattcttctgtaattattcaataaaaattggaggggtaaatatgtattttaatataccaggaacaaaagatattcttattaaaaacttgacaggtgaagacttaaaggatatatatttaagctttgagggaatagaaaaacatccattaaaaatatcgaatataagaaaggatgggcaagtagttaagactttagttttaagttatttgaatggagtaacagagcttaaactctgctattataacgatgggcaaaaacaagaaatcgtagtatataatgaattgagcaaaaaagatttaagaaaattaattcttgagattagtaaggaaaatgggaaactgaaagtgaggacaactgtagaagaaaaatatatataattattgctttcaattaaaataagtttataatattaatagtgatataggattattgccattactaaaaatagtaatggcaataatgatttatatggtaaaatagtattgttgtggcaatgactatttaggtaatttaatataagcaggaggaaattatgaattcaattgaagaaagaatcgcaaaagaattagaaataaagttaagtcaggttcaaaatgttattggacttttagatgatggaaatacagttccatttatttcaagatatagaaaagaagcaacaggaggactttcagatgaagtcttaagaaaattatctgaaagacttacgtatctaagaaatttagaggaaagaaaagctgatgttacaaggcttatacaagaacaagaaaaatatactgatgaaataggaaaagctttagagaatgcaacgaccttaacagaagttgaagatatatatagaccttttaaacctaaaaagagaacaaaagcaacaatagcagtagaaaagggattaaagcctcttgcagaactaattttggaaggaaaattaagtggggacctagatgaagaggcagctaagtatataagtgaagaaaagggagttacaaatagtcaagaagctatccaaggagctttagatataatagctgaaagcatttctgatgaagctaagtacagaaagtatataagagaatttgttattagagaaggtaatatagaatcaaagggaagttcagatgaaccaactccatatgaaatgtattatgaatattctgaagcagtaaataagataccacctcatagaatattagctataaacagaggagaaaaagaaaaaatcctaaatgttaagataactgttaatgaagataagataattcaatacttagaaaatcaagtattaaaaggcaatgaaactttagatgaaaaattaaaacttgcaattagagattcgttaaaaagattaatttatccatccatagaaagagaaataagaagtgaattaactgatatgggtgaagaaggtgctattaagatatttaaagaaaacttgaaagcattgttattacaagcgcctattaaaggaaaagtagtaatgggatatgatccaggatttagaactggctgtaaaatagcgattctagatgcaacaggaaagtttttagaaaatacagcagtatatcctacagtgcctaaaagagatatcgaaggaacaaagagaactttaaaagctcttattgctaaacataatgttgatgttatatcccttggaaatggtacagcatcaagagaatcagaagaagttattgcagaaatgattacggaaataaaaaatgaaactggaaaagaattagcatatgtaatagtatctgaagcaggagcgtcagtttattcagcatcagaacttgcaactaaggaatatccagatttagatgttacagtaagaggagcaatttcaataggaagaaggttgcaagatccacttgcggaactagttaagatagatcctaaggctataggagtaggacaatatcagcatgatgtcactcctaaaaagttagaagaatccttagcaggtgtagtagaagactcagttaacactgttggagttgacttaaatatagcaacaccatcgcttttaacacatatttccggaataaatgcatctatcgctaaaaatattgttgactatagagaagaagtaggaagattcacttcaagaaaagaactattaaaagttaagagattaggtcaaaaggcttatgagcaatgtgctggatttttaagagttgatgatagcaaagaacctttggataatacatctgtgcatccagagtcttatgctatagctaagaagttaatagaattacttggttacaataaagaagaccttaagaataataaattaggtgacattgatgaaagagctcaatctcaaggattaaaaaaattaagtgaaacattagaagttggagagatgactctaaaggatataataaaagaattaaagaagccaggcagagatcctagagaagaaatgccaaagccaatactaaaaacgggaataatagaacttaaggacttaaaacctggtatggttttagctggaactgttaggaatgtatctgattttggagcatttgtagatataggagtgcatcaagatggattagttcacaaaagtcaaatggcaaatagatttgtaaagcatcctttagatatagttaaagttggagatatagtaaaggtagcgatattggaagttgatgaaaagagaaagagaatatcattaactatgaaagatattgatgaatcagcagaagtatagctaacataataaattaaatttaaaggggctgttgcaaaactaacatagttagttttgtagcggctcatttttttagatataaaaaatgtgaattccgaagaactcacattcattgtataatttacttatgctaaaaaccaaattacac

SEQ ID NO: 42 - DNA, 46468 bp, Clostridium beijerinckii
attagaaattgttaataaaaaataactagcagattaaattctactagttattttttctatatgcacacgtaaatatttactattaataagttgtttatattaaaaatataattttatcgcctcaatttatcttcgcaaatatctctgttagaagatggaggagttacacgaacatatgcatattcaggagctttataccctggaccatatatcaaaaattcgataattttcttagcaaaagccttagagagtatttttttcatttaacatcactccttacctatatgttatattaattatattggaatattcggaaaattgcaacattttattaataaataataattattatccagtataatacattttttttgtagaataaaaaagcataatagttttttgttccactcttattataaatctatgttgtataggttagatttattaattttttcctatagtaaattttatttatgccactagatgataaatagcgagtataattccaatgatgatttattaaaagaagaaattagaaagttacataagaatttaacttctattatttcccttcatatccatagtaaatcaattgattgaaaatgacattaattgtataattttagatgagttgatttgaagcggattaaaaaataagtaagcacttaatgaaaattaaaaggagaatgatccatgtgaatattagaaagaaacttacttcatttatacttgttttattaactagtataagttttggacaagtgataaatgtacaagctacaactactgattcaactgtagtatctagcaatactgttagcaatatatcagatgaaattcctaatccaggtatacctgaaaataagccaagtgaattaaatgttatttataaatatagtacccaagatattgtaaatagtagtgatggaaaagttaacataacatcaactattgggtggaaaaaagagaatggatactggtattactataaatcagataatacaagagcaactgggtggataaaaccagataacaagtggtatcatttaaaatacgatggaagaatggtaactggatggtttaatgtcaatggcatatggtattatttagatcaatcaggcagtatggttactggttggaggaaattagataacgtttggtatttcttaaacggttcaggggccatggtaacaggactaaataaaattgataataaaatttacatgttttatagtagtggtgaaatggctacaggatggtataaatcaggtgataattggtattactctagcagtagtggaagcatggcaactggatggattaaagataatggaacttggtattatttatatgatactggtgcaatggctaaaggatgggttaatattgatgaaaagtggtattatttaaaatctagtggagcaatgtcaacaggatggataaattctggaagtgatacttattatttagataaatcatctggagctttagttacaaattctacaatagatggctataaaatcggttctgatggcaagaagatagggccaggaaatccagtcaataataattctgatactttattaaaaggtatagatattagtcactacaatggggacatagattttaaaagagtcaaagcttcagggatccaatgtgtatacataaaagctacagaagggacaacctatgtggataattatttgggaattagttatagtggtgctcaaaatgctggattaaatacaggtttttatcattttttagttgggacaagctctcctgaaacacaagcacgtaatttttacaataacataaaggataagcagaatgacctaaaacctgctttggatatagaacaagatggatttgatgtcatgggttatgcattaaggttcatagatgaattcaaaaaattaagtaatatggacatttgtatatatacatattcagattttataaaaaataatttagatagtagattatctaaatatacattatgggaagcaaattattataagagtccatttaacttaccagctaatagtgtatggaattctagagcaggacatcaatatacagataaaggtgttatcgatggaatctatggagatgtagacttagatgaatttacacaagatattcttagcaattaaatgtttcacccaaaaagcaagcaaagcagcttaaaagaaaagctatccttaaaggatggcttttttatatgcctcaaaacgaaaaaattatttattataatcaattaatattattgcaatagaatttttttattaattaacaaaggaatttactgaaagttttcaccataatattgtaacttttttgtaacgcttttagtttaaaaatcttttatactttagatagagataaccacactaagacctgaacttatgcatataacttgccgaaatgaataacatacttttgttccagtttctgggtaattttcatgggggattctaaggctataaagttgcaaccaaagtgctagcctcaaagaacaagcgctcacagagaaagttcgaagaacgaaatataaaatttcgattctcactttttgaactagcacatttggaacaacttatagccaagaatcacatccatcaaaattaccaatgaaacattccacaaaagtatattacttatttctagttggaatatatttcatagtttaagtatagtttatgattgcgttatctataggataaaaaaatactaaagtatatatattttgaacttctaagtagattaattatatacaaaaaaataataaaaattggttaggagaataattatgataaataaaattcaaaagagatttaaattgttgttttcagcagctataatatgtgctatcactataagttctgcaagcatagtggggtgtagtcctaaaaagtcatctgaaataaatgctgaaaataaagaagtgtcagttgagaaagtttcagaaaatagtaatcaagcagaagctgaaaaaatatcagaagaagtagtcagcattgaaaaatctgctaataatgaggataataaagaaatagtagcttcacaagtaaaaaagaaaaatgattcagtaaaaataattgaagatagcaagtctatggatgcctcaaagtcggataatggaaagaataattttacagaatatatgaatatattaggttttagtaaagatgaacttataagtacattaaatgaaaagccaagttctataggagaaggtggagtggaatttaaaaaagctggtattagagtttggtttgatcagaaaaataatgataaggcagagcaaatctttactatgagaaatgatttgaatttaaatggtgtaaagattggtgataagataagtagatttaaagaagtttttggaaatccagttagtgataaaagtggagatgcacattttaagtataaaaatatatttttgtctgtaaattatgatgcaaacacaggacaaacctatgcaatatatattttaaagaatgatttttagtaaattaaaaactactttcttattttaaaattataggatgatagctaaaagccaagcattgaagcacaggcatttagtgaaaatataataaaaacgtatagttaacataagagctaaaaattatggatatgaagtaattatatatcatggataaggtaatactaaataataacagaatgaaaaatggggtgtatatgttatgagaaaatatgcaagagttataatactgattatttctttaggaagtattataacaggctgtgggaatgttgtaaacacaactagcttaattcaagcccctatgctcgaaaatgtagaagaaaataaaattaataaagagctaaaagaaattttaacgcctggcagtgaattcttagtacctaagaattcacaagaaaaacaaagtatttttatagatgatgttgataaagacggtaaaaatgaagcatttgtattatataggaatatgaaagaaaatagacaagttcatctattaatgcttaaagaagaaaatgaaaaatggaataaagtacttgatgtagccactaattttaatattcttgattattttactcttaaagatcttgatggggatgggaaaaaagaagtgattttaggtacttcagtatcagattctgaactaagtaaacagttatttatatatgaattgaatggaaaagaattagttaataaagttaatcgtacttacgaatggatagatatatctgattacaatgaagataatagacctgatgttataataattgatggagaaataggtaaatcaaaaatagcagaaatgtttaattatgaaaataatcaattaaaatctcgcacgtttgtgggtctaaatcctgagggtgtaattgaaaatgtcgttagtggaaaattagcagatgggaataatgcgttattcattgatagtgcattaggggcccattcaatgttaactgaaattgttacttgcgataagggaagatttattaaaattggagatgaaaatgatggtattttatttaaggcttacccattatatagtagagatatcaacaatgacggtattatagatgttggaggaatgtatattcctaaaggttttgaagatgcagcgatggcagaaatcccttttatttatacttactctgattataaagaagatggaacacatgaaattgtagaagaaagatatacagatagtgtacagcatttttatattacaatttattccaaatggcatggtaaagttacaattcagaagcttgatcaaggtgttagacttatagataatgaaagtcaggataatttatttgaagtaaaatggataagcaaaagttcatatggtgagaacaaaaccaagcttggagaaacgaaggatattatattttatgatgatattaaagaagaacaacctatttcaaaggaaaattttcatttacttaaagatgaattttaatggaggaaaatatggaaacaattcttgttgttgaggatgaactgtcaattagaagttttatctgcctaaatttaagaaagaaaaagtacgaagttctagaagctgagaatggagaagaggccttatctatttttaataatagaaagattgatattgtcttattagatttaatgctcccaggaattgatggatttgaggtgtgtcagaaaattagagatataagtcaatctgttgggattatcatgttaacggcacgatctcaggaagaagatagagtaaaaggtcttgtagaaggagctgacgattatttactaaagccatttagcatggttgagctagaggcaagaattatttctttagcgcgaaggttgaatcatgtatattcaaagaaagaaagttcagttattaaatcaggaccatttgagcttgatgtaataaataaaaaagtatctcgctttggaaaggatatcaaagtaactccaacagaatattgtttgattcaatttttaataaataataagaataaggtatttacacgaaatgatattttggatgaagtttggggaataaattatattggtgatgaaaaagttgtcgatgtaaatataagacgtatacgaaggaaaatagagaatgatccatcagctccagagtatttatgcacggattggggatatgggtacttatggaaggagtaaaactatgaagcgaaggatcattgtttactttatgatcattagtttacttacattaagtcttgttatgatagtatttggaattggaataaggcaatattattaccaagggattgttaatacatttcaaagtcaagtagaggtaaatccttctgtgctagcaagagaaactaattttactaataaaagcttggcggaattcagtgatgaaattattaaaaattatcagattaatggatctgaactacaactattaaaaagaaatgggaaattaattcaatcatctacaggtttttatgaagataaaacttatttgatagattctgatgtattggatttgaaaaccacatataaaattgagaaaaattcatattcaggtcaaaagattatggcagtatatacacctcttgtttttgacgggcaagtattagggattttgcggtatacaacatccttaacacaagtaaatgctttaattattaatctgttgatttatgggattatcatctgcatttttattgctgttatcgtgttttttgtaagtttgcgtttagggaatataattgtagaaccattaaatgatattatcaattttacaaagaaaatagcagagggaaaatacaaggaaaaaatcaaagatacttatccaaatgaacttggagaaatagcaaaaacacttaactacatgggcgatgaaatattaaaagctgatcgtttaaagaatgattttatatcatcaatttctcatgaacttaggacgcctttgacagggattaagggatggattgaaactatgcggaatccagacgaattatcggctgaggagtttaaatttggtttgggaattattaatgatgaatcagatcgacttattagcctggtggagaatcttttagatttttcaagatatcagtcagatcgaattaaactaatcttatctgatatcaagatagacaaaattattcgtgaagtaaccttccagcttcaaaagaaagcagaaaaaaaggaaattaaattagtggttgaaacgcacccagcaattattacagcagatggtgatagattgaggcaagttatactaaatgtattagataacgcaattaagttctcatataaaaatcgtaaaatctatgttattcaatcagttagcgaagagtacattttaattaaaattagcgatacaggtattggaattaaaaaagaggatataaatcatgttatggagtcattctataaaattgatcctaaatctattggcgcaggacttggattggttatttctagcaatattgtagatatgcataatggcattcttaaaattgatagtgaatatgggaagggaacaacagtgacaatttcacttccgttagcaaaagtttaaattctacgtaaattattagattaaattaataattattagctgaaattttaggtaatatataaaatttcagctttaattttgttataatgatttatacagtggtaagttttatgatataaaagaaaaatataaagtagttattactaaaataactaataaatttgaatttactatacttatgataaaatatatgtttcaacaataaatctatacttaaagctttagtaagtcagacactcaattaaggatagatgtagaaacttaattgtgacataaatatatttataatgagatatttgttttaaggagtaatttttatgaaaatgatactttttacactagaaataatagatgaagaaaataataactataaaattaaagtcagtaatggtactgagaactccttagtagaatttaatcctttaaaaaaagaattacattttatagataataacaacctaagtgatttctttaaaggacaggaataccaatttagaaaaatgcttcataataagtgaccagatacatactatgtagggtttaatgtaaaagtagtcataagagaagataaagatgtagctgcttttaatgatagaagtaaaatcttagttttagataaacgaaatagtaattatgatagttatgcaatagaggaaagtaaggctgaagagaaaatctataaaatctacacagatgccagttattttgagaagaaaaatcatggtggatttgcttttataatagaagatttgaaaggaaattataatttatatacagaaaaagtgaaagacataggaagcagccaagctgaacttgaagcagccataaaagcacttgaattattaaaagatgttgaaaaaataagaataataactgatagccagtatgttagaaaaggactcacagaatggttacctatatggaaattgaatgactttaaaactattaatggagaaccagctaagaatatagaaaagtggcttgattttgataaagcttgtaatggaaaatatattgaatttcagtgggtaaaagcacattctaaccattttgagaattctctctgcgacatgtatgccaaagatatagctaataaaaattcaaccagttactaatagttgcaagaagttaatacgctataaatattataagctataagatctacttatctaatacccttaatagaattgtaaatatagaaattttataaaaaatttgcagacaaacataatgttagtatataattgtgcatgttggaattttatatagtaattatattatttaagaggagatttagtcgtgcaaggtagatgttattattgtaataaagaattaactgaaagaacaattaaaagacatgcaaagagttgttcagtaatgaaaaaatcaattgaagaaaagatgaattatactaaaggggtaagagagcaattcataatatccatgaaagataagtataatcctagtttatattgtatttatgtttcgatagatgcaaagttgcaacttcagcatttggacaaatttataagagatatatgggtagaatgttgtggacatttaagtgcgttttatattgatgaagaaatatatcatgataatagtgatgaacaatatgagatgaatttttatttaaaagatgtattaaatgttaataaaaagttcgaatatgaatatgattttggttcaactacttatttgactttagaagttgtagatataatacaagttccaagcgaatttagccaaatggaagttattgctagaaataatccagaagaaggtaaacttaataattctccaagagatggggtttgcgggtatataggaaataaaaattcggaaaaagaatacttgcctggaaataacaataaatacaaagttagtaataaaaagccgatacataacaatgatgctttttcagattttgacgattctgaacaaatgatagagaatgattttttaaaacattataataaatttacaaatagttttatacatacgtttttcaaggatacatattcttttgacctagaagaattgatcaagccatatcctaaaaaagaaatttgtagcctagcagagaacattggtcttaaattatcatataatttgaataaaaatcaggtaattgaaaaatatattgatgaatatgaaaaaaatatcagaaataaaatgaatgtgattaatgatgatatgtataaaatattattaaaatacattaagaataatggaataatttcagtttctgataatgaagcagaaaattatgcggataaacatgctttttttatgaatcaagggatggtatttccgtgcttaaaagatagaaaaccaatcttattaatgcctgaactaatgcaggccgttgttaagcaatgtgataccctagagtttagaaagttaatgaagaaaaatagtgaaatcatgaatatctttagaggtatgattaagttatatggtgttctttgttttgaagatgttaaaggattaatgaaaagatatgacaatgtagaagagcaaatattgttatctatattagaagaaggatctttttattataataatgaatattatggtacaattgacgatgacggaaaaattatatttgttaatgtggaaatagaggattatgaagaaatattaaatgatatagacaataatttggattattctatgattagtaaagatgatctaatttctatgtctaacgaagattatttggaaagaagtagtattgggaggaagttttcaaaagaattttcatctatgtttttagttgataaaaatgatgctgctggaactatgaacatgttggctttggatatacaatatagaaattctgaagaaatacttgaagacataataaatggaatagatgcaaaacttgacaaggaagatgaaatcagagtatttaatattgttaataaatttattaagaatataccattatggaaatataaaggtgcaactataaatgaaaaagaaggaaataacaaaacaattgaaagcaaaaaagagattggaagaaatgatccatgcccatgtcaaagtggaaagaagtacaagaagtgctgtggacgcaatggaaatgtgattcaactgttttaaagaattttagttatacaaataacttatgaatgcaattttgcatactttttcttttagataaatatattaatattattttaaatatagtacgagaaataagggtttatcaaagatgaacccttattttttgagaaaatagatagtgaattaaattaaaaaaagcataaaaatttgacattaaaatattatgtgactatgatataatagttctgtggatatataaggaattaataaagggtttttgtaaaatgaataaaattatggagaggatggtgttatgtattatgtttgatattaaaaaaggattgaataaattctatattggagaaacggaagaaaatactttagcagaagtaatattaagtgatactagtaaggatgtaataaaaattgagcatacttttgtaggcgaaaagttgaagggcaaaggagcaggaaaacttttaataaggaaagttgtagattttgcgatagaagaaaataagaagataatgccagtatgtgtttttgcaaaaaaggaatttgataaaaataaagagtatgagagtgttttatataaaaatgcttaatgggtttaaggacaaaagacttggaaacccacctggagtattaggagcgatgttacttaaagaaggattctttttagtatgtgcagatgatttagaaagcccaataaaaaggtgggatataagaagattaaacgcttttgtttgggcaagagaagtagaaatagagaataaaaatcaactttataatgtatggcatgctctcaaatttttatgtcaagaactagatgagaaggcggctagaagtttaggaaacaagttatcaaatttaaacgatactcaaaaagaagatattgaagaatgcagacaaatgatccttaatattattagaaagccatcaactttaagtagaataaaggcatggttatggaaaaattatagttactatagaaaatataaaggtatagaacttgatatagtgaaagaaccaacagatctaagatcaaatacaattttggctgaagaactaattaagttagaaaacaaactatataatgaaggatattctttgggatcgagtccaattctttatagaggaaaaagatagaaatatgcatattgtgtataaaaatgtagaaataaaggttatgaaagtgcgaaagaatagaaggaaaaaaggatatagatgttgaaatatatataataaggtaattagcctaataaatatttattgaaatgatagcgaggagagagaatttatgaaaaaatttgtttgtacagtgtgtggttatattcatgaaggagaagcagcaccagaaaaatgtccagtatgtggtgtaggatcagaaaagttcatagaacaaagtggtgacttagcttttgctgatgaacatgtaattggagttgctaaaggcgttgagaaagaagtgatcgatggattacaggcgaactttattggagaatgcacagaagttggaatgtacttagctatgtcaagacaagctgatagagaagggtatccagaagttgcagaagcatataagagaatcgcatttgaagaagcagaacatgctgctaaatttgctgaattacttggagaagtagtagtggcagatacaaaagctaatttacaagctagagtcgatgcagaacatggcgcatgtcaaggtaagatggatttagcaacaattgctaagaaattaaacttagatgcaatacatgatacagttcatgaaatgtgtaaggatgaagctagacatggaaaagctttcaaaggacttttagatagatattttgcataaagaaaatatctaaagttgttaacaaaaaatattcataaaggtggattaggtagaaatacttaatccgcctttatttattctttcgtcaaaatcgtgtatgtacagaaacaatacattaatatatgttaaactaattttaagctcagaatagtataaaatgtagctcatattatttaaaaaactgtagattattaagttgtctaaattatttaaaattaatcaatcaaaagcttatattaaaaaaatgtgatataattattttatatctttagttgttattattttacagttaaatacagtatatatcacgataaaacatgcctaaagatatatagtatgaagtcattaagataaaaataaatgttttaaagagttaaaatctagtatagattattagttatgtaaatctgagcttttttgtgtctcatactggaggtgatattattaagactgcgttatttatattattattttcatgttgtattttttatttatttttaggaatatacggttatagaatggataaaaaatcaaaaacaaatcagatatttatatatatatgtatttgctttggactttggtcaggcggatatgcaatgatgttaacatctgataatatcaatacagcatttttttggagaaattcttcggttctagggtattgcttttttaatggactttggctatactttgcatatttactgaataatgaggatgattttgagtatatttcaataataaaatttttagcatatgttccaactacactattatttattggaaacattatagtagaaccttattcagcaatgactaaggaatattatggctggattgatgtggctccagagttgtttccacaaattctatatataatatgggcgatagtaatagattttgtaggtgttatagtattgtatttaagaggaaaatattctaagaagaatagagtaaaaaagcaaaacaaaattattttaataacttgtacagtaagtattattataggaataattacagattttattttgcctttactaggagtaactatttttccatcagcagtattaacgggaactatagctttaggtggtatttattatgcaataaacaagcatagattgatgttgacgactccgaagtatatatcagaatatatttttaacactgtaaatgagccgatttttattttaaatgagaacttcattattaaaaattgtaatgatgcatcattaagtgtaactaattataaaattgaagaagtagaaggaaaaatatttagtgaattactggataatgttgattttgacttaagtagtataacgaaaaattcttgtgcaaaaaatatagaagttaacttggaaacgaaatatggaaataacattacatgtgaattgtcaggtacaattatatatgatgaatatagcgatatattaggaatattaatattactacatgatatttcggaaagaaaaaaaatattagaaatggaaaagaactgtactttaaaattagaagaagctaatatgatgcttaaaaatcaaattcaagataaaataagagctgaggagaaacttcgtcattttgtctattatgatcctctcacggaacttcctaatagaaaaatgatgctagaaaaccttaatatgcttttagaaattaaaaataatagtttcgcaatacttttcatagatttagatggatttaaaagtataaatgataattatggacatcaagttggtgacaaagttctcaaaaatgttgcggacacattaaaaggtataataagtaatgttgatataataagcagaattggtggagatgaatttgtaattataacaactgatataaaatccactacttatgttaaggaaattgctgaaagaattcaaaaagcattgaaaattccttttatttataatgaggaaaatttatgtgttggagccagtattggcataagtatatttcctgaacatggtaaagatgcagatacattgattagaaaagcagatgtagccatgtatgaagttaagaaaaaaggtgggtatgattatgccttgtattcatcgaaaataaatgatgaatttcttaataaaatgaatatcaaagagaaattaaataaagccatggaaaataatgaatttgtaatttactatcaaccaattataagtttaagatcaatgaaagtgctatattcagaagctctaattagatggaaacaagctgataaaattatttctcctatagagtttattccaattgcaaaaagtgtgggtgaaataatatcaattgataattgggtattagaaaatgcctgtaagcaatgtgaaatatggcatgagctcggaggaagtgaatttagtatttcagttaatgtttcttattcgcaattaaagcaatctgagttcataccaatggttgaaaatatattaaatcattattcgtttccggcaagatgtttaaatatggagattactgaagatgaggctatggaggattctggtacaatcataggaatactagaaaagttaagaaaaataggagttagagtatctttagatgactttggtacaggctactcatcccttagctatgtcaatagattacctattgatatgataaaaattgacaagtcacttgtatggaacttggaaaaggattataaaagtgtaatgattgttagatcaataataactttagggcatagtctgaatcttaagattattgcagaaggaattgaaactcaagaacaatttaggattctaaatgaacttaactgtgattatattcaaggttacttaataggaaaaccaatggaagcattggagtttgagcatagatttattaaaaaggaaactgaaactatgaaatcataaaaattagaagtattttactaaaagataatatagatataagagctatccgcatgctaaaaatggatagcttcttaatttgtataagatgtatatttgagttgtaaaattcaagttatagaatatttattaaggagattttaaatggagacaactatttattattttactggtacaggaaattcactgaagatagctaaagatttatgtgaaaatatcaccaattgtcgattgatacgcatatgcaaacgtaatatgaatataaatgaagtgacttctgaaagaataggatttgtttttcctgtttactatagagggcttcctaaaatggttgcaaattttataaaaaacttagatgttaatttaggcaaatacttttttgcagtagctaattttgggagttatgctgcattaacctttgagcaaattgatatcctgttaagaagtaaaggaaaatcactttctgcaaattttagtgttgagatgcctggaaatatgtggtttatgtattatcctcatcctaaagaagatttcattaatcgaatgaataatcaatcaaggataacaattaatattgcaagaatgattaataataattatgaaaataatatccctgtcataaaaaacagatataaagaagaaaagatgtatgaagattttaacccaaataacattgatgaaaatttctgggttagcgagaaatgtataggctgcggaatttgttctaatgtatgtccagctgaaaatatagaaattatagaagcaaaaccttcatgggaacatcgatgtgagcaatgtctggcgtgcatccacttatgtccgcaaacagcaattgagtttaagaaagattcaataaataaagaaagatataaaaatatatttgttaaaaccaaggatctcttttaaaatctagtttgtggatatataagtatatttttccagatggatatgttccatctgtttcagaattgatctgctcaatttcagataaacatttcaatgtaagtgatgtagaaaatcttagattgcattatgaaaaaaaaatagaacattgggcaagtaattttgaaaatgctttgcctgaaataagaaagactaaggatgaaacatttataagaatgtggagattatatttaaatgcctgtgcagcatcttttaatagtggaaatgttcatatacaccaatttctatttggcaaaggagtaaataataatttacattggactagagagtatatgtataaataatattatctaaaagttttggccatattttattaatgaattcttttgttagcatcattcattataggatatggctatatatatgttgaaattcacaatgcacatttcacaagtcacaattacggctaaaatttttgcaatatttttagaatccttttatttctaaatgattaattttgaataaattttatatttatatgcaacctaatcaagagtagatatataattttgagtatttatatctaatgggaggcattataatgaaaatattaaataaaagaattgcgataatattgctaactttaactatttttttattggtatctataactcaagttaaaacaatagcaagtttggatcttaacactagtagagtgtctaatatagcagtaatatttttcgtaactgatgatccatttactatgaaagttattgaaagcttaaaaaatatagaaaatgagaatcaaaatagagtgaaatttacttttttaaatccgaagaacaatatagcaatacaagatgaaatattagatgctgctttacaaacaaaatatgatttatttatattatatttaccagacagaagagaaaatgttgtagaaggtgccattaacaagattaagcaaaagaataagcctttaatactaatgaatattatacctgaagtagcatcaagagcttctaaattatatgagaaagttgtttttgtaactcctgattcgaaaaaagctggcattgctcaaggtaaaatcattgctgatttttggaataaaaataaaagcagtttagatgcaaatggtgataatatattacagtatgttttgttgcaaggtccatctgatgacccacagcccattgatagaagtaaatatgcaatatcaacacttaatgattctggaataaagacacaagaacttgctagagtaaatgctaattggtctaaggatttagctaaaagttccattgataatttgttccttaaatataatgggagaattgaagcaataatttcaaacaatgatgctatggcaataggcgctattgaggcattgcaaaaatatggttataacaaggataataagtcaaaaaatatagccgttgttggaattgatggcttacaagaagcaaaagatttaattgataaaggaatcatgactggaactgttattcaagatccaaggattgaagctgaagttttatataaagttggaatgaatttaattaaaaatttaagcccaacagaaaataccgattacaaagttgttgacggagaaatcataataccatttccatatgatacatatatacgtaacattagtgaatcataaatagtaaaactttttttatgatatttatatctgagattgttagcaaaaatgcttcgaagtaatattttaaaagctggtacttttgtttaaaaaataccagctttttaatattgttataagttattgattattatttgacaaccacacctacaccatttggaataactacaacatcagcatctttaccttttatgtcatatgcaatgtttaatgcttcgtcaaaagtataagcatgtttcatatgcatgctcttaatcatattcggatcacacatatctgtaacaacgattacagtgtaattacatagaattcgtgttaaaatttgaatctcccattgatcaggaattgtttcatttctaggaacttttaatatttgttcaagaagttcttcaggagattttgaatttgctatagtttcataaaaagattgaccaccatgtccatcgttacaagcggctatcataataattactccatctttcctgcatgtagcttctgcagctgtcataccctttacagcttggtatatattttgatctagtggatatccaccattgcttgaaattgcaatgtcagcttgtatactttttacactggaaagttccataacaaatttgcaaccttcttcgtgagcaagtttactatcaccagcaaaagcatttataatattcttatcttcatctataactacatttagtataaatgcaagatttgctttttcagcagcatagagcatatctttgtgtataggattatcttttataattccagtccttgcatgattgctgttaataaattcagaacagtgatttgccattatggtttttgctgaagctattccaggtaatatgctttttcttccaccagaaaatccggcaaaaaaatgtggttctataaaaccttctgctattaggagctcggtttccatcgctaatttgtttaggaataactcaccaccagaaggtaatgttcccacatttattaaactattttcatctgttgaaatatggtttataatctcctcgttatcaacgatggtttgtccgaatttatttatcatttcttctctagttgttggtctatgaaagcctgtggctataagaatttttatgtttatattgggattaacgtttcttattctttgtaataaaattggcatggtaattttactaggaacaggtcgtgtatgatcactagttataataaccatattatttttaccaattactaattcctctaaagatttactacctatgcaattatcaagagccttattcactatatcattttgtgaaatatcagctttataggtatttgccttggaaactaaaatgccctttagatttttatcatcaatgtttatttttaaagattttgttgagtatggaatctcgatcgaagccataaaataacctccctaaataaaaataattgtatttacactcaaattataacatacatttctataattggtaaggccaatttaaatgttttcataagttagataaaaatttattataaatatttttttaggaatttatatatgtatttatttgagtgaccgagaaatgttaaaatatagacaagttctacgtatagactagtagaataaaaaattaatttattagttaattatggttatacatagggattaatttataagtttataaaaaactcgagtaagaaaataggaggcaagttatgaaaatatttgaagcatgtgtggggaattataatgaggcgattttagctgccgaaagaggagctaatagactagaactttgtgataatttgatggagggaggaacaactccaagttacggaacaataagaaaaattgttgaggatatagatataccagttatggttattataaggccacgcggtggaaatttcacttacacaaaagaagaactagaaataatgaaatacgatgtgaagatgtgcaaagaacttggagttcaaggggtggtaattggttctgtaaaagattctaaggtagataaagaaataatagaggagttagttaatttggcaaagcctatgacaataacttttcatatggcatttgacgaagttgaggataaaaagatagccgtagatgaaataattaaattaggaatagatagaatacttactaagggcggatgtgaaaacgctatggctggaaaagagtgtttaaaagatttagttaaatatgcagacggtagaatttcaataatgccaggaaaaggcgttaataaggaaaatagagattttctcttggaatatacaggtgcagttgaaatacatggtactagagtagtttagtattataaataactatacaaaaagcagagcttttttaacaatactgcatttaagtcggaatatttttgtaaatttaatgtattatggcaaaataagtgaacctaaatatatggaaaaagtagtaaaatgatttataatataattgttactaacgattattcatagagttttaaataatatatatgttgcaatgcacaattcacaattatggctaaaattcttgaaatatttttagaattatgatgaagaattatttttgtaacatatataattacactaatactggggggagaattttgctggaaaataaaatactagatttaattgaaaatgaggataaaagaaagccattaaccgacagtgatattgctaaattagtaaatacgactagagaatatataactcaatttagaacagaaaaaaatataaataattctcgccaaagaaaagaagcaattctatatagtgatataaaggaaataattattgaagataaagatatttcagataggcagttatgcaaaagactatctattcttggatatgatatttctagatattcagtatcgcagattaaaaaaagtataatttcagaagtttttccgcagaatgctgctgaaaaatcaaatttaaataaaaatcaaccgaaaaattttataacagttaaatcagtagttgataaagatgggactgaaattaataatagctccaatatagataattcaaataagggcgataaaagtaacactaattatttaagaaatattataggatatcacggctcgttaaaaaatgcaattagtcaagcagaagcagcagtgttatatccacctcatgggctccatactcttttgcttggagcttctggtgttggaaaaagtttttttgcagaggctatgtataattttgctattagttcttcgcattttaataagaatgcaccatttgtactttttaactgtgctgattatgtagataatccacaattacttctttctcaattgtttggttacagtaaaggtgcttttactggcgccatcacggataaagttggattagtggagaaagcaaacaatgggatactattcttagatgaagtccatagattaccaagcgaaggtcaggaaatattgttttatctgttggataagggaaagtacagaaggcttggtgaaactgaaaatagtaggacagcaaatgtaatgataattgcagcaacaacagaagatccaaaatcatccttgctactaacattcagaagaagaattccaatgataattgaacttccgtctattaacaacaggcccgttaatgaaaaatatgttttgattaaaagttttttttcacaagaatcagctagagttggaaaggaaattaccatacgatatgaagtcattagatcgttactattatacaattgtccagggaacataggacagctgcgaagtgatatacaagttgcatgtgcaagaggtttttgtaattccttaagtaataattcaaatgaagttgctattgatataaaagatttgcctaagcatgttcctctagaaatattaagtgttaaggatagagaactagtgtcagaagatatttttaatgaagatttggttgttaatcctaatgatgttgtgacacagaaatccaaagatgatagatatatgttacctgatggaatatatagtaatatagaggaaaagtattataaacttgaaaagcaggggttaagtaaagatgaaattaataaaatattgtggagcaaagtggaattcaatttaagtaagtttgcaaaaaatatagaatcaaatatgttttttccaaaggaagaactaaaaaatataatagatgaaaaaatattaaatgtggttgaaaaagtaactgatattgcaaaacaatatatagaaaatatccaggaaaatttttattattgtgtagcaatgcatttgaattcaacttatgaacgactaaaacagggaagaatagtaaggaatcctgaatcagattatataaagaaggaatattacaatgaatacagaattgcaaaaatattaactaaagaaataaataatagcttagatattgaacttccagaagacgaaataggctttattgccatgtacctaaaaacgttttctgaggtggataaaaatgtaagtagagtggctgttattgtattaagccatggacatgttgcttgtggtatggtcgatgtagcaaataaactattaggtacaaatcttgcagttggaattgaaatgtcactagatgaaaatcctcaaactttacttgaaagagctatagaagtggttaaaagagttaatgaaggtaaaggatgcttgatattggttgatatgggatcactggttacatttggggaaataataacaaaagaaacaggaattccaactcgagttattggtagggtagatactgtaatggtattagaagcagttagaagatcattaatggagaatagtaacttatacgaaatttctaaagctcttgatggagacaaggcttacgttgggaaagttaaaggggcgaataaatatactaaaactataattacaatatgtataacaggtgaagggaccgcgttaaaaataaaaaagtatcttgaagatgtagtactaggaaatacaaataagaacttaagaattatatcagttggaattataaataaagataatgctcaaaatgaaataattaaaattagtagagatcatgatatagctgcaatagtcggaactatagatcctgaattagaaagtattccatttatatcttttcaggatattttaaaagaatcaggtaaattaagattaaaagaattccttggaataaataagaaacagtttaatcctttaataaatgtaattgatgaggaattaataaaagttaataatgatagctttaccaaaagtgatttaatagatgagatgtgtagtcttcttatatcaaaaggaagagttagtgagaattttacaatgagtgtgtataagcgagaaatgcttggaggaaccttgtttgaaggaacatttggaatacctcatggcctatcagaattcgttgaaaaatcatctatagctatttttaaacttaataatcctattttatgggattataattgtatggtagacgttgtgattatgttggcacttaaagaaaatgatggaaaagtggttagacaattatttgataccttatcaaagacagaagtagctaataaattaagaaaatcaaattctccaaaagagatttcagacatattattaaaaatctaataactattttaagttacaaggtaaaaagtaaaaattttatcttgtaactttatatttttaaatatatattaccttttcagcatagttttggcacggcgattgctttagaaatattgtgaagatgtaatcaaatataaaaacaacatcaagtgaagaagaagtatgattactagaaatattaaagaaattttatacaaaaaaggaggtagtttaatgacttgaagcatttagaaactcttgagaagaaatttagcgttaaataaccttgaagctaaatttaaagttgggtttaaaaatatatattattaccttttcaacatagttttggcatgataattgctttgtaaatattatgaagatgtaatcatggatgaaaacgtataaaatacttacaaaaaaggaggaagttaaatgactagaagtattaaagaatttttaagaagagatttagtagtaaataatcttgaagctagatcagcagaggatgtctttaagaagatgtctccaatattattagaagcaggatttgtagaagattccttttttaatgggttagtaaatagagaaagtaaatttcctacaggtttattacttggaaaatacaatgttgcaataccccatacagatgccatacatgttaagaaaccagcaatagccattgcaacactaaaaaatccagtgagatttaatagcatggatggaaatggaagtgtagatgttaatatagtatttactatggctttaaatgaacctcatagtcagatagtaatgttacagcaattaatgtttttaatccagaatgaaagcattctcgaaaatatgcttcaagcaaaaaatagcgacgaggtgtatgatatcgtttcaagctttaattgtaattgcgaataattaatgagcaattatttaaattatatgattttattttaaggaggcaaaaaaatggacaaacaaaaattaatattagtagcttgtggtacaggaattgcaacttcaacagttgtatgtaaaaaggtggaagacttgattaaaactaatgggattaatgcgagaattatacaatgcaagatttcagaggtggcaggttatgaagatcaagcagatcttttagtaacaactacaatttcatcacgaaattataaattccctgtaattaatgctatgaactatctaactaacattaatccaggaaaagttgaccaaggaattatagatgctttgaaataaaaaaagataggccactttaaaggtggacctatataaaaaatttaattggactactaattattatagcacataaaattatgtatttgaagctcaggacaacacatcttaattaatagtattttttattctctagtaaattatatcaatggacaatctgtggataacctataagaaaggttaattcagaaggttgacttttaaaagagaataaaaaagaaaatatattcgcctgccagatttttctcacatgcgttcgaaaaggcagatgcgtaaaaaaatctccggctccacagtcgcctgcgattttgttcttcaaaaactaaatcgtatatataaatttataatatgaacacttaattgaaaatttataaaagtaaataaaatttgataatatagggggaaagaaaatgttattaaatgtagtgcaatacattttgaacttaggaccaactgttatgctgccattaacaattactatcattggtattatatttggacaaggatttaaaaaagcatttagatcaggtattacaattggtatcggctttgttggtataaatttggttgttggattgcttacaacaaatcttggtggcgcagcacaacaaatggttactagatatggattacagctaagcataatagatgtaggctggccagcagcagctgcaataagctgggcatctcctatagcagcaataatgattccaatagctatgctagtaaatttagtaatgttagctacaaagacaacaaatgtagttgatattgatatatggaattattggcactttactgcagctggtgcaagtgtatacgtattaactaatggtaactggttacttgctattttggctggtattttatacgaagttgctgttattaaaattgcagataaaacagctccaatggttcaagaattctttggacttgagggagtatcattgccaaccggttcaactgcagcttgtggtcttataggaattcctattgttagtgtagtaaaaagaattccaggcataaaaaatttaaaagcagacccagaaactattcaaaaaagattcggcgtttttggagaacctatgatgatgggacttattcttggtattgtacttggaattcttgctggctatggtgtagataaaatcttgcagataggtatttcaatggctggtgtcatgttcttaatgcctagaatggttagaatacttatggaaggtttaattcctgtttcagaatcagttagagaattcttgcaaaagaaaaattttgggaaagatagaaatcttacaattggtttggatgcagcagtagctgttggacatccagcagttattgcaacagcacttgtattagttcctattacattattcttagcagtaatattacctggaaatcaagttctaccttttggagatttagctacaatatgtttttatgttgcctttatagttggtgcagcaaaaggtaatatagttcactcagttatatcaggtacaattgttatggcattaggattactaatggcaacaaatatttcgggattccatactcaaatggctcaaatggctcaatttacaatgccggcaggaacatcaactatttcaagtttagatatgggaggaaatttcttaaactggatagtaattaagatattccaattattcacaggaagtctataaagtgaaacttagcttcagagggagttttctaggtaccccttgagggtaaacctcccactgaaggttagttgaagttatctagggtcgtgccactgttatctctcactttaatagaagatgggagtgttacagtggctagacatcagataagattaaataacctaatttgttaaagagtgcttattagtactctttaatgccattggatatttacaaggaaaggatgatggttatagtggaagtaacaaatttaaaagtagaagaacttattggaatggattttaagtgtgaatgtggaaaaaggcacagtgtagaaattaattctgtaaaaataggaagtaatataatagaacggcttccagaattcctaaaagagtttaaggataaaaaaatattaattatacaggatgtacacacatatgatgtagcaggaaaaagagttgaagaaacattaaataatgattttttattaaagaaatatgtgtttccacaggaacacttattgcctgatgtatatgctcttggaagagttttaatagaaatagaagatgatacagaacttatacttggtgtaggctcaggcgttataaatgacatttgcaggtatgtcgcttacagagcacatgtgccttatgccatagtatgtactgcaccatctatggatggatatgcatctgtagtatcgcctttaattacagatggattcaaagaatctcataaagcagcctatgcttatggaatatatgcggatattgacattatgaagaatgctccaatgtatttactttgttcaggacttggggacgtattaggtaaatatactgctctcgcagactggtcaattacaaacctcttaacaggggagtattattgtaagactattgcggatatggttcaatctacagtaaataagtgtgttgctgctgcaccaaggattccagaaagggatgatgaagtagtaaaaaatataacagatgcgctagtattgtcgggaataactataggaatgtcaggttcttcaagacctgcatcaggttctgagcatcatattgctcatggatgggaaataatgtttcatacaagaaatagtgaagaaaaatgggtacatggaaattttgttggagtaggtacagttgtaatggctatgttatttgaagcattaaaggatatagatatagaaagtgttatggctaagaaaagattcagatactacgatatgaataaatggagacaaaatattgaaagcgtatttggtaaagtggcagttaatgtaattaactataaaaaggatgcaattgaattggatcctgataggagacaagaaaatgcagaaaagatagcagcaaactggaaagaaattcttgatattggacatactctagttccaagttctgagaaagtaaagaaaatactacaggatggtggatgtgtatggcatccagaagagattggaatagataagaatttatttattaagacttttattgctgcaaaggacataagaacaagatatggcgttgtgcatttaatcgataatcttggattaacagatgaaattgctaatttaattgctgataaattgtataaggcacaatcaaaaaaataacaaattcatctgccaagcctattttccatcatgcttcttcagcagattacctaatagacttgctatgagaccaatcaaaaataggcttggcattttggacttgttattttctttcatgtgcctaaatccaacaacatataagacaattatgcgttttaatatggaggtaaaaatgaatgagttaaaagatattaaatgttttttattagatatggacgggactttctatcttggaaatacaattattgatggagctctagactttctagacattttaaaaagtcaacaaaagaaatttatattcttaacaaataactcttcgaaaaataaatcaacttataagcaaaaactttcagcacttggctgttatgttgatgaagaacagatttacacatctggtgaagcaaccatatggtatatgaagaaaaactgcataggtaacaagatatatctcatgggtacagaaccacttatggcagaatttgaaaaggctggctttatactagttaaggacaaaaatgacaaaccggattatgtagttcttgggtttgacactacactaacttatgaaaaaatatggacagcttgtgattatataagagatggagtaccatttatagctactcatccagatttcaattgtccaattgaaaatagcaaatatatgcccgatactggctctatgataagaatgtttgaatcatccacaggtatttctcctgtggttatagggaagccatatggatatatagtagaggctattattgaaaagtatgggcttaaaaaagaagaagtggcaattgtaggagatagactttacactgacattaaaactggagtgaatgcaggaataactagcgttcttgtattaagtggtgagacatcagaagctatgtacagagaatctgacataactgcagattatgtattctcatcaattaaatatattggtgaagagctgatgcagttttatgaaagctttatttaagaccttgatgattagaagaattttatctagtcattgtatgttaaaaaagtattgaaaattcatggaaagtaattgtattctatgagttttgaaaaattaaaaagaagttaatattcaaaattaggaggcaatattatgagcattataacaattattggagcaggtcaaatggcatctgcactaacttttccagcaaccgaaaataataataagataagacttgtgggtacaccgttagatagagaaatcataaatacagcaaaggctacaggttttcattcgacattaaaacgtcaattacctgaaacaggaattgaatactatcaaattgaagatgtaaatgaagcaatagatggagcagaacttattatttgcggagtcagcagctttggtgtcgactggtttgcagacaatatattacctattatacctgaagagattcctattctttcaataacaaaaggaatgattaccgaagaggatggcaaaatgataaattatcctcaatactttttaagtaaacttccttctaataaaaaactatctattagcgccgttggcggcccatgtactagttatgaacttgcagataaagataattctgaagttgtattttgcggagatgacataaatttacttagaaagtttaagagtttatttgaaacatcatactaccatattagcttatctacagatattgtaggtgttgaatgtgcagtagctctaaagaatgcttatgctttaggcgtatcgctagctattgggttagccattggagctgatggttccggaaaagagcattataattctcaggctgcactttttggacaaagcataaaggaagccaaacgtattcttgaaatagtcggtggaggagaagaaaacattatatattttggcggcgacttatatgtaactgtatttggtggacgtactcgtagaataggaaccttattaggccaaggattttcatttgaggaagctatggaacaattaaaaggagttacattagaatcagtagttattgctacccgtgctgcaaaatacgtgcgttgtctagcagaaagaggagtagttaaacttagtgattttccaatgataactcatattgatgaaattataaattcagatggcaaggttaatattccatggaaagcattcgagtctgaaaaaatattataatttatcattaactagctgaaaatttggaatgtaaagttcaataactttaattaaaattttaaagttaaattaccatgattagaaaatgagtatgtagtaaatattattgatatcatattttgagtacagtattagatttaaatttagtgctgtactttttataagcttcttcaacaatatatgatataatctttaaaggataagttgaccattttcctatttttataaaattgttattccagttaaagagtgttagtgttataattacataagaaaattgtgtaaaaaagtgaattaatatacatgtatgtatattaatttctttttgtttactatatttcatagtaactcataaaattttatttcgttaaaatcaaaattccatttaatttaagataagtttctatgttaataacactaatacatatttgatattattaatacataaagtttttttaattagtaaagtagttaggaatcttattttaatgagtatatattgagttactgattttctttttcagggggtagcaatatatgtttcaacgcgaatgcgatcaagaagcaagttatattatagaatcaaaaaagaaatgtcttgagttagggttggactcaaataatcctaaaatgcctaagaatattatgtctgaattggaattaggacaaaaaagagatgcctatgacgaaattctagaagttgtcaaattttttagtaataagatgataaaattattagaaggcacgcctgtattgataacaattacagatgaagatggatatttgctagatgttcttggagataaatctattagggaaacaatgtctaaatttggagttaagccgggtatacaatttcgagaagaggaaatgggtacaaatgtagttagtttaacacttaagcaaaaccatccaatacaactaataggaagcaatcactatcataaatgctttcaagacagtgcatgttatggagttccatttcattattcagatgatggtaatttattaggaagtatatgtattatgactgcgattatacttcataatccattttttttaatgacattaactactgtagttgatgcaatagagcgtgaactattgctaagaaagcaaaatctaaagataaccgaacaaaaagaattattatatgaatcagaaaagagacaaagagagtttcttgaaaaagatttagcaatgaaggatgaatttataactttaatcacacatgaatttaaaacgccaataaatgttatttattcagctatacaattgattgaacatgtgtatattagtgaaattcctgaatcagtgaataaacttattggaagcataaaacgcaatacatttagacaattgagacttgtgaataatttgttagatattacaaaattaaaatcggatcagtttaaattaaatttgaaatatttggatattgtgtttttaacaagattaattacagaatcaataaaagtttatgcggatcaaaagagaattaacctttattttaaaactaatgttaataataaaaatatttcaatagatgatgaaaaatacgaacgtataatcttaaatttattatcaaacgctataaaatttacacctgaaggaggctcaataactgttgagcttaaagaaaatagcaatgataaaacagtagatatatctgtaactgacactggggttggcataccaaaagagaaacataaggtaatattccatagatttggacaagttgaaaataatctttcgaggttagcagaaggtagtggtattggattagctcttgtaaagatgttagtaattatattagaaggagaaatagaagttgagagtgaagtcggatgtggaagtaagtttactataactttacctattaaagaggagatagttaatgaagaaagtaaaatatcacaaagatatgataacaggttaataaatgccattaatgttgaattttctgatatatatttctaataatatttagatagtatttcatttttgatcatgaatataaaaattagaaaaggtataaactaaaaaatgaggtgagaaaaaatgacaaactataaatttattacaaataataatgaaaatgattcgtcaaataccacaaatacatctatgccagcaaaaaataggaaaagacataaacctgtaagaggaattcctagaactgaaatgtaataaatggcaactataagtttgtagaatgaaaaaagtgcggtactaaaaatatgttttggtactgcactttttaagtttatataattataacctaattactttaaattaagaatattttttatattaaaacacatgataaatttaaatactataactcggcgaaaaaaatggaggatctataatgagcatcttaaaaaaaataataacatttataattttagttttattaataattacatcattagatacttcaacaaaaaatgtatgtgctatccccaatttaagtaaaaacactcctattaaaatagcagtgttttcggataactctagcgctatgtatatttctcttcttaaagaaaatttagaacgtattgaaaaagaaaatgaagacaaagtcaagtttacgttttttgatgctaaagacaatcaggctaaacaaaatgaaagcatagagaaagctctttcgcaagactttgatctttttattataagtataatctctcccaatttaaaagatgtagaaagtactttgcgcaaaataatggaaaaagatattcctataattttgaaccctgatccagtacaagaaataataaactttgttaaaccatataaacgttttgttgttgtcggtgctgattttgaacaatcaggtactatggaagggagtattcttgttaatgaatggagatccaataagcagataatagataaaaatcacgatgatgcattgcagtatattatgctaaaaggtagaatcggaagccctctaacatcgttaaggacaaaatactcaattttagcgcttaatgatgctggaataaaaacagaggaacttgcttctccatcatgtgaatggatggaagattgtgcccaaagtgctgtggagtcattatttcttaaatatggtgacaaaattgaagcaatagtttcaaataatgatgcgatggcaataggagcggttgaagctttgcagaaatatggatacaacaaaggcggtaaatctaaaacaattccagttgtaggtattgacggcatgccaactgctaaagattttataaaaaaaggttttatgtcgggaactgttgttgtagaacctagcgatcttgctgaagctctttattctatcggtatgaatttggcttatggtaaatcaccccttgaaaacactaaatataaatttgatgaaactggatttagagttcatttaaagtataatgaattcataaagtggttgaagtaatgagagtttaattagcattaaaataattaataatgcgaagtgctgtgtgaaatctaaacaattcaagatttttgcattttaaatggaattaatattatttaaatttagaattggtaaaatatttttataaaagaattgcttatagaattagctgccttggcatattgtgatttaaatttaggaaattaaaattaaatttttattttaatagaagaatttaatgaataattatcatattctaatatataataaacaatctagataagaaaaaggggtgcagctaaattgacaaaaatatatgatgttgtattaaatgctccatttggtagtcagcagggcagaattacttttgtaataaatggtgaatctttaacaggagcaattgatggaatgggatttaaaagcaaattcaataacggaagaattcatggaaacaattttgaattttctggagaaataaaaattctattggccaagttaaaatattctgctaaaggtattttaaatggtaatctattgtcagcatctgttgatacaaaatatggaacattctctgtaacaggaagtcttatatctcaatcttaatgtcaatttaaacaagataaatataagagataacaaaaatatttgaaatgaaaaatgatgaaaaatacgtttagataatataaatctttgttagacagtaaatttattaaattagatttactgtctatattaattattaggataattagtagaagttgaacttatattgaataaatagtattcggcaattatttaaaaagtgaaaagtattattgctgtgattatttacaagagtataataattggacataagcagataataaaaagggctgtaattatgtaaatatgatagaaattaagaaaaatacttttggttatatatcgtttttaattataaaataaaagaaataaaatacaaaagaagaaaggagagatataatgcaagatataaaaataaaatcagaaacaggatggaaattagataatacttatgctgatttgccaaaaacactttttagcaagcaaaatccaacacctgtaaaggcgcctaaattagttattcttaatcagccgcttgcagaatcattagggctgaaggcagaatttcttcacgatagtgacaatgtagcaatctttgctggaaataaaatagaagaaggcagtttacctattgcacaagcttatgcaggacatcaatttggctattttaatatgttaggtgatggtagagctatattacttggtgaacaaattacgccaagtggtgaaaaaattgatattcagctaaagggatcaggcagaacaccgtactctagaggtggtgatggaagagcagcgcttggaccaatgttgcgtgaatatattattagtgaagcaatgcaaggtcttggaattccaacaactcggagtctagcagtagtgacaactggagaacctgtaattagagaaaaagtgctctcaggtgctattctaactcgggtagcttcaagccatattagagtcgctacctttcagtatgctgcaaagtggggaactatagaggaactcaaatcactagctgattatactattaaacgtcatttttctgatattgataacttagagaatccttatatttttttactccaagaagttattaaacggcaagcttcattgatatcaaaatggcaattaatcggttttattcatggagttatgaatactgacaacatggctattagtggagaaactatagattatggaccttgtgcctttatggatacatatgatccggaaacagtatttagttctattgatagagaaggaagatattcatatggaaatcaaccacctatagctgaatggaatttagctagatttgctgaaactttgttgccattacttcataacaatcatgaaaaatcagtagaaattgcacaaaatgaactttcaaagtttgcggatttatatcacgataattggattagaggaatgatatcaaaactcggaatattcaataaagaatcacaagatgaagctcttattgaaaatttgctaagtattatgtataaatataaggcagattatactaatacatttagtgctttaactttagataagtattctgatatagagttatttaagtctaaagaatttgagaaatggcatgaattatggaatgcaagattaaatagacagaaggaatctaaagagtcttcaaatatattgatgaaaaattcaaatccttatgtgataccgcgtaattatagagttgaggaagcattgtcggctgcggaaaaaggcgactataccgttatgaataaactattaaatgtactatctaatccttacgcatattcagataatcaatctgaatatgaaaaattgcctccaaaatcttgcggctcgtatcgaacttattgtggaacctaattttaaataataatattaataaatttttaataaaataaaaaatacctaaaaaagggcgagacataatatagcccttttttcattttgtgaaatatacataaatcattgggattatgtatttaagataataaaaatattagaattattatgtaaaactaaaactaattttaataaaaaatcatataaaaaatttaaaaagtaataaaaaagacataaaatttatacgtttacacttaacaactaatgaaatttatggtataataaaaaacgtattctggaaattgaaaaggagagatttgatgtcaaaaagttatcaatggataaaagttgcaaaaaaatcaatcgttttttctgtagctttgagtatttatttaggtattggaactgctttttcagctaaagcagctacgacacaaaataaagatataatctgctcaacaacagcgtacacagcggagtcaggaagtgtgacagcaagcggaaaaatagcaaagagaaatgcaagtgggataagtacagtagcagtggatccaagcgtaattccttttggaacatatttatatatagaaggttatggatatgcaatagctgcagatagtggaagtgctataaaaggcaattctattgatgtttattttgatagcgatagtgaatgtgataattggggtaggaaaactgttaaggttacggtatttggaaaatccgacaattaaagaaaaatgaaaatgtttaactaatctaaataagtgttaaaataattgataatcgcaattctaataattaaatctaggaagcaattaattcagattgagttagacaagcttgtttagagatcagtgatacttaaatttataaagagaatattcaattattataatatctaaaaggaagtgtttctaaatatagggacactttttttatttgaaaagaggaaaattaatatagtattattgataaaatatcaacaatatcttaattattttgaaggtctatcaataaaatgttctttataaagataaaaaataaaaataatgcactatatattaactaattaataatataaagtaataagattgacaaactagtaaatagttgttagtataaaagtattcctacaagaattgtatgaattaaaaaaagaattaaaaggtgataattaaatgaatattgactggaatttcgtagtgactaatttgcctttgtatgagaaagctgcatggctcacattaaagttagctattgtaggaatacttttatcattggtaataggattactatgcggaataatattatactttaaagtaagagttttggataaaatcgtacaagcttatattgagctttcgagaaatactccactacttgtgcagatattttttctgtattttggtttgcctaaattaggatttaaaatgggcgaagctacttgtgctataattggtttagcatttcttggtggtagttatatggctgaagcttttagaagcggagttgaagctgtaagtaaaacacaaattgaatctggcataagtattggtctttcaaatggccaacttattagatatgtcataattccacaagctttttcagtaagtatgccttcaataagtgcaaattgcatatttttattgaaagaaacttctgtgcttggagctatatcaataatggatctcacaaatttaacaaaagatttaataggaatgtactatagaacttttgaatcattatcattgctagttttgatttatcttatcatgattctacctttatcatttctaatgtcttggatagaaaggaaggttcgatatgcagaattcggcaattagtgttatttttcaagaaaacaatattaagcgtttatttgaaggtctgtttgtaacagcagaaattgcttttatatctattattataggatctatactaggaatacttataggtttgagtaggactacaaaatcgaaggcgatactttttattaacagagtttacctagaagcttttagaataataccaacgttagtttggttatttgtattctactttggagttactacagcattaaatataaaccttagtggagaagttgtttctgttattgtattcagtctttggggcgcagcagaaatgggagatatagtaagaggatctcttcaatcattaccaaaacatcagattgaatcggggaaggctttaggtttaaattattatcaaatatatagatatgtacttatgcctcaagctataagaagaatgatacctggaaccatcaatttagcaactagaatgattaaaactacttcgcttgtagttttaataggtgttatagatgtagttaagatgggtcagcagattattgaaagttcaagatttcagtttcctactgcttctttctggatttatggttttatattcttcttgtactttataatatgttatccactatcaaaaatatcgaaaagactagaatcaaagtggaataattaggaggaacatacatggataagaataataatcctgtcttgcttgaaatacaggatgttcacaaaaaatacgatgaaaaagaaatattgaaaggtattaacttaagccttcacaaaggagaagtattagttattttaggaccttcaggctgtggaaaaagtacttttttgagatgtcttaatggactagaaaaaattcaaggtggagatattaaatttaaggaacaaagttttacagataaaaatgccgattggcaaaagattcacgagagaataggaatggtttttcaaaactatgaattatttcctcatatgacagttattgaaaacatacttttaggtcctttaaaggttcagaaaagagagaaatctgaggcacttgctcaagcagaacaacttttaaataaggttggattacttgacaggaaagattcatatccacgtcaactttcggggggccaaaagcaaagaatagctatagttagggcattatgtatgaatccagaaataatactttttgatgaagtaacagcatctcttgacccagaaatggtaagggaagtactagatgttatattaggcttagctaagcaaggcatgactatggtaattgtcacacatgaaatgggatttgctcaatcagtggcagatagaataatctttatggatgagggtaaaatatgtgaagagtcgggatcaaaagaattctttacaaatccaaagacagaacgtgctaagcactttctaaatatatttcaattttaattattaatagggggatgacaaaatatgaaaagcataaaaaaaatagtagcagctttacttttaagtactgtagtagttggaagttttgttggctgtggtaattcagcacaaactaataaaggtgattctaataaagcagcgtctagctctttagaagacataaaaaaacgtggaactataaagattggtgtgtttagtgataaagctccatttggatatgttgactcagaaggaaaaaaccaaggatttgatgtatatgttgcaaagagatttgctaaagatttacttggagatgagtcaaaagttgaatttgttttagttgatgcagcaagtagagtttcttatttagaatctaaaaaagtggatataataatggctaactttactgttactgatgagagaaaagaaaaagttgattttgcaaatccttatatgaaagtatcacttggtgtagtttcaccagatggcgctaaaattacttcggaagatcaacttaaaggcaagaaggttattgtagctaagggaacaactgctgaaacttatatgactaaaaatcatccagacgttgaacttgtgaaatatgaacaatattcagaaatattccaagcattaaaagataaacgtggtgacgctatattaagtgataacacagaagttattgcatgggctaaagataacccaggattctctgttggtataccatcacttggaagcacagataccattgctccagctgttactaaaggtaatacagaacttagagattggattaatactgaacttgaaaacttaggtaaagagaactttgttcacaaagcttatgatgaaacattaaaatcagtatatggtgctgaatttgaagatagccttgtagttgaaggtggaaaaatacaataagattttttaaaggatgaggatgcaatgcaatcttcatcctttatttttatacacccgaattatacactgtaatcaatgtttaagaagtattatgctcagctagtattttaaagcgcttaattaaagttttataagaaagttatggtttgtaaagagaataaaaaagaagatacattcgcctgggattttgttcttgttttgaggatctgaatatacgagtacgaagtttgtattcatgggcattaaatcgattaatatcgatattttttaggtagtcaaatgtgtaagattatgctaatatttaaatatgaatacctatttgggaaagttttttcttttaagtatagttaataaaaatccaaatagattttagtatgaatttgctttctttagaagttgtgttgtaagcaaacttatatttaattatttcattcggaggtgtatatgagagttgttagtgtttccagcctaaagggagatgaaatactaggaaaacagatttttgatgaatcgggtagaattttacttagtgttggagttaggctgaaaccttattatatcgaaaaaattaaagaacttggtatttattcggtatatattgatgatgatatatcaaaaaatcttgatattgaagaaagtatttctgataagacacggcaaatgagcaaacatgcagtaaaaaaaatgatagacggatattgccgtgaaggaaaaactgataataacagcgttatgaattctgtcaactcagttattgaagatatactatcaaataaagatgttttaataaatgttgcagaaataagtgctagtgataataatatatattctcattctgtaaatgtatgcgtattagctacaataataggaactcatatgggatacagcatgtcaaaattaaaagatatagctgcaggtgcacttttgcatgatattggcaaaataacaattatgaacgataaaaaaatttcgtctgaatttaaagatgaaaatgaattcaatagatatatggaattaatgcatcctaagattgggtatgatttgctaggggaccagcatgtttggagtgcatatgttaaagtggctgttttaatgcatcatgaaagaaatgatggaagtggatatcctttgcagctaaaaggagacgaaataaatgaattggcgaaaattgtatcgatttgtgatacgtttgacaatatgatatccggcagagaagaaaatgaacgaaaaactgtgtatgaagcaattgaatatctaataggtatgagtaatatttattttgatgaagaaatagtgaaaaaatttactatgaatatagcagcttttcctacaggaagtggtgttattctaaattcaaatgaaaagggattagtagtaaaacaaaacaactcaatgccaatgcgccctgtagtaaaggtgttgtatgatgaaacaggaagtttactatctgaaccttatgaagtcgatctactgaaagaattaaccctttttattacgaagactagtgaaatttaattttaggaggataatatgaagaatcaaaacaaggatgaaataaatatttattctaatgatttcctaaaattaatgaatagtattcatgtgagatttttagaggtgaattctataaactataatgagttattaagaaaatcattagaggaaattggagaattttttgatttagatagaatatatatatatcatttttctaaagaccctacttttatgaaaatagaatgtcaatggaataaaaagtttataaaaccaaaaagggaaattatagaggatgaagtagtttacgcttttccatggttaatccgtcaaattaaaagtaaggattttattgttttaaataatataactgaatttccggttgatgcaacatttgaattagaagcttttaatatggaggggataaaatcgtctcttatacttccattaaaagataaaaacaaattaataggttttataggatttgaaaccttatcggaatcaataatatggcaatcggaacagataaaagtattaaataatatttcaaagtttttagaattcataaaagctaggattacaaaattaaaagaatacgaatcgcttcttaatggtcagaccattttacttgataatgctgcatcacagatttgggcactaagcaatgttacttcatatgccactgttaatgaggctcatgcagaattttttggtaagaaaaagagcgatttagaatataaagacctatatgacatatttgatgttaatactgcaaataagttgtctgaaaataattgggaattatttaggaatgatgagccagcagagaaagagcttaaaattaagaattggaaaggcgaggacaggctccttcaggttaaaagtaaacctattaaagatgaatcaggtaacattaaatatcttgtttgtacagcacaggatattacggagcaaagaattgcagaagctgaattatataaagcaaaagtagaggctgaatctgcaaatatagcaaagagtcagtttcttgcaaatatgtcacatgaaataagaactccaatgaatggaatatttggatttttagaattattggaatcgtcaaatctctctctggaacaaaaagaatttgtacgcgaagcaaaatctgcttcagatattttactaaatattattaatgatatattggacttttcaaaaattgaggctaaaaaattagtactagaaaaaataagctttaatttgagaactgttatagaagatgctgtttcactttttgttcctaaaaccttggaaaaaggaattcagctttatacaataattgatccaactattccagatgaggttataggtgatccgtctagacttaagcaaatattaactaatcttttgagcaatggtgttaaatttactgatgcgggtgaaattgcaattaaggttgattattttgaggaagaaaatgatatcgcacttcttacatttgaagtgagggatactggaattggaattagcggaaaggatatacaaaaactttttaaatcttttaaccaagcagatgcatctacaacgagaaaatatggaggaactggacttggactttctatatgccgagaactggttaatatgatggatggtgaaataaccgttgatagtgtattagataaaggatctatttttagattttgtgtaagattaaaaatatctaaaagggcttctgaacatatctctattttcgaaaaggttaatgacgtgaatattttgattgttgacaatgatgaaaatagtagaaagattacaagttcttacctgaaaggaactggattacatataattgaggttgatggtgctggtgaagcaatttcaacaattatttctaataatgatacaaaaaataaaataagtattgtaatcattgagtgcgagataccaggaatgaattgttatgaacttgcacgaacgttaaaaaatataccaatagccaaacatatcaagttaatactgttaatgtcgaggtataaaggagactttaaggcagcaatggagtatggcttttcgtcttatttgaccaagccactaaaaagagatgatttacttgattgtattgctgtaaatttaggcttgaagaaagaagatgaagaacattttgaagactcaaataaaaatgtagttaaaaacatttatgatttatcagaaattagaattttactggcagaagataatgaagttaacagaaaaatttttataagcatgcttaaatctcgtggtattacttgcgatgtggcattagatggtaaagaggcattaagaaaagtatcggaagaagattatgatattgtattcatggattgtcagatgccagtaatggatggatatgaagctactgctgaaataagaagaattgaagaaaatagaaagcacacaaaaattgttgcagtaactgctaatgcaatggaaggtgattcggaaaagtgtattaaatctggaatggataattacattactaaacctattaattttggtattgtatttaagatgattgaagaaagtatcatagataaaaaacataatactatagactattcaagaataatagataactatattaatgaattttctagagataccggtcttgatatagaagatgcattagaaatatttgaagactacataaggtgcttacctgatttgttaaatggaattaatgatgccattaatactaaggacttaaagaaactagcaaagtttgctcatgagttaaaaggttcatctggaacactaagaataaattctgttcacgaattagctaaaatgcttgataaaaaagctttagaagaaaagttagatgaatgtaatgagatttttggacaaataaaagatttgttttataaaatataatttaataatagcagtcaaattctgaaaaatgaggatgaaggagtttttaatatgaagaagattttgatagttgatgattcatcgtatatgcgaatgtttatacgaaaaattattcaaaaaaggggaacttatatgatcttagaagcatcaggtaaagatgatgcaatagaaacatataagattgaaagtcctgatattataattttagatttaaatatgtctgaagttagaaaagatggcattgatgttttaagccaaataatgagtattgatcctgaagcagtagtaattattatatctgcagtaggatatgatgatgtcaaagatgaatgcttagccttaggagctaagagttatataaagaaaccatttgatactcaaactttaataaaaacactagaagaatacaaataaaattttaatacaaaaatagaaaaatcgttatttatactgaaaagatatatatgcttagtagattagttgagattaaagaatgcagttattaatagaaaatgtattctttaattttttattaataaggaataaatttaggtgtttataaacaacctaacattatataattaaataattctaaaaagtgaattgggaatcttattttattataatcaatagaatatgtgttgtaataatgaatgtgcatttaaagatatggtaagctaagtatttaactaatattagcatatagaaaatcgattgcaatatactattataaatagctataaattaatttattaaaagtaaatatattctatgaaatgacaatgaataaatgttattttaaaattaaagtaagaatttatttgatattattggaggatgatgtgatgttagatattataatttacatagcaataggggccgcagcaggtattttaagtggtttgtttggaattggtggtggaataattataattcctgcattgatgtatttgaaaggattttcgcagctcacagctcaggggacatctcttgttgcaatgcttccacctgttggcttacttgcattcatggaatattataagaaaggtaatacaaatataactgctggtataattatttgtgttactatgctaattagtgcaaaatttggaggccagcttgctaatattcttccagcaagtataatgaaaaaagcttttggaatatttattattttggttggaataaaaacttttataggtaaataatgaaaaatagttaattagtaaaaaataatagtctatatcattaaaataaccattaatttattataagttagtggttattttttatatgttaataatttaattgctgtattttcaattataaatagtctaaaaacatagtgcttaacttaagcaaaatattaacgattgatcaggtatctctgcatattggtgcagttttgatatattagatgataaattaagaaaaataaaaaagccccaattggggtgctttaattaaacaaaatgagtgaaaatacaatggaggtgataaatatttaaatgaatgtggtttggaatatataccatcatatagtcactcaaagctatagatcgaattaaatttatttaagtgtgtgcctttcaacaatttaaataccatctgactaaagagctatttttctagtatcttgattatctattgcagaaataagagttattctttcgtgtgaaatcaagatatcagtgctttcaacgctaggtttttttactgttactacaagatttcttgggccacctactgcctctatagctctatttataagtttaatagtataagaaaatacttcttttacatcttcatttgatgaaaatacaactgcatgtccagctttaagcattagaatgctgtttctaattattgtttcgataggattagatgcttcaacaataacgccatttacagtataagaattatcaccgttaattatagagaacctagattcaagatagttatcatttaaacatttatctaatgcattagtattattgtaaagaatattattgtaggagctagcaccattctctttacaagtcattaagctaacttcttctaagtgcaattctaattctttaattactgaatctactatttcattctttctttgttcactgtattgcttatatttttcacaagcaacatgagctaatttaatggcatcttccatggtgtcaaaaactccacaatctccttgtctatcgattataactgcatattgaattggtttttttactatcatagtatttatccccctcatatttatagattttaattttttactatgatttctactaacatagaagtagaagaagttaaataattaacgttaattatttaacaataagatttaaaaaaatatagatatttatatcactatcttattaag

SEQ ID NO: 43 - DNA, 46072 bp, Clostridium beijerinckii
ccagcgttcgtcctgagccaggatcaaactctcaataaaaagtttaatcttagcttactcaaataaaaattgctggtttacttaaatgtatttatgttattctgttcaattttcaaagaccaattttctttcctacaattctcattgtagttattaattttcatcaccctcaagcgactttcttagtatatcacctgttttatacactgtcaacaactttttaaaatatttttatattatatcaaaaatatttttcctaaatttaattaaagtatctatgtgcttcagcgaagttttttatattaacataataattcaacagtacttatataatataacctaattatattaatttatgttcatattaattaacatatctatatgataattaatatatcttattatgatacgcctggcatatatgtagatacttttataaaactttaatatataatacctataaaaaaataaggctataacctatattcaatagttatgccttatttataatcttataagatttattatatctaatattattcttctatattatttatttcagattcagcttcatcaccagattcagtttcttgatcatcactgcttaatattttagctattgcaacaactttctcatcttcattcgttctcatcaatgttacccccattgctgatctacttgttacagagatatctgctacattaattctaatagctactccactagaatttataagcattaattcatcatctaccttacaaattgtagcgccagcaagctttccagtcttttcactaattttataagttattagtcctactccacccctattttgaagcttatattcagcaataggagttctctttccatatccattttcacttattactaataactcttctccatcaacagcaatatccatacatactgctatatcatcttcttttaaattaatagctttaacacctgatgcagttcttcccattgatctaacatctttttcattaaatttaacggcataaccattttgagttacaaccataatattagcatcaccataggtattctttacttttaataattcatcgccatcttttaagcttattgcgattaatccattctttcttagatttttaaattcacttaatggagtcttctttactattccttgcttagttcccataaacaaaaagccttcttttttctcatctgttacagtaagtactgtttgaatcttttcatcaggttctattgctataagatttatcagatttgttcctttcgcctgtcttccagcatcatgaacttcataagctcttaatttatacactcttcctttattggtaaagaatagtacatcagaatgtgttgatgttatcatcaagtgctcaacaaaatcatcttccttagttgacattgcttgaattccttttccacctcttctttgtgatgaataagtgtctgccgaaattctttttatatatcctgaatgtgttaatgttatcacaacatcttcttcttgaattaaatcctctatatcaatttcatttactattttttcaattttactttttctctcgtctgagtacctattctttatttctaatagttcctctttaataacatctaacagtttttcttcactagctaaaatagattttaaatattctatttgtttcattagctcattatactcttcctcgattttacctctttctaatccagttaatcttcttaatctcatctctaatatagcctgagattgcttctcagaaagttcaaacctttccattagagtatttttggcaatttcagtagtattagaatttcttattatacttattacttcatctatgttatctaatgctatttttaaaccttctaagatatgtgctctagcctctgccttgtttaaatcaaatatagttcttcttgttataacttctttttgaaattctacataattttctagtatttgctttaaatttaaaacctttggctcattattgactaatgctaacataataatgccaaatgtatcttgaagctttgtatgcttatataataaattcaatactacacttggattagcatctcttttaagctcgattacgattctcataccgtctctgtctgattcgtctctcaaatcagagattccagtaatctttttatcttttactaaatcagcaatattttctacaagttttgccttatttacttgatatggtatctcagtaacgattatcgagtgtcttccattttcttcctctatttcagcattcgctcttactattatctttcccttaccagtttcatatgcagccctaattcctgctttccccataatggtagcccctgtaggaaaatccggtcctgtaattttagtcataagttccaaaactgtgctttcaggattatctataagcataatagtcccatcaattatttcagctaaattgtgtggcggaatattagttgccatgccgactgcaattcctgatgaaccatttaccaagagattaggaaatcttgatggtaatactactggctcttgctcttcaccatcaaagttaggcataaaatcaactgtgttcttattaatatctcttaacatttcaactgctattttattcatttttgcttctgtatatctcatagcagctgcactgtcaccatcaactgatccaaaatttccatgtccatcaactagcatatatctcattgaaaaatcttgagccattctaactaatgcatcataaactgaactatcaccatgtggatgatatttacctaaaacatctccaactattcttgcacactttctatatcccttttcaggagttaaccccaattcttgcaacgaatataatatccttctatgaacaggttttagtccgtctcttacatctggtaatgcacgaccaactataacactcattgcataatctatataacatttcttcatttcgtttttaatatctactggtataacttttccttcattaaaatccatgtacttcacctcgtatttcagtactaaatatctaaattaacaacatttctagcattttgttgtataaattcttttcttggctcaactttttcccccatcaatatggtgaaaatttcatcggcagccatagcgtcttctatatttacttttaataaaattctcttttctggatccatagttgtatcccacaattgagatgcattcatttctccaagacctttatatctttgaatatcagttgaattatcttttccacctagctcagataaaacactttctaattcaggatcactatatgcataataatcttttttacctttactaactttatataatggtggttgcgctatgtatacatgcccatcatctattaaattcctcatatatctataaaaaaatgttagtaataatgttctaatatgagcaccatcaacatcggcatctgtcataattataattctattatatctaatcttttcaacatcaaaatcatttcctatgcctgctccaaatgcagtaatcattgatctaatagtatctgcatttaatattctatctaatctttgtttttcaacatttaatattttacctcttaaaggtaaaatagcttggaattttctatttcttccttgctttgcagatccacctgccgaatctccttcgactatataaatttcacattcccttgggtctttagatgaacaatctgctaatttcccaggcaatgtagatctttccaagactgattttcgtgttaattctcttgcttttctagctgcatctctggctctggcagccattagagctttatcaacaatcattttacctatattaggattttcctcaagaaatattcctatattttctccaacaatagaatctacaattcctcttacttcactatttcctaatttagtttttgtttgcccctcaaactgaggttcctcaatctttatagatattactccagtaagtccttctcttatgtcatcaccagtaaaattcttgtcattttcttttatatgtccaaatttctttgcataatcgttaaatactctggttaatgcagttttaaatccaactaaatgggttccaccttcaactgtatcaatattatttgcaaaggaaaatatattttcagtgtaaccatcattatattgaatagcaacttccacggatatattatctttcacgccttcgatatatattggttcttcatgaagtggaactttgttcctatttaaatagctaacaaatgatttaattcccccctcataatggaaaacctcttctttttcatctcttttatctactaactttatatatattcctttgtttaagaaagctaactctcttaatctttgagataaaacttcaaaatcaaatactatttcatcaaatatttctgtatcaggcttaaaatatgtctgtgttccagtctgatcactatcccctattttagaaagctcattaagaaccttccctttactataattttgctgccatatatgtccatctctcttaactgtgacagtacattcttctgaaagagcattaactacagatgcaccaactccgtgtaatccacctgaaaccttatatccccctcctccaaatttaccacctgcatgtaatatagtcattataacttcaacagtagattttcccatcttaggatgtattccgacaggcatacctctaccatcatcatttactgtaatcgaattatcctcattaatgtatacttctatcttattacaatatcctgctaaagcctcatcaatgctattatctacgatttcatatactaaatgatgaagtcctcttgaactagtgcttccaatatacattcctggtctttttcttactgcttctaatccttcaagaacttgtatctgattttcatcatattttttgttattttgttccaaatcagactcctcctaaacttaataagtattattaaaattttcaattttatggaattaagaactatattctatatctgtcctttttgttaatgtagttgatgatattggtgataaatatattttactcttattatctacttctgctattataaacgactttggtttttcttctgttattctttctacaaatccgtcttcttctgctagccttaaaaattgtattgtatcagagctatacatcgtattttgaagatcgaatattccaataatgtctttaataggaactactacattttcacctaaatgcaaaaacattatatattcctcccttgatttaaaatttgtccgtttgatacattaaatatcttgactttatcatctaaataatcatttaaatcctcaattccagcacatgttattatagtttgtatatcctttattgatcttaatatatattttttcctatttacatcaagctcggataaaacatcatctaacaataatactggatattcacctgtaatctctctaatgatttttaaagatgcaaatttcatagttaaaatcgatgttctttgttgtccttgagatccgaaaaccttagtatcaatattatttataaatacgctaaaatcatctctatgaggtcctacagacgttaaccccttttccctatctttttcaatattatcttttagtttttttaaataattatctttaaattttccattctctagattaacagtacaattatatttaaagtttatttcttcttttccagatgtaatttctttatgaattatatcaccgtaaaaatttatcttatttatatattctaacctttttgaaataatataatcagcatatttacttaattgtatatcatatacatctaagatatcttcactaaatgacctgctctttaataaaatgtttctttcgcctaaaactttattatattgtactaaattgaagtaatagtttggatttacctgagataattccatatctaatagtcttcttcttaaactcggtgcttcctttataacttttaaatcttctggagaaaacattactacattaaaaattccaaataattcacctatcttatttacttttatattatttacttttatggctttcttaccatctctgagtatatttatatcgatctttttatctaatctatttttccctataagtaaacttatgtaggctgtactattttcccaatttattaattctttatcttttgatgttctgtgtgattttgcaaaagcacaataatatactgattctaaaatatttgtttttccttgagcattatctcccacaaacacattaacattttcagtcaattctacgcttaattttttataattcctataattaagcaaatttatatttttaacatacataaaaatacacctataataattatatcataaataatcaaataactatctctatattatttcaaaatctgaaccttcgaagtttactacatctccaattcttaattttttacctctttgagtacaaacttctccattaacctttatcattccatcttgcacataaatcttagcttctgaacctgagctagcaatagatgcccattttaaaaaagcatctaattttataatttcagtatcaatttttattttattcattttcattatataaatattaaaataatatttatcctcctatctcatcagtcttactggcaaaactaaatattttgcattttcattactattttcttcaataacacatgggcttataccagatgtcattttcataacaacttcattatcctccatgttctttaaaacatctagcagatattttgagttaaatgcaatttctatttcatctccttgcaattttatcgaaatttcatctcttacctttcccaattgagaattagaggttattactaagttatcttgatgtaaatctaattttattaaatttgtatttccatccttagccattagggatgctctttctatcgcattttgtagttcttgtctattaacatttacaaatagtttgtgttcttgtggtaataatgatttataatttatgaacttaccttctaataatctagatattattttagttctttttaaattaaataatatatggttattagtaaatgttatatccacaatctcatctatatcttctagtatctttgatacttcatttaatgtttttcctggaattacaacttctatatcaatatccgtatctaaaaattcactttttatagctaatctatatccatctagagcaactaagtttaagtttttatttctcacctcgaataatattccttgaagaataggtcttgtttcgtcttgagcgatagcaaaagaagttccctttatcatattttttaatatattttgatttactgatatttttaaattctcattaatttcaggtaactctggaaattcgtttgtgttcatataaactacatcaaatatggatttttcacaagttatttttattatctgattttccatagtttctattcttatagttgaattaggtagttttcttattatttctccaaatattttagcatcaataactatacttccttcttccataatagttgcatcaactaatgtttgaatactaacatccatatctgaacctataagagttattgttgaattacttgcatttatatgaataccttctaatataggcattgttgatttacctgttatggctttttgaactattgatataccttctaatattttttgtttttcacatgtaaagatcattgaaaatcctccttattttattcacaagaattaaagatgataattagtagttagataaatatttttatagtaataatagtagtaggggctgttaatttgttgataactagtataatcgctgtaatatcaacaaaatttagttcaaaaatattgtggataaatcagtaacaaaacagactggttatccacaagtataagcgtaatataactaaaaaaatattatccacaagttattatgtacttattatacagctctgtggattaattctgagtcaatttttttgtaatgtcgttaacagtattctgtaatgaatcatcagtcttgagattctcagatattttctcataagcatgtattaccgtggtatgatctctccctccaaattcttctccaattttaggtaaagacatatctgttagttttctacttaaatacattgctatttgccttgggtaagcaacatttctagttcgcctttgagattttaaatcttcaacacgcaaattaaagtaactagaaactacatcttgtattaagtcaatagtcacatgctttccttgctttttagatattatatcttttaatgcttctgtagctaaatctacagtaacttctctgttagttaatgaggagtaagcaattattcttattagtgcgccttcaagttcccttatattagatttaattttagtagcaatgtatcccataacttcatttgctacatttaaattttcaacatcagctttcttttttagtattgccattctagtttcgaaatcagggacttgaatatctgctattaaaccccattcaaatctagatcgaagcctatcttctaatgttggaatttcttttggcggtctatctgaagataatataatttgtttattcgcatcatgtaacgcattaaatgtatgaaagaattcttcttgagtacgctcttttccggctataaattgaatatcatctataagtaagatatcaacattcctgtatttatttctgaattcttcattcttatcatcttttatagcgtttattaattcattggtaaatttttcagatgagacatatacaactttagcattaggattaccatctaagatgtaatgacctatggcatgcattaagtgagtctttccaagtccgactccaccatatatgaataacgggttatatgcttttgctggtgattctgcaactgccaaagatgcagcatgagcaaatctattactattacctattacaaaagaattaaaagtatattttggatttaatgtagacgacatttcatcattaactacaatagcttttggtttctgatttgacgaactcttaatttcttctttttcatagatttcagacattataataaattcaattgtatataattttgaacatactgcttttatggagtttgcaactaaatctttatatcttttatctaaaatatcttgagtaaaggaatttggaacgcttatctttagagtattagaagaaatagacagaggttcgcagcttttaatccaagtattaaaactaacttcacttagctcactttttataatatctaaggttttatcccataaatttttaagatcggcatccattcttattcctccaataattgtaataaaaaaatttttataatagttatgtacagtttatcaacaatgatattaacattcatatattatagccaagtatgtatataaatatatcaacatgttaataactatgtgtatagattaaatttctataaatttaataacaatctgttattaagtgttataaacatgctaagatctaaataaaatcaactataaagcatgtactaacaataaaaataaacaagttatgcacaattttatccacacatgtggataagtttttatattaataagttattcacaacataatatttatgataacataagtaaatactcatattcaataagttatccacaaaaaaatatatataaatatatttatcaacaattattaccaccttgacagaaaaatagtatatctatataatgataaagtaaaatttaaatagcgaagtatagtttttactataaataataaatttaagggggtgcatatgtaatgtttatgacttaccaacctaaaaagagacaaagaaaaaaagaacatggttttagaaaaagaatgagcactcaatcaggaagaaacattcttaagagcagaagacaaaaaggaagaaaaaaattaacagcttaagggcccattagtggccttttttctgcaaatgcagggaaaaaaggagtataaaaatatctatgatttatagattaaagaaaaattttgaatttacaattgtatataaaagaggtaaatcatttgcaaatgagcttctagttatgtacatattaaaaaatagaaggaataaggatagagattttttagcctatagcaaggtaggtatttctgtaagtaaaaaagttgggaatagtgttgttagaagtagatgtaaaagattaataactgaaagctttagattaaattataattatatagtaaagggatatgattttgtttttatagcaagaaatcctcttcaaagtaaaagctactttgaagtagaaagagctatgagaagtttaattaaaaaggcaggcttatataataatgaagaaattactaatacgcctaattaaattttatagaaaatatatttcacctggaagatcttcatgctgtagatttgtgcctacttgttcacaatatgcaatagatgccataaataaatatggagcttttaaaggtagtgcattagcagtttacagaatattaagatgtaatcctttttgtaagggtggatatgatccggttaggtgagatattaggaggtatatattttaatgtttcaagcaatagttaactttatgaaagggatatttgattccctgcatgactttatagttagtatgggaatatcagatgttgggctatcttatgttttggcaatatttatttttacattgattataagaattttaatattaccatttaacattaaggcagcaaagtcatcacaaggaatgcagaaaattcaaccagaagtgaaaaagcttcaggctaagtacaaagacgatcctcaaaaattgaatactgaaactatgaggctatataaggagaataatgttagtgtagctggtggatgccttccatcattattacctctacctatactaatggctctttattgggtatttatggggatacaaggaatagaaggtgcttcattcctgtggattcacgatttatttgcaccagataaatattatatattaccagtattagctgcattgtcaacatatataccatcttatttaatgtctaaatcaacaccatcacaaccaggtggaatgaatatgggaagtatgaatttagttatggctggaatgatgggtgttatgtcattgaattttaaatcaatacttgtactttactggataattggtaatttaattcaaacaatacaaacatattttttaaactataggccagcaatgagagagatggatgataagactcaaaaagatgctgtagcagaatcagataaatttgttgtggcagtggaagaatctaaaaattcagctagtaaaaagagaaaaaagaaataatcaaaaagtgattttgctttgatattagaggtggtgaattaacagatgaaatcagtagaagtggaaggaaagactgttgaagaagccttaaataaagctttaagtgaacttgatgcaaataaggatatggttgatattgaaattttggatcatggctcaaagggtttatttaatgttataggagttaaaccagcaagaattagagtttctagaaaatataattatattgaagaagcacgaaactttatagttcatatactcaagggaatggaagttgaggcaactattgatattaaagaagagaatgatagcattataattaatttatccggagaaaaaatgggagtgataattggttatagaggagagacattagattctattcaatatttagtttcacttgtagttaataagttacatgaacttcctcataaaaaggttatactagataccgaagattatagaagcaaaagagaggaaactcttaaaggtgttgcaattaaaacagctaatagagttaagaaaacaaaaaaatcatttaaactagagccaatgaatccatacgagagaagaatcattcattctgcacttcaggaagatgcctttgttaatacatatagtgagggcgaggagccgtttagaagggtagtcgttgaattaaagaaagattaaacttaaaaaagaaagccataatggctttctttttaagtttataaataaaatttatgactaaaaagagaagttttagctaatataactttgactatttaaattttgttatgtaaaattgataatagttaaaaaggagttttagtttagaaaatattcttctttaaaaagaggaggaaattaaatgaaagaatttgatactatttgtgcgatcgctacaccaatcggagaaggcggagtttcaataataagaatttcaggggagaatgttttaaagattgctagtaagatatttacccctaggaataaatacgatattgaaagcatgaaaacatacactatgaagtatggtaatattgtggatttagagaacaaaaaagagataattgatgaagttattttaagttatatgaaagctccaagaagctatacgggtgaaaacgtggtagaaataaattgtcatggaggagttatatctactaatagtgtattagatcaggttattaaagctggtgcaagacttgcagaacctggagaatttactaaaagagcatttttaaatggaagaatagatttgagtcaggccgaagcagttatggatataataactgctaaaacagagttatcgatgaaagcagctatgattcaaagcaaaggggctttatctaaagaaataaatgaattaagagggtatttgctaaacgttttagcgctaattgaatatgcagttgattttacagaagatgatgaggatatcgttgatgacaatttaattttacagattaaagatgggatcgagaatacaaattcaaaaattgaaaccttattgtctaatgcggatgcgggtaaaattgtgagagatggactcaatatagttattgtaggaaaaccaaatgtaggaaaatcttcattacttaatgcattattaagagaaaatagagctatagtaacagatgtcccagggacaactagagatataattgaggaatatataaatcttgatggaataccggttaaaataaccgatacagcaggaataagagatacagaagatgtagtagaaaaaataggtgtggaaaaatcaaaagagaaaattgaagaagcagatctaataatactcatgcttgatgcatctagatatatagatgaagaagacagtagaataattaataaaataaagaatagaaaatatatagtattattaaataagatggatttgaaagatataaaaattcaagaagaaatacttaagaatctaagtaatataataaatatatcagctaaaactggccaaggaatagatattttaaaagatgaagttaaaaagttattctttaatggagagataagctctgaaagcttaataatttctaatgcacgacataagcaagcgttatataaatcattagaaaattgtaaaatggctttagataaaattaatgctaatgaatatcttgatttaatatcaatttatataacagcggctatgaaagctttaggagaaataactggagatgaattagaagaagatttattaaacaaaatttttagtgaattttgtgtaggaaagtaggtaaaagtaatggcagtaaattatgatggtggtcaattcgatatagttgttgttggtgcaggtcatgcgggatgtgaagctgcattggcatcagcaagattaggccttaatacattagtatgtacaataaatttagattcaatagcattgatgccttgtaatcctaatatcggtggtactgcaaaaggtcatttagttagggaaattgatgcacttggtggagaaatggggatcaatattgataatacatttattcagtcaagaatgttgaatacttcaaaaggaccagctgttcactcattgagagctcaagcagataaaaaaagttatcaatttagaatgaagagaattttagaggaacaggaaaatcttaaaataaggcaaattgaggtaactgaacttaatgttgagaatggaaaggtgacaggcgtagttactaaaaatggagctatttttaaatgtaaggcggtaattcttgcaactggtacatatttaaagggaaaaattataattggtgaagtatcatatagtggcggtcctaatggtttatttccagctaatgacctatcacaatcattattagatttaggagtttctttgaggagattcaaaactggaaccccagctaggataaatagaagatctgtggatttttctaagatgatagaacaaaatggtgatgataatataatacctttttcatttatgagtgaaaatattgaaagggaacaagtatcttgttatttaacctatacaaatgatgaaacacgtaaaataattagagataatataggaagatctccaatttataatgggagtataaaaggcgttggtcctagatattgtccatcaatagaagataaaataatgagatttccagataaaccacaacatcaaatatttattgaacctgaggggcttgacacactagaaatgtatgtaggtggattttcatcatcattaccagaagaagtacaaattaaaatgcttaaaaccttaccaggacttgaaaatgttgaaatgatgagaactgcatatgcaattgagtatgattcaattgatcctactcaattaaaaccaacattagaatttaaagatattgaaggattatatggtgcaggtcagcttaatggaagttcaggatatgaagaggctggagcacaggggttaattgcaggtataaatgcagcattaaaaattaaagaaaaagaaccactaatactaactagatctgatgcttatataggagttctaatagatgatctagttacaaaagggactaatgaaccttataggatgatgacttcaagagcagaatatagattattattaaggcaggataatgcagactttaggttaactaatttaggatatagagttggattagttacagaggaaagatatgataaatttataaagaggaaacaaaatattgaaaatgaactagaacgattaaagaatttaaaggtaactaataaaaaagaaataaatgaatttttaatatcattaaattcagctgaattaagaaagccaattactttttatgaactgctacaaagacctgaattagattactttgatttaaaacaaatagattcggagagaccagaattacctcatgacgttggagagcaaattaatatattaacaaaatatgaaggatatatacaaagtcagcttgaacaagttgctcaatttaagaaatttgagaagaaattattaccaaaggatattaattatagtgatattaaggggttaagaactgaagcaatacaaaagttaagtgatattaggccaataagcataggtcaggcaacacgtatttcaggagtgtctccagcggatatttcagtattacttatttatcttgaaaattattataataaataattttaattattattggaggaattatgaagttttatgatttaatgtctaaatcagcagaagatgttggtttacaactatcgaaagagcagtatgaaaaatttattgattatatgaaacttcttcaagaatggaatgaaaagattaatttaacagctataattgatgatgaagaaataatcaaaaagcattttattgattcaataaaagcatttaaaagagacgaattcaaaattgctagcagtttaatagatgttggtacaggagctggttttccagggttgcctattgcaataatgagagctgatttgaatgttacactattagattcattgaacaaaagagtgagttttttaaacacagttattaatagaattggagcatctaatgtaacaactatacattctagggctgaagatggagcaaaagatattaagctaagagagaattttgatattgcaacatctagggctgttgcaaatatgagtgtattatctgaattatgcttaccatatgtaaaagttggaggaagttttattgcgctaaaaggtccatcagttgatcaagaaattacagagagcacaaatgcaataaagattttaggtggaaaaatattagaagtttgtgaaattaacattgaagatacagaattaaaacataacttagttgtcgtgaaaaagatagatagatctcctaagggatatccaagaagggcaggattaataagtaaaaatccaattaaatagagatattacataaataattgaaatttgattatgtaagcaggtatatgataaaatattaaggtaggagctatatagacaaataaggataataaggtaaaatatgtatgtagtattttaataagggatgggttgggaacatgaataatgaaatagtaagtattagcataaataaagtcattccaaatatttatcaaccacgtaaatattttaatgaagaagctatagaagagttatcacaatcaattagagaacatggaataattcaaccaattactgtaagaaggcgcggagaggtctttgaattggtagcaggagagagaagacttagagcagctaagttagctgagttagagacggttccttgcaatattatagatataactgactctgaatctgctcagatagctctacttgaaaatcttcaaagagaagatttaaattacatagaagaagcagaagcttattataatttaataagtgatcataattttacacaagatgaattagcaaaaaagatgggaaagaagcaatcaacaatcgctaataaattaagattgctaaagttaagtagtgaagtcagggaattatgcttaaagaataaattaactgaaagacatgcaagagcattgttaacaattccgactgaagaaatgcaattaagaattgttcaaaaagtaataaaagacggattaaatgttaagaaaacagaagaattaattaacaaagaattgcttaaattagctggagaagaattaaaaaataagaataaaagaaatataagaggtgtattgccggctaaactttatgttaatacaataaaacaagttttgcagaaatttgatattccagctgaatattcatataaagatgatgatgaatttatagaagtagtagtaaagataccaaaaacaaaaaaataagaggaataattggaagttaaggttttaccaagtattaccttaactttaattatatatacatgttgtaattaaatttctacattttggtcttaacttagggcttacatgaatagaattctaaatgtaaatttattattgcaagtatatattaatcttatatttatacacagaaaattaagaattaatgaaaaatattttatgatagaatatattttattaagagttattgttttttagaacataattcttttattataataaaaaagtatatataatattaatatggaaaggggggacgctcttttagggctgtgcttatgaaagtaatttgcatttttaatcaaaaaggtggggttgggaaaacaactactaatataaacttatgtgcatatttagcaatggaaggttatagagtattaactatagacatagatcctcaaggaaatactacgagtggattaggattggataaaagtaatttagacttatccatttacgatgtgttaatttctgatgcaactatgaaggaatctatagtaaggagtgacttagtccagaacttgtacatatcaccgtcaacgatggaactagctggcgcagaggtggaacttataaatagaagtgatagggaaaatataatgaagaataaattaaaagagattgaatcagaatatgactatgtgtttatagattgtccaccatctttaggggtattaacaataaatgcattaacatgtgcagattcagtgctaataccaatacaatgcgaattctatgcattggagggggttagtcaattaataaacacaatacaattagtaaaaaaatctcttaataaaaagctagaaatcgaaggcgttgtaatgacaatgtttgattataggacaaatcttagtaatgaagttttgaaagaagtgaaaaaatattttaagaataaggtatatgaagctacaatatctagaaatgtaaggcttgcagaggcgccaagctttggacttccgataatgttgtatgacgaaaaatgtaagggcgctgaggcgtatgtaaaattaactaaagagtttttagagagacagtaggtgatagaatggcaaagaaattcgccttaggaaaaggattaggagcacttataccggaggaatcagataatactgcacaagaaaataatagtttgctcattcctataaataaaattaaaagtgatgaagatcaaccaagaaaattgtttgactccgaaaagatagctgaattagcagagtcaatcaaaacccatggtgttattcaacctttaattttaagagagctaaaagatgatagatacattatagttgctggagagcgcagatggagagcggctaaaatggttggattaaaagaggtcccagcaataataatggaattaagtgatagagatatattagaaatatcattgatagagaatattcaacgccaagacttaaatccaatagaagaggctttagcatatagaaaattgttaaatgattttaaaatcacacaagaagaattaagtaaaagaataggaaaatcaagggttgctattgctaatacaatgagattgatgaatctggatgaacgtgttcaacaatatataattgagagtatcataacggaaggacatggaagagtacttctttcaataaatgataagcagaaacagtatgaaatagctcagcaggtaattgatgaaaaattatctgttagagaattagaaagattaataaaaagaattagtgaggatattgaaaaggaaaaaaataatgaaaacataggagaagtaaatccttattataaagaaattaagaatcagcttcagaactattttggaacaaaggtaaatattttaaacaagaaaaacaagggtaaaatagaaattgaatattattcagaggaagatcttcaaagaatactcgacattattaatatgtaatgtttcacgtgaaacaattatgaaaggaatgacacaagattggatatgctaattagtgcaatgaatgatataatgccatatttattaattggaatgtcaataataattatattattatttataatggtagtggccttatttaaagcagttggaaaagtagaaagcagatacagaaaattaatgaaaggtactactaataataatttagaagaaatgttactggaaagattagatagtattgaagatgctaaagaaagatctgataaggctctagaagaatgtaagagattagaagttaagatgaaggattgtgttcaaaaagtagcaattatgagatataaggcattcgagaatgttggtagtgacttgagcttttcgatagctatgctagatgatagaaatgatggagttattttaactggtatatatggaaggcaagaaagtacaacttatgcaaaaccaattgataagggaatatcaagatatgacctttccgaggaagagttatatgttttaaatgaagcagctaataaagaaaattaaaattagtagaattgattttagttaagtgggcaccaatagattttggtgctctatttttgtatttaagaatgtcacaagttggacttgtggttacggaaagcttttgactgtaagtaaagaaataaatctctgctgcaaaattatagcatgtttgccgacttgaactatgaactacaaggcggtgtatcttttgtggacattgataatttagagtatagtgaacggaatggtaaatatcatatggttttcatgccaagatttagaagaaaaatcatatacaagaagataaagaattatatatgaaaacacctgaattattatgcgaaaaaaacacttgaaattataaaagtgaaagcatttctagattatataatatgtttgtaagtacaccacctaaattaagtgtagtgaaatctatgggatatctgaaaggtagaattcattgatgattttttatagacacacaaaaatgcaagtatagaaatggacaattttctgtaaggatattatgtagatataataggaatgagcataaagataataaaagagtatataaaaataaaatatagagaagatatagcgtatgaataaatgaaccttgaaggaatatatcaacgcatttacatagataattaagattgatttccttattgaaaaatagatattatctacaatggtgcagttttgtttaaagaaatttacagttgaataaaaaaacatattacaagctatttctaatgactagaaaaatttttctatagacctacccgcttgaagtagctttgtaaatatattattttagacttttctaaattcttattagcaacttatattcagcattaatgtgaagaaaatcaatacagtatatttcgcaataagtataatttactaacattatgattagatatctattaatactttttttactttttgcttgatttccatctagccctaagtaagttttgcaatctctaaaaatggttcgatcgcctaacgaacagctaatatataggctttattttcaagcttgagaagtgttgtaattaatttttgagttaattctatttttatcatataatctttattatagatatcaattgagtatggcagaactaatccgttacacggtagtaaagaaactattatttgaaagaaatctagtaatactagttctatgtttcgaaggagcaagctctactatgtcggaaattttaacattataaccttctgatatcatagcattcattatattttctaaattcattaattgacgcgtatttaagtaaaaattaaaatttagttcttttaaaaaattgtatattgatagttcatccgatacaattgtgttttgaagcatttatgtatggctccttgttggcattattgtgtggtaactcaattataacaaggatttgtcatagatgtttttttactttatttagttgtagaattattcaagcatttttacactagtatagttataagtaagtgattatagctatgttaaaaaccagaaaactattaaattataatataccacgcatggctagaaagtttttattattaaaagaaaattagcaaagaaaataaagattgtttcacgtgaaacaatctttattaaaaaataatacaaaatagtattacactgatgacaactatataagtttaaaataaattaataatcatagaaatgagaattgttttgttaaaacaattaagaattaaaagttactaaaattgaatatttcagaagtgctagtagttctaggcctatctaagctctttaaaataaaataatagatacctctagaaattgaatctgcgagattcataacagtatataatctagtattttgtaaaactaaaaaatcaaatcctccggatacatttacaataccagttatgctcatatcaccaacagcaggaaggttcttatttaaagccaaaccaggaagtagaggctttttctgtatgaaaactttacctatattatttatagatcctaaacaagaatcgattgctataatatatggatttataaaattaaaatttatctcatttaatttacttactatattttttgcatgtattggattttcgagtgttccaaatatatatatattattcttagaaaaatgttttaatttatgtcctactaatgggcctaatgaatctccagtagatctatcacttccaatacaaataaatataattggtctatcttcataaagtattggttgtaattcagccaataaataatctttgattttagtacaagaagccagtgaagatgagtttacagaaaaactttgacacataagaaaacctccttttattagatttatttccaataaaaagaggttttattcattgtctaaaaataataaatagaatacaaattaaattaataatcacatctaacaagaaaataatataaaaggtatgtattaaggccggtgctaagagcacttgaaatatttgttgttatagattttttggaattttatttagaaccgtaagcgcataattaacttcttccttagttgtaaaataactaatgcttagtctgacagttccggatggataactacctatggtcttgtgtgctaatggagaacaatgcaaaccagatctagtctttattccttcacattctaaataatatcccaattcagaaggatcgagggaattaagatttatagaaatacatgaacttagccttttgccagataaatcaccataaacagttattcctttgatgtttagcaaaccttctagcatatgttttattaaatagttattatgttcataaattgaatttaaacctactgagtttatgtatttaatagattctgataatccaactatccctggaagattatgagttccacattcaaacttatcaggtagaaagtctggttgtgataaagaataagaaagacttccagtaccgccatgtattagacttgaacaagagtcgttaaatttagagtccaatataaatccaccaattccttgcggacccaataaacttttatgtcctgtaaaagctatcgcattagcttttatgtttttcatattgatatctagaacaccggcaccctgagaagaatcaacaatgaaaaaaatattgttttcatcacatattttaccgatgttatataggtcttgtactgagcctgtgacgttagatgcttgagtcattacaactagccttgttttattagtaattttcttctttaaatcatgggcattgataaaaccttcagaatttgcagctactatatctaattcaatttgaagattctccttacaaaagaataatggtctaataacagaattatgttccattgaagatgttattacatgatcaccatgccttaaaatacctttgattaatatgtttaaagatgtagtaacgttgtttgtaaaaataacattactaggggaatcataaccaaaaaaattgcaaattaattctcttgcatcataaaggcatctattactttgaagagaattactgtaatttccacggcctgcattgccacctacatttagcatatagtcacacatggcattaataacttgctttggtttaggaaaagttgttgatgaattatctaagtaaacttccatatcaagtattcacctctaaaaaaataatttgtaagagccccaaataataaatattatacccaaagcaaataggaagtagtccaatatcttagttgtattattggccaaatcaggtttgaatttcttaaaacctttacttactaaaatattaagaaagcaaaaccaagttatacttccaattatcattgatgagattgagaatataaaatatatccttccatgatgtctccaaacattgaatatggttccacttaatgcaatccataatgatggagttgttggattgagaaacgttatcaaaaaaccagttaaaaaaccatttgatgaacgtctataaattgatttttctaagttaaggcctggctttttagctgtaaatgatattttattagatataattaaaacaataccagatactatccaaaatagactgtgaaacttaggatttctggtaagtattgtaaaaagacctaggtttataattactatatatgttatatctgcggatacagcaccaagtgatactttaaatccctctttaaaaccttttgatattgaacgactaacagattcaaggcctgagggccccaaaggtatagaggcaacaaaacctgtaaaaaaaccaattaatatagcttttaatatgttaattactgaaaacattatattctccttctaattgcatttctatataattataaaataaaaagatatatttttcactaaatttatgaagtttttatatgaatgtgttcttaacctttataaatttaaaaaaatatatataatattaatataagttataataaatattatataggtggtgtaaatatggattattatataatagtattcaaaaatacatatgatgcaatgtcagcagaaaaaaaattaaaagaattagatctagagtttagaataatgccaactcctacatctataactatgagttgtgggatatgtgtgagaatagataaaaaggcagatatagataacataataaatgatgatttaatggaatataaaaatgtatactatagaaatgatgaaggatatatactaattaataaataggaagggggattatgtttgtatggtaattacttaatagagttagaggaagatttccaatttttaaaggaattgaaatctaatattaatagtacgctggtagatatcataagtgttaaatcaatcgagctaataataaataaagcacttaaaatagcagtagtaataattataatgtatttttctataaaaataggtaagcatttaataaaaaagttcgttgataaacaaattgaaagtaatgcagtgatttctttggattctcaaagggcaaaaactctgggggaagtattgaaaagtgttttaaaatattcagtatattttatggggataacaataataatatcaattgtatttggtggtatgtcatttacgtttgcgagtataggtggaattgcagttggccttggtgcgcaaagtctaataaaagatctaattaatggattttttattttatttgaaaatcaatttggagtaggagatcatgtaacaataggaagttttaatggaattgtcaaaagtataggaattagagccaccgtgattaaagattttacaggggatatacattcaattccaaacgggtcaataggtggagttacaaatcattcgaggaatgatattaggttcacggtagacatagatatatctccacaggaagatattaaaaaagttattaacgttataagagctgcttgtgacgagtttaagagcaaaaacgaagaatatataggtgaatccatagaaataactggagtcatagctcttgaagtatcgaaggttacaataagagtagtagggaatgcaaagccattaatgcagtggaaaatggaaagagagcttagaatgtcaataaagttagctttggataaaaatagaataaatgtatcattggatgagaaacaactagataatgaaaatatagagaaggatggggagtaatggtagaaaactttaatctcggagatgtggttgaaatgaagaagcaacatccatgcggttcaaatcaatttgaaataataagggtaggtgcagatataaaaataaaatgtactggctgtggtagaattgtaatgattcccagagtgaaatttaaaaaggaagcaaaaaaaatagtaattgctgcagaaagttagcaaaaaaacttgattcattcttttattaatggtataatcattaattgtaatccctgctatgcaaagcatagccgttagtccgaggggaggaggtgaaattaatgagaaagtacgaaactatatttatattaaacccatcattcgatgaagaaactgtaaaagctaacatcgaaaagtttaagggtgttatagaaaatggtggaggaacagtagaaaatgttgatttctggggtaagagaaagcttgcttatgaaatctcaaaagttagtgaaggtttttatactttagttaactttactgctaaccctgaattaccaagagagttagatagaatattcagaatcactgatggtgttataagacatatcattgttaatgaacaagtataaggtggcgttgtaaatgaataaagtagttctaatcggaagattaacaaaagatccagaactaagatttactccaggaagtggagcagcagtaacaaccttaacattagcagttgataaatataatacaaaaactggccaaagagaagcagattttgttcctgtagtagtatggggcaaacaagctgaaagtactgctaattacatgagtaaaggtagccaagtggctattagtggtagaatccaaaccagaagttatgatgcgaaagacggaactaagagatatgttaccgaagttgtagcagatcaatttggtggagttgaattcctaggaagtaaaggaagtaattcatcaggaaatagttttggtaatagcaatgaatattcagcaccagcgaatgatgcattcagtggtggatttgaagaggatataactccggtagatgacggagatatgcctttctaaaattttaagtaaggagggaatataatgagcagagaagaaggtaacaacggtagaagacctggtggtaaaatgagaagatctagaaaaaaagtttgtgctttttgtgtagataaagctgaatttatcgactataaagatataaataagcttagaaaatatgttacagaaagaggaaagattcttccaagaagaatttctggaacttgtgctaagcaccaaagagaattaacatcttcaattaagagagcaagaaacatagcattattaccatttacaacagaataatggtagtagtaatattccccctgagaaatcagggggtttttaatataaaaaaatattattattaaatcaatctcttaacctttgtggaaaaatatagcaaattatctataaattcttgcaatactcacaaaaaaaatttaaaataataatacaagggttttgagagaggtgatagactatgagaaaagataattttaatattatgactaacattaaaattatagaagatttaaaagcacaacttctttgtataataggagagtttttcagactattgacaaaaggtaacaatgtagcccgtgattctattttagattgtatttcaggagctataattatactatatattctaggtgataagttaggatattcattggtagatatagaccataatataaaatcaaaattagatttaggggtaagagcagaggatcaagttgaaaaagaaggtaaaagcttaagtaagttgaagcattatattagtaacagaagagattaaatattcttaggaggctttttatgaattggataactatgcttaaacgtttgcttaagcctggattactaattacaattttaatactattatttgcatataattatacaggcataggtataattatcctagtaatctattttatagataatttccaccaattaaattattacttggaaaaggaaagtgattttaaccaatttataaaaagtataaataaaggtatatcagagaatgcattaaagtcaatatatccattagtattgataaaagaagatggagaaatagtttggtataataatttatttaacactttaaaatcagatgaagaaaatactgaaaagaatattttaagtatagccagaggcataaatctagatgattttttaaagaatgaaaataatttgcatcaaagattgagcatacaaaataaattatatgatgtatacgctactttaattgaaactaaaaataaaaaaaatctatacttattatcttttaatgacattacgaagctaatagattatgaaaccactcaagagagtgtaatgttaatagaagtagataattttacagaagtaatagataaaaccgatgataacaacagaccgcttttagtagctgaaatagagagaacaataaacacatatgccaataacttaaaagcaatgattaaaagatatgataccaataaatatgtattatcaattcaagataagtatattgaagatgaaataaaacacaagttcaatataatggaagtaatatcaaaaatagataaagggaattcaattgaaattactttatctattggtattggcagaggtggaatgtctccacttgaaaatcataacaatgctaatatagctaaagagttagcgttaggcagaggtggagatcaagttgttgttaaaactaatgatgacataaagttttttggtggaaattcaaaggaaatagaaaaaagaactaaagtaaaagcaagagttatagctagagctttgagtgaactaattagagagagtagtaaggtttatataataggacacaagaatcctgatatggattgctttggatctgcagtcggattggctagcgtggttaagcaattggggatcgggtgtaaaattatattaaataatgacattactgcaattggatatttcttaaataaattaaacaaggaatctaaatatgatgatttatttatatcagtagaagaggcaaaaagtgatttagatgcccaaacactagtaattattgtggatgttcataataagagttatgttgctgatttatcgctagtagataaagttcaaagaaaagtaataatagatcaccatagaagaagtcctgatatgatagagcatgatatacttaattatatagaagtatatgcctcatctacatcagagatggtaacagaaattattcagtatatggttgataagcctaaattaacaagaacagaagcagaaggtttgcttgcaggtatttttatggatacaaaagggttttcttttaaaactggtgtcagaacttttgatgctgcatcgtttttaaaatccttgggagcagatcctatagaaattaaaaagatgtttactgatgacctagaagattatttacttattgctgagactataaaatctgctgaagtaagagataatacagctattgctataacccctaaaaatattgatacagtaattatagcaaaggcagcagatgaattgctaaatatatccggaatatctgtaagctttgttttgggggaagtaaataacgatatatatataagtggaaggtcagttggcgatattaatgttcaagtagtgctagaagcacttggcggaggaggacatatgaatattgctggagtaaaaatatcaaataagacaattgaggaagtaattgttgaattaaaagaagtaatgaaaaaatacttaaggataggtgaataagttatgaaagttattttattacaagatgttaaaaagataggtaaaaagggtgatatcattgaggcttcagatgggtatgcaagaaactttttatttccaaggaaattagcacaagaagctagtgatgcaaatatgcacattttgaataataaaaaagaaaatgagcgaaaacaaaagttagcagaacttgaggcagcacaaaaattagctgaagaattaaaaggaaaagaaataaaaattaaagctaagacaggagaaagtggaaagttatttggtgcaattactagtaaagatgttgcagaattaattaaagaacagtataagattgaaatagataaaaagaaaattgttatggatacaataaaattagcaggcggatatgaaattgatattaaactatatccagaagttagcactaaaatgaaggtgattattgttccacaagaataaggaggattaaatttgaattcatatgatgacgcaagcttattgcaggatattatttcaggaaccttatcattagaatcacaaatcgaggctttattttctataactaagaatgtactcgacaaaggagcttttagggctagaacagttaggtttaaactagataaattcattcaatcatcaaatctctgcgataaagttttcgcactaaatactatattagcagagggaaaagatttaaaggttacacctaaggaagaagaattgcaaaaagccataaatagaacagttaggttaatttcaaatgaactagcaaaaagatatgttcaaaataaaatcgaatctcaagttgaacaatctattatggaaaagcaggaaaagtatatagatgaagttagactttcagttataaacaagcaaaagggttctgaaaataaaaagactatcagcaaattgaataatttaatagaattagatagtagaattactagtaaaaatattatgagctttttaagaccaacggattttaatcaagtagttgggcaagaaagagctataagatcattaatatcaaagctttcatcaccatatccacaacatataatattatatggacctccgggagttggaaaaactacagcagcgagattagctttagatgaggttaaaaaactttcatttactccttttgatgacaaatctaaattcgttgaagttgatggtactacattaagatgggatcctagagaaataacaaacccattgctaggatcggtacacgatccaatatatcaaggaagtaaaagggatctggctgaggttgggataccagaacctaaaccaggtttagttacacaagcacatggaggtatactatttatagatgagattggagaattggactctatgcttcaaaacaagctgttgaaggttttagaagataaaagagtagaattttcatcatcatactatgatccggatgatgaaacaatacctaaatatataaaatatctttttgataatggagctccagcagactttgttttaattggcgctacaactaaaagtccaagtgaaattaatccggctttaaggtctagatgtacagaagtgtattttgaacctctttcttcagaggatgttgtatttatagtagaagatgcagctaagaaattaaaggtaaacttagaagatggggttgctaaaaaaataagtaattatacatttgagggtagaaaagctgtaaatattctgacagacacatatggatatgcgttacaccgatctaaaaaatttgttgataacttagaaataaaattatcagatttagatgaggtaatatcagttggaagatatacaccatatgaaagactaagcaatgtagacaaaagcgaagttgggcatgtgtatggattaggcgttagtggttttttaggatctacaattgaaattgaagctacagtttttgctgcaaagaaaaagggttcaggtatagtaagatttaatgatacagctggaagtatggctaaggattccgtatttaatgctgcttcagtaatccgaagcttaaccgataaagacattaaagattatgatattcatgttaatatagttggtggaggaaaaatagatggaccttcagcaggtgcagctatcaccatttgcataataagttcgttgttaaacaaacctataagacaagatatggctattacaggagagatatcactcaaaggaaatgtcaaaccagttggaggaatatttgaaaaaatatatggagctagaagaatgggaataaaaactgttttaattccaagtgataataaaaatgaaattcctctaaatactgatgacatacatattagaactgtaggatctataaaagagattatggacattgcccttatttaatttaatgaaataggtctccttaatatgaaggagacttttttttgcaactaagaaatgatagaattagaatgatgatatacaaaagataaagggaaaattaattgtcaattgataattagataggaggaataaaacttggatgcatcagttatgaggagtttgcctcaaagcatagaagcggaacaatcagttataggatctatgatcatcgataagaatgctattgccaaagttctagagagtttagaagaagcggatttttatagagatggtcataaggtaatatataaagctatacaagaaatgtttagaagtgatatagcagtagatttattaacactattagaatatttgaagagttctgatatgcttgagagagctggaggggtaacctatataacagaaataagctcttctgtaccaactactgcaaacttaagcgcatatataaaaattgtttctgataaatctacgttgagaaaacttattaagtcatcaactgcaataatagaagaaagttataataatcaaagtaatgtggaagatgtcgtggatagtgctgaaaagaaaatatttaatatagctgaaaaaagaacatcaaaggatttcgaacctttaagcgatgtattagaaagaggatttgcacaaatagagaaattgttcaacaataagggaacaattactggtgtaggatctggctttactgatctagatgcaaaaacatccggatttcaaagtggagatatgatattaatagcagctagaccttcaatgggtaaaacaacatttgcactaaatattgtagaacacgcagctcttagagaaaataaaagtgttgtagtcttttctctggaaatgtctaaagagcaattggcatataaacttctttgttcagaagcaaacgtagatatgttaagccttagaactggaactttagaagataaggattgggaaaatatagctatggctgcaggtccactttcaaaggcaaaaatttatatagatgatactgctggcgtaactgttatggaaatgagatcaaaatgtagaagacttaaaatggagtatggaatagatctaatcgtcatagactatttgcagcttatgtctggaggagcaggtagtgataatagacaacaagaagtatctgaaatttcgagatcgattaaagcattagctaaagaaatggaatgtccagtaatagctttgtctcagctgtcacgtgcgcctgagcaaagagcagatcataggccgatgttatctgacttaagagaatcaggatctatagagcaagatgccgatattgttatgtttttatatagagatgaatattacaataaagaaactgaagataaaaatatcggtgaatgtataatggctaagcagagaaatggaccagttggaactgttaaactcgcgtggcttggtcagtatagtaaattcggtaatttagatttaattcataaggaataaaatttaaataattagtaatactaaataaaaaagatataagaaatttatataaatataaaatttcttatatctttaaatgatgtgaataatatgattattattaaacagcttttggaattattaattttaaactgcttttattatcatggagtaaaatattacttacatcaacttttgataaataaaaaatccgctgaaataaaaattcttttgaattattattaaacataatttttaatattaaaaaatgatttttataagatatttctaatatatgtttactatcatagaatgaatctacatttatgtaataaaaatctgaagattcttcaagttcacatgtaggaagttgttcttcgagctcaagagatagcacggaattaatgaattcttttgggcttattaaacaattattatatactaaaaaattatctttcatatatattcctcccttcatatttaattatagtttgtgaagttttaatacaagctatcctatgatagtggtggtttataattaagatattcatataaaatgataaaatttgaataaataacaaaaattttttaatgggggctatgatatgaataaaaaaattggtttcattggttgtggtaatatgggaagttctatggttggaggtcttattaaatctggatttataaaggctgatgatataatagtatcaactaaaacggaatcttcttcaaagcgattagaagaaagtttccaagtgaaaacaactttagatagtacaattgttgcaagagaatctgatgttattattttagctattaaaccttttatgtttaaggaaatgataagtgaaattaaatcggaattaacaacagataaattaattattactatagctgcaggaattacaattagcaatatggaggagtggattaatagtagtgctaaaataattaggacaatgccaaatacgccagcacttgtagggcaagcaatgtcagcggtatgctctaataagaatgtaactaaagatgagttggattattgctttaagatatttgaaagtttcggagaatgtgttcaactagaagaaaaagattttcacgcatttattgcattatgtggatcatcacctgcatatgttttcatgtttattgaagctatggcagattcggcggtaagattaggaatacctagggctaaagcttataaaatggcagcacagagtgtcttaggatcatcaaagatggtcttagaaacaggaaaacatccaggagagctaaaggatatggtttgttcacctgctgggactactatagatgcagtagttgaactagagaaattaggttttagaaatagtgttatacaggctatggataaatgtgcagagaaatctaaaaatatgtagtaattgaaaagtggaggtatattaaataattataattatttaatataccttttttataaccttaaccttccaaatcagaattaattaataggccaaatgatttagatatattatagtaaaattcaaaatcttcttgagcattaaaaaaacaaggaaagtttaaatcataatttccccaaattgttataggtttattagtaaaataaaaagtgacgaagaaaatttctcttgtatttaaacgaactaggaatggtataagttctttatcaacaagtctaaaaaatataccagtgtgctcatcaaaatttaaataagacgtgaatatatctttatcttcatctgaaaggagatgaaaaagcgtgtttttgtcttcaggtgaaattttgtttatataaaaatctatataagcgttagaattattgatctcaaaaatatattctattaatttgattagtttattctcaccatcatcaatatcactagctacaagagtaaaatttttgaaagaatataagccatcaagtatattattaaatcttatattaactttagatttaaaggtatcatcatttataggtattagtaatttattcatgtgattcactcactcccaatgtaattaatattaatcaaatagtttatggttgcctatagtattggttatagttaagttggttttaagagaataatatatttattaacagaattcttgaagatacttcttgtggataagattgataataatataatgtggataattatataaaacttattctgtgaataattattgcttaagtgaagttgtggataaaatatttattttcagtattatattatctggtagaatcttaatagaaaagcaatacaaataataaaacctacaattgagtttatcattcaattgtaggtcttaatttgaaataggaaatcaaaaacttaaattcatgaatactaaatactagcaacgccgcttctaattgccgcttttttaacagcttcagcaactaaagcttgaacttttagatcaaatgcttttggtattatattatcaggagatagttcaccagccggtatagcatttgctatagcataagcagcagctactttcatatcttcattaatttctgtagcccttacatctaaagcgcctctaaatattcctggaaaggctaatacattgtttatttggttaggataatctgaacgaccagttcccattactgcaattccagcttcttttgcatcttcaggaaaaatttcaggggttggattagccattgcaaatattattccatctttgttcatagttctaaccatgtctttagaaactatatttggggcagaaacaccaataaaaacatctgcaccttttataacatctttaagcgtaccagtttcattatttggattagttatattagctagttcttgcatgtaaatattatgacttaaatctttatctctacttattacgccatctatatcacacattactatatttttaactccagaagaaagtagtaacttacatatggcagttcctgcagacccagcaccatttataattacttttaggttttctagttttttatttactatttttaaggcatttaacagacctgataaaacaactatagccgttccgtgttgatcatcatgaaatactggaatacttaatttctctttcagtcttttttcaacttcgaagcatctaggagctgaaatatcttctagatttattcctccaagagttggcgcgatatttacaactgtattaacaatttcatctatatctttagtatctaaaactataggaaatgcatctacattaccaaattccttaaataaaatactcttaccctccatgacaggtaaagaagcaagtggaccaatgtctccaagtcctagaaccgcagttccatcagaaataacagcaactgtattccatttacgagtatatatataagctttggatgggtctttatgtatctcacgacaaggttctgcaacaccaggtgtatatgcaagacttagatccttagcagtcttaacttcacaggtaggtttgatttcatatttaccttttttttcttcatgaaatttcaaggcttcttcataaatattcattaaaaacactccttaatatgctaaatatattcaaatttacaaaaacatgatcttgatcataacaatataaaacaattatacgaattatttataaaaaaagcaaaaaaatattcgatatgtggttgaccatagaaaagtactttgctactatttaaaaggagaggttaaaataaatttaatgaaactccaaattgataataaaaattaaagttatttatttaaactttatatattaagggaggcaatataaatgtcagcatttattgttttaggagctcaatggggagatgaaggaaaaggaaagatgacagattacttagcagaggaagctaatgtagttgttagatttcaaggtggaaataatgctggtcacacagtagtggttggtgataaagaatacaaattgcgattaataccatctggaattttatacgaagataaattaaatgttataggtaatggagtagttgtagatccaaaggctttatttgaagaaatagaatacttagaaggtgttggagttaaaatatcgcctgaaaagttaatagtaagcgatagagcacagcttataatgccataccataaggtactagataaattaaaagaaaaagctagaggaaaaaatgatataggtactacaggtagaggaatcggaccttgttatacagataaatttgaaagatgtggaatcagagtttgtgatttactgcatgaagatgtttttatagaaaaattaagagaaaatgttgaaatgaaaaatgcttatattactaaagtattaggtggagaagcattaaattttgatgagatactagatgaatacttaggttttgctaagaaattaagaccatttgttcaagatacatcagttaaggtatatgatgcaattaaagcagataagacagttttatttgaaggcgctcaaggaatgctattagatattgattatggtacatatccgtatgtaacatcatctaacacaactgcaggaggcgtttcaagtggttctggtataggacctaatatgattactaatgcagtaggtataacaaaagcatatactacaagagtcggtaaaggaccattcccaacagaattacttggtgaaactggagactggattagagaaaagggacacgaatatggtgtaaatacaggaagatcaagaagatgtggatggcttgatttagttataattaaaactgcagttagagtgagtggattgacatcattagctgttactaagattgatactttagctggtctagaaaaaatcaaagtatgtgttggatataaatttaatgatacagttatagattacttcccagcaagtttagaagacttagcagagtgtgaaccaatttatgaagaatttgatggctgggatgatagtgtagctgatgttagaagttatgatgaattacctgagaatgttaagaagtatttagcaagaatatcagaattcacagggactagaatttctatagttggagttggaccaaagagagatcaaactatgagaatagataatctatagtttagtattatgctcgggtattgactttatgttttgtataaaatataattttattgtagacaataattacataaagttatattaaagaaggtgaaagtatgataactaaagatatgacaattggtgaagtagttagtgcagatcaatctaaagctcaagttttaatgagtttcggaatgggatgtgttggatgtccatcagctcaagctgaaactatagcagaagctgcaacagtacatggattaaatctagacgatttattagaagcattaaatagataagataattattttaaaaggattttctttttagggaatccttttttacttattaaaaaatatatttatatcgtttatgttttttatgtgtaatttaatttttgtgattataatagattataagattaaataattcattaacaatattattgataattttttataataataaatataagatatagtaaaggaggggaggagttgtaaatcaaaatagatgccatttagctataatttattcgttaaataaaaatgtttcaaatttagcttgagatttatttttgcattttacaattgttaattatgagtaagaagtttacaaaaaaatatgaaatacattattatgaagtaaattctaatttaagatgtaaattgtcatctataatagattttatatgtgatgtaggcactcaacaatcagaagccttaggtggaggaattgattactgtacgaaaaataactgcgcttgggtattttataaatacgatataaaaatgtatagatatccaatgtttggtgaggtaataagcgtcacaacagaagctataggctttaagaaattctatggattaagaaaatatacaattaatgatgagaataataatgttataggggaagcactagcattattttttctaattaatatagataaaagaaggccaatgcgaatacaagatgaacaatatcatatatatggagtagatggtgatgttgattacgatataagcatggataaaatagaaagaacaaatgatgcacaatactataagcaatttaacataagatacagtgatattgattctaataaccatgttaataatgtcaaatatgttgagtgggcaatggaagctgttcctctcgatatcattaataattatactcttaaaagaattaaggtagtatttgagaaagaaacaacatatggggataagatttcatcaactgctgctataaatgtaattgatgaaaatagtttaaaatcatatcatactataaaaaatggtgagggaactgaactaacgctattacaagcagattggaaaaaataataaaggtaaatatagaaaattagctgttgcaagaatctaggtaatattaataattacgacagctaattttatagtattatttttatagataagttaataatttttagctattggcggcggacttagctgctaaatatccagaactccatgcccactgaaggttgaaacctccacaatctccatgcacatctaaaatctctccacagaaataaagatttttaactaacttagattctaaggaaatattatttacttcagatgtatttacaccaccaactgtaacttgtgaattgttaaagccattagtgccaatacatttaaaatcccatcttttaaacttatcaattaatttgctggtagttctccaatcaatactactgcacggtatatgtatatcttttatcccaacatcttttaaaattgtagaaattaattttttatttataaccccaattagggctgttgatatctctctgtgaccaaacatagaaaaatgtgtggtaaagaaactttcaatatcatctttactttctagtggaaacatatctattcttatagttacatttagattttcatagagagctttagaagcataagatgataattgcattataggggggcctgaaattccataatcggtaaaaagtatttcaccaaactctgttcgaataactttattatcaactaaaatagaagcagagccatcaaattttactcctgatagagcttttaaataaggataatctaattttaattgaacaatgccaggaataggctctataatactatgacccaatgacttgcatagtttatagccagatccatcagaacctgttttagtagctgatttcccaccacagcttaaaataagttttttacaagaaaaatttttaaagtcatcattattacttgttaaaataaagttattttttttacttgtagaatcaattttacaatttgtatatagaggtatttgtctatcctctattgccattctgaatatatctattacagaagaggcctgaagagattttggatacatctttccgttttccaattcaattaatggcaatcctagagataaaaatgtgctttcagtatctttaacagtaaagttatctaacgccgctttaaagaaatcttgattttcactatggaaacacccaaatgggcgagatatattcttattagtaatattacatcttccattgccagttacaagaatttttttgccaattctatcgttgctctcaataattgccacatcaagtccaaaatctttggctattattgcagccattaggccagaggcaccaccgccgacaatcattaaatcgtgataaatcattataacaatcactccctatgtatgttttattgaccatataaaattaaatcacatattttacccagtgctaaaataaactgaatattttaagtataccattaatttattaattactactaaaataaaaggattcaaatcatattattcaatattttataatacttttaataaattttatcatagtaatattaaggttaaaagaaaggaatactaaaaatgaggtgattttataatggaagtaaaggtaattaatatgaattcgggagatttcgaaagagtatttaaagtgatcagaatgaactttgataatataatggttaattatcccaatatgagtggggtaaggagtttttcttttaatgatgtggaatgtataagtgaaagtgatatagataaatttttaattaataatagaaatttcttgaaaattaaattaaaaagagggatatcagtacttttttacaatgcactatatgaatcattaaagttagaaattaaagaagaggtaaaaaatctaagtattttaagagataaatataaactgtacaaaagtaaagtatgggaaaaggaaatgctgttatttataaataataaatttcctttagaagttaaagcttcaggaaaaaattttaaaaagaatggatatagtataaatattaataaaatagataaagaagattttttagaaatatgttgtggtgaaataaaaaatattgaagagcaaattaatttaaaaaaagatcttttatctagtctgaaggaggctagagattatatttaaggaacctctgaaatgtagatataatgccactttattaaaaataaataatataaaaataaaaaaaatgaaaaaatgtgttgacagggaatctaattttgggtattatagtctatgtggtcagcagcttgaataactcaaggacatctagttaagacatttaagcgaaagacaatatagcatggctccttggtcaagcggttaagacaccaccctttcacggtggtaacaggggttcgattcccctaggagtcaccatttatatctatcttatgggcgcatagctcagctgggagagcacctgccttacaagcagggggtcacaggttcgagccctgttgtgcccaccataagatggctcagtagctcagttggttagagtgccggcctgtcacgccggaggtcgagggttcgagccccttctgagtcgccatttaaaatatgctggcatggctcaacggtagagcagctgacttgtaatcagcaggttgtaggttcgattcctattgccagctccattttaaataaacataacaaaacttaatatggctccttggtcaagcggttaagacaccaccctttcacggtggtaacaggggttcgattcccctaggagtcaccattttatctatcttatgggcgcatagctcagctgggagagcacctgccttacaagcagggggtcacaggttcgagccctgttgtgcccaccataagatggctcagtagctcagttggttagagtgccggcctgtcacgccggaggtcgagggttcgagccccttctgagtcgccatcaaagaacaagttcttatagactagaacttgttctttttttattgtttaaaaaattataatcaagtcagatctgtgggtaaattttgaaagtattataagaacaagttattaaagggaatttaaatataaataagatgttaacacagaataacatagtttgcgaaacagatttttcaaataaatatgatttataatatcaatttgtagtaaaaatgaaaactctaatatgatagtcattaagagaataaatatcatattagagtttagtttatttagattatctatttttttctaaatttttcttaatccttatatcttcagaataaaatttgcagagcttaaattctccaattagtctagaagcgattcgctcgctatactgcttagttattcctggcaaagttaaattggttgagataagcattttcttattagcaagaattctcttgttaattatattaaataattcagttactgaaaattcattgaggtgttctgcgcctaaatcatctataattagtaagtcacattctagtaatagtgattctaaacctgagtcattattgaatcttatttcccttaaattcttaattaactcatcagaggttttataaattactaagaatcccatatctaacacagctttggcaatacaatatgataaatatgttttaccactacctggatttccgaaaaataataaatttgttgatatttctgaaaagctaggaagatagtcttttaatatatattctaaattattctccatgttttttttaggagaatatttttcatctccaagtttatgacttgaaaacaaatttaaatcaaaattatcaaagttattatacgatgtggtattttctaattctgaatttttatagtataacttaatcaacctttgtttatagcaagtacattttatattgcctataaagcctgtatccttacatttattgcattgatatcgcaaatttaaatattcaggatcataacctctttcaactaacatttcgcacttttttattcttaaatctgttatattttccttataatcatctattgtcttttcactatctttagatttgagaattgatactgccatttttaaagataatcgttgaattttattatccaattcaataatctcaggatatttctttgatatttcttctttcctaaatttcaaatttctagcttcatcttctctaagtttatcatatatttttaaaatttctgtttgataacctttaatcatcgctatcccatcctaaaagttttttttctaatgaatcatagtcatactctcgagcctcaaagttattaaatttgagagatgatttatcattattattagtagtataagttttttgatacttattattttttggatttttattatctttaagagctatatcttccaaagttctaatattatttttattccaattacttaagattccatcgatatacttgaaatccgccctattcaatctttcaaagcatacatcacaagctttaaatataatttcgtttgaatacttataaataagaagccatttttctattaaatcctgttgtggtttcattatgtctgtattatttatacctaagtaagtgagaatttttcttatattaatccacttatcctctgctttttttattaagttctgagcttgctcgatagtagttattttttgatcatgccaagctatagcaaccttttctatatatctagaatcgctttttccctttgatatacagtattccattaaaatcagaattaattcagatgaaaaaccgaattccttttgccaatttaagtaaagtgacatttcgtttggcgatagaggtctagctagaagagtttcaatatcctttagcatatctttagtatttgtactatccaaagcttctaataagtcaatttgtttagtagatttggagggttcttcaactaaatctacgaattctacattaaaattacccatcttatctatctgagttagctttatagctccttgatcattccaataattaaatgcattcataatgtctgattctaacaaattaagcgaggaagctagtattgatgagctaacgcctaattcacctgaaatagtatactttagcatcaataaataaacttttacaaattcgcctctagcctgtggcatgtatttttctataaatacattgttaacaggagtgaaccctagagatctattctttaacataaatgtgctcattccgtttactacctacctttcaaagtttttaatatatattataaaaacaaaactctatctaataatattagattagcataatcgtttataatgtaagttatataataacctaatgtatgtaaaataattatagcatattatcaccttaataaagcgaaatattaatcaactaatacttgggattaattacttttatataagatttgagagaatataaagagcacgcatttgtctttataagaaattaactaatttaataaaacaaatgcatgcttctaaatatggataatattcattaaaataaataatcatatgatgagtttatttatatttacaataccttcaccttgaatttgattggatatctcatcaataggatcacatgcaacctttaataaggaaatcatatctttgaaagttattgatggatttttctcacataataacgcacataatccgctaatataggctgtagcaatagatgagcctgtaaaagttttatatggtacttcaagtttatttgggtaaaccttaattccgtttttttctgaaatatagttattatcagaatttaaagatataacattaacgcatgcagcagatagatcaggttttaataatttaccatatggtcctgcagaagaataagtataaggcttcattatggaggtagttgaatttagaccacctatagtgatgcagcttggtagcgtagcaattcccataatagaatttttttcactcaggttacttccgctaggaactatcggaattaatccttttgatatagcatacttaaatgtcaaatcaaagcaagagataatgaatgtattatgagttaaaagttcaaaaggcaaacataatacctttatgttattttctttagatatattagataaactttctatagaatataatatatccgaagcaaatcctttaccgagtttatcaaatgccttgtaacagaatagcttacttttattacaaattcctttatacatgttatttgatgagataccactactacacaaaattccggccatggaggtaccatgtccattatcatcataaggatagcgaaagttattaattaaatcttcaaataactctattttagtgctaggggaagttaggtcttgatgaggaaatattccgctatctacaagtcctattcctactcctgcaccagataaactaaacttttccgaaaagtggattttatttgcagtagtcacgctcattccgcacaaaaacaggtattcatccaagtaaattttttttatttcaggatattcagaaattctatctatgcctcttgaatttagttcggcacttataatattagaggattcaataatgtgatgtacagtacctttatatgaactgattttttttactattgaggattgaaagtctttatattgtataagtattctataacttttataagcattttttgatatataatcttttagattatggtctagcttacttttagatgaaaacatatatttctccaaaatattattacttcaatatattatatgaaaaagaat

SEQ ID NO: 44 - DNA, 44393 bp, Clostridium beijerinckii
ctaagagaaaagcaccaagataaagggcttaagatagaaaactgaacatattaattaatataataaatatatatttagagaattagatattgattttcaaaagagttagcaaattaaaatatgaaaataaatataggcaataatgcaaaccagataatatgaaatgtgtttattaaaccatagaatatgatacttccattaataaagtaattacagtactttagttgtttattagttgcatctttcattctaaaatatatgaatacaaaaagaactgcaggagctaatatttttaataaaaaacttatagttggactttttactacttctaacatgaaaatatttgcttctacgtaaaaaccagtatctaagagtaaaatagtaaatactatgtctgtaacattcaggatatatagagctaaaaattttatttttatatttttaagagagtagttttttataaaagtaatcattaaaacacctccatttagtgattattaccataatgaagatattgtataagctttattaattataggtagatatatatattttttattggaacgtgtattttgaactacattattatagatatgttcttattttctaagtggtttttatgttactatatttttatagataggatttaaaatatcaaagaaattaaaaaagctgtgaataagatagaagtaaagtttgtattaagagaattttaaggaaagagcaaggtataattgaaggcaaagaaaaaataatataataaagagaggagttcaagtaaatgtacatatacacaataggacattctaactattctatagagaaattaatagatatgctaaagacttatgatattgatactgttgtagatataagaggaactccgtattcgaaatataatgttcaatataataaggaaacaatagctgaaactttaaaaaaagaaggatttatatacatatatatggctaaagaacttgcggctcaaagacaagataaaaactcttataataaggaaggatattctgattttgaaaaggtaattatggaagaagattttttaagaggaattgagaggctaaaaacaggatgtcagaaaggttataatattgtacttcttggagctatgcaggatcctataaggtgtcataggagtatattagttggaagatcattaagggaaaatggatttaatgttaagcatattttagatgactatactttggcatctcaagaaaaaatagaagagaaacttttaagtaaatactttagtaacaggaatcagattactatagacagcttacttggtaacgaaattagcgaggttgaaatgattaaggaaggttatcgactggcaaataaagaaattggatatagagtggagcatttagaataatagaaatcaaaattaatatataagacatatattaatatgtattactaaattaggattttaattatgaaaaaaattttatctaaagtattaagaggtattgggattaaaaaaaatggcattagagcagatatgtcgagtgaccgtattagctatgcagattatgtaaattctaagaattattctagtgaaaccaactacttgatttgggtagatactggaagctttaaagtgaatatttttaaaggaagcacaaataagtggaacctaattaatagttatttgtgcaccttgggaaaagcctcaacgccaacacctaaaggaacttataaggttggaataaagggactctattttggcgtaaataaaggatacaagtgttggtattatacacagtttaaaggtaattatttatttcattcaataatttataatttggatggatcggttagagatggaaggttaggtatgaagctatcagatgggtgtataaggttagccaaagaaaatgctaaatggatttatgacaatatacctaaggggactaaagtagttataaattaacctatatttatatatttggatagataaataaaagttaagagaataattatataaaattgcacttgtaattaaatataaaagaaaacatattcacattaaatctagtatatggattttattataaaaattacaattattcagaaaattcaaaaaactattgcaattaatgatgaaatgagatataattaaatcaagataaaggtttaatttatcttagtgtactgacacttcaatccggcagaagagtgtatctcaagagatatacagttggtgacgggcaacggaaaaatcccggtagcaatgtacgacagacggtcgtacccagttggcggacaacgttaaaatcagtaactaagaaagagcaagtggagttagtaagattcacttgctctttatcttttgtaaaggtaataattgattattataattaaaatgtttaatataagctgattcgtatatccatctaaattttatattagatttaggtggaatttttattgtaaaataattttaagaaagcagtgattttcttgcaaaggcggggattaaaatatatactagtttgagatataaaatatattttatttttatctaaatgtattgattggagtaataatttaatgaagaaatttaaaaagatttatatagagataacaaatgtgtgtaatttaagttgcgatttttgccctaaaacaaatagggaacttaagtttatggataagaaaagttttcaacatatcgtaaatagcgtgaaattacatactgattatgtatattttcatctaatgggagaaccatttttaaatgaaaatataaagagttttttggatataagcaatgaaaattcattaaaggttaatataactactaatggaactttaataagtgaagttaaggatgtgttacttagttcaaatgctttaaggcaagttaatatttcgcttcatagctttgaagcgaatgagggacatgttgagtttagtaaatatatagataatataattgaatttgttaaagaagctagtgaaaaaactaatataataacttctttaaggttgtggaatttagatacaaagtatactgctagtaatagcatgaatattgatatttttgaatttcttgaacaaagtttcgaaataaaatccagtttgagagaaagtttaaaggaaaaaaatagttttaaactaaaaaataatgtatatcttagtatgggagagaaatttaagtggccatcattgcaagttgagaagttaggagaaagagtcttctgctatgggcttagagatcaagtgggaatattagtagatggaacagtagtgccttgttgtttagatagtgatggtagcatagcacttggtaatatctttgacaatacattagaagaaattctaagttcaaaaagagctatagacatatataatggtttttctggaagaaaggcagtagaagaattatgcaaaaaatgtggttttataaatagagtaagatagtgggggcgttgttaaaatggagacagcaattaagtcagtgggtatttttttattgatatatttttcgtattactatgtattgagatttatacaatcggtttttcaaggagcactgagtagtataaatgcaggagtggctaaatttatatatgctttaagtacaccggctcatgaacttgcacatttattggttgcaattttgtgtcttgctaaaatagaacaagtacaacttttgccaaaaggaaacaggccgggatttataagatcaagagttggaagcagtatgccatttttaattagcattaaggaatttcttatagctatagcacctgtcataataaatataccattattcatatttatagagagtaaatttgtattgaaagataaagttgctgatatatctagaatactagatccaagaataatagtgagtaaagaaggtataataactatatttttatttctagtgttaataagtggaatagcaccaagtcatgaagattttaagggaatgataaaaggacttataattcttagtgcagttatattcggattatcatttttaacttcaaggtttttagatatgaagtggatgaatgcaaagccaatattaacagtactattatactatattgaattaatagtattcgtgttgataataaatgctattatacattataggaattgtttcaaaataacatggattatattaataagtgccataaaacatgcttttagaaaaagttgatgggcaatcactcttaaatggtaaatactttatacagatacttaatttgaacattgaaagaaaatttttgtataaatatagaaataatggctatactccttgataaggagtgattattatggtaaataaaaagaaattatttataggtatgacattagcattagcacttatattttctataacatattatttttcagaaaagtatataagtaacaaaaatgctaaaaataatcctgtatcatcaagtgaaataaataataaattaaatgataatataagaatttatttatatgcaggtgaaaagaaagaaaaagaattaacattatcagagttaaagaaagaattaaatatagataagaatttaacagaaacggaattatcaaaggcattaaaagataagggatatgttttagaagtagaatctaatggagaaatgacttataaaagagatgcttctaaagctgtaaaacctaataaatattatattggagaaaaagatggctttttagctatatataaaactgatgataatggaactttatcaattgaaaacagcgaagatgtgtatactaatagcaaaaaagtagataaattaagcgagatagataaagacaaaattaagaattttgagcttgaatataattcaaaagacgatgcagaagaaagcttgtcagaatttttatcataatggaaattctgataggtaaattttaattgataaaaggcatgttagtaatttgatacttacatgccttttattaattaaaaaatacattgttgaaagatttgcctgaaaatgataaagtataagttaggttttaataatgtagaaattagttttttagctaaattttaaatacagttatagatatagaaaagttggtgtaaaatagatgtacgaatatataaaaggtaaatatattggaataaataaagattatgtaatagtagagaatagcggtataggctacaagatatttacatcaggtgctacaatgtcctctatgccaaagaatggagaggagattatgctttaccttgagcaaatagtaagggaagattttattggattatatgggtttgattcaaaggaagagctagagatgtttaagcttcttttaacagtaagtggagttggaccaaaagcagcattatctttattatctataagcagagttaataatttaaaatatgcaataatgattggcgatgagaaacacatctgtagaggtgtgggaatagggaaaaaaacagcagctagaattattttagaaatcaaagataaactaaagccagatgaattattggatagtagtgtggaaaatgatactaaggataatgagaatgttatggcattatcagaagctttaagcgcgttaattgcgctagggtatagcgagaaggaagcagaatcagtacttaaaaagatagataagaatgacagtgtagaaaatatcattaaaaatgcattaaaggcattgatgggataaaacttctaagacataagtagcaaaaaattatacatatatgactcataagaaaagggggaggttttttggaaagaatagttaatccatctgagatgcaagaagactttaattctgaacttagtttaagacctcaaaaaataaatgaatatataggacaagataaagttaaagagcgattagatatttttattaaagctgcaaaaaatagaaaagaagcattagatcatacacttttatatggaccacctggacttggaaaaactactttagctaatattatagcaaaagaaatgggtggggatttaaaaattacttctggaccagcaatagaaagagcaggagatttagcagcgatactaacaacactaaaagattatgatgttttatttatagatgaaatacataggttaaatagaaatgttgaggaaatattatatcctgctatggaggattatgctttagatatagttataggaaaaggtgctacagcgaaatctataagaattgatcttcccaaatttacactaattggagcaacaacaaggattggaatgcttacatctccacttagagatagatttggtgtactttgtgccatggaatattatacagatgaagaacttaaagagatagtaagtagaagcgctttagtttttggctgtacaattactgaagaaggtgctttggagattgctaagagatctagaggaacacctagaattgccaataggctattaaaaagagttagggattattcagaagtaaaatctaataagctagtatcattaaaagaggctagagaggctttagaattattggaagttgataatcagggatttgataaagttgataataaaatacttgaagctattattgataattttaacgggggacctgttgggattgaaacactttcctattttataggtgaggaattgggaactatagaagacgtatatgaaccatacttgcttcaaaaaggctttataataagaacaccaagaggaagaatagctagtgataaggcctatgaacatcttggaagagtaaatacttcaaaaaacaaaagtaataatgggaaagtacaaggtagcttttttgataaatagagattaagtagtgatttattaataagcactttaaaattgagttctgaacaactgatatagtttctcaaaagtttaacttcgttagaagtgtcaataataagaataagctgttagttaggagaagataaataaatgaacgtaaaagattttgatttttacttaccagaagagttgatagctcaacatccgttggaacaaagagattcatcaagacttatggttttagataagaaaactggtgaaattaagcataagagatttcatgatattatagaatacttaaatgaaggagatactttagtattaaataatacgagagtaatgccagcaagattgattggagaaaaggaaggtacgggcggaaaaattgagttccttctacttaaaagaattgaaaaggataaatgggagtgtctagcaaagccaggtaaatccgcaaaggttggtagaaaatttacatttggagaaggtaagttaaaagcagaagtagttgaagtgaaggaaaatggaaatagaatagttgaatttttctatgatggaatattcgaggaagttctagattcgcttggggagatgcctttgccaccatatattcatgagagattagaagatagggaaaggtatcaaacagtgtattctaaagaaaatggttctgctgcagcacctactgcgggattacattttacaaaagagttattgcaggaaataaagaataaaggaattaacatagtatatttaacattacatgttggacttggaacttttagacctgtaaaagttgaatctctagaggagcatgaaatgcattcagagttttatatgctttcaaaagaaagtgcagatataataaacgaaactaaaaaaagaggaaatgcggttatatctgttggaacaacttcaacaaggacattagaaactattggcgatgaaaatggatttgttaaggaacaaagtggatggactaatatatttatttatcctggatataaatttaaagtagtggataagttaattacaaacttccatttaccagaatctacgttgataatgcttgtttcaactctagcaggaagagaaaatgttatgaatgcatatgaagaagcagtaaatgaaaaatatagatttttctcatttggagatgctatgtttattaaataaaagttttgattacattgatgaggtgacatagtcaagtgtttcaatataaaatgggatgaattagaaaatagatattgattttataattcagctaacaactaaatggaagttagtttctttaaagaatctcagagttgctcagtaaacaaaggtagctgagtttcgtaaaaatataattaagaggtgaacgcttgtgagtaaaaggtatactttattaaaaaaggatggaaaagcaaggagagggcagtttgaaactcctcatggaactatacaaactccagtattcatgaatgttggaacattagcagctataaaaggtgcagtttctagcatggatttaaaggagataggatgccaggttgaactttctaatacatatcatcttcacttaagaccaagtgataaagtagttaaaaaacttggaggattacataaatttatgaattgggataggccaattctcacagattcaggtggatttcaagtattttcgttagctaagatgaggaaaataaaagaggaaggcgtgtattttaattcacatatagatggaaagaaaatatttatgggaccagaagaatcaatgcaaattcaaagtaatttggcatctacaatagcaatggcttttgatgaatgtattgaaaatccagcacctagagaatacgtggaaagatcagtagaaagaactacaagatggcttgaaagatgtaaaattgaaatggatagattaaattctatgccagatacaataaataaggaacaaatgttgttcggaataaatcagggtggagtttatgaagatataagaataaagcacgctgaagaaataactaagatggatctagatggatatgccataggtgggcttgctgttggagaaactcatgaagaaatgtatagagtgatagatgcagttgtgccacatttgccagaagataaacctatatatttaatgggagtaggtacacctagcaatatattggaagcagtcgacagaggtgtggatttctttgattgcgtacttccagccagaaatgggagacacggaaatgtattttgtagtgaaggcaagcttaatcttatgaatgctaaatatgaacttgatgatagacctattgatgaaggttgcgaatgtccaacgtgcaagaattatacaagagcatatataagacatttatttaaagcaaaggaaatgcttgcgatgagattatgtgttttacataatttatatttttataataagctaatgaaagatataagagacgcaattgaaggcggttatttcaagcaatttaaggaagaaaaattatcacaatgggaaggcagataattgaaaatgattatttatgaatttggtaggatgtagatctttacacaatttctaaatgaagatgagtaacaaaggtaggtttatattgacattaaagtaaataaaatgtaaactacatatcatgaatagaaaaaaatataataaacacattggaggaagagtatggataatatgttagcgttacttacgagcgtagtgccttatttacttgtatttgtgatattttttttccttcttatattacctgaaaagaagagaaaaaagaaatatcaaggtatgattgatgaattaaaagtaaatgatgaaattgtgacaagaggtggaatcataggtaagattacacatatagatgaaaaatcagttacaattgaaagtggtcctgcaaaaactaggattaaattagagaagagtggaatatctcataaaataaagatggattaatcataatgccctttaatatttcataaaatgaagtgttggggggtgtttttgatggaaaatagtaaatattttagatcagtagtaaaaggtactattggaactttgattttaagcttcataggagttacaattctatctttattgatgactaaactagtatttagtaaaggtatttttaacatgatatatgtaataatatctttatgcagtttaagtttaggagcaatgataggagcaaagaaaaatgaatcaaagggatggcttgtaggctttggagtagcactatcatattatttagtattgtttatactatctagtagctttaatggagaattagcatttaagctttttgacttcattaaattgattatagcactagttgtaggtactcttgctgggatgctagggataaatttataagatacttcagctttttaatgactaacgttacaaagattaaaagaagttatacatatgtgaaatcatttttatttaaatgaaggttaaacagtattttattgttatatcatacattaataaaaaactttattaagaaattatagtgtgctataatgaacaatgtgcaacataagaatgtaataatatttaaaattaagaagtaataagttctttaaaatttaacttaaagactttaatttcttaattttaaatattaaagtattttacataataaaggaaactgttaatgaaattgtaatccaaaattttcagtaaggaatatatagtaaatactaacctaatgaaagacataatatgcagagggggattaagatgaaaagaaaaagcaaaagttcagcattgttgatattaattattgctgtaattggactgttagcttttgcaggatttaaaggatttgttctaggaggatgggaatttaaatcatttgataaagtaataactagaggactagatttacaaggcggagtttctgttcttatggaaattcaaaaagatgatgtaactgcagaagaattacaaagtgctaaggaacatttatctttaagagtaaataaacttggtgttgcagaaacaattgtagcaacagaaggtccaaagagaataagagtagatgtaccgggattaactaattctaaggaaatagtagatagtttggttaagtctggtaatttgagttttaaagggccagatggaactgaaattttaacaggttcagatgtaaaaaaagcaactgcacaaatgaatcaacaaaatggtggatatgaagttggtttagaattaaatgatgaaggtgcacaaaagtttgcagatgcaacaggaaaatatattgggcaaaatatttcaatttaccttgatgacgaagaaatatctagtgcgcgagtaaattcgcaaatttcaggtggaaaagcaagtattgaaacacatgatacattacaaaagaataaggaattagctggaatgattaatgcaggtgcacttccacttccagttaaagaagtttcagttagtaatgttggagcggaactaggagctacagcatttccaaactctgttaaggcgggaattataggagttggattagtatttttattcatgctattccattatagaattcaaggattaatggctaatattgctttaactttgtatataacacttacactttttgcttttatagaagtaggtgttacattgactcttccaggtatagcggcattcttgcttactattggtgtggctgttgatgctaatatactaacgtttgaaagaactaaagaggagttaaagaaagggtacactgttaaggcggcagtgaaaaaaggatcagagcatgcattatcttcaatagtagattctaacatgacaactttacttgcatcactaattctatattttataggatctggagcagtaaaaggttttgcaattacacttatgataggtataattataagtttatttacaggtttggtagtaacaaaagtacttgttaatttagctgttgaaagtggaattataaataaaccatcacactttggtgttactttgaaaaagggggatgaaaaacatgcttaaaataatggaaaagacaaaattatggttttcaatatccctaatcattattgtaatcggaatgggattcttatgtgttagaggactaaactttggtatagattttaaaggtggttctgaaatagtacttcaactagacgaaagtataaataaagatgatgttgacacaatcattcgaagttatgcaccagatgcttcgacgaatacaattaataataatcaatatgaaataaaatcagcagatctggatagtgataagttaggattaattgtatctgatttagaatctaaatataaactggatgataaagtgctagtttcacagaatgaaataggatcatcagtaggtagagagttgactcaaaattctatatatgcattactcgcggcttttgcagtaatgttagtatatatagctattagatttgaattcaaatttggagtagcggctatagcggccacaattcatgatatattagtaactatttctgtttactcaatattttatattccagtaaatacaccttttatagcagcgatactgactatagtgggatattctatgtgtgatacgatagttatttttgatagaattagagaaaacacaaagatgatgagaagagcgaaatcaattgaagtggcagatgtaagtttgactgaaactatagcaagatcattatatacttcttcagcaacagttgttactataatagcaatgaattttttagtgccatctgttcaagcatttacgatacctttaattgtaggtatcataagtggagcgtattcatcaatatgtatagcatcaccaatttgggtatacttaaaagatagagttagaagccaaaagaaaaaattacaaaaagcttaattactggaaatgaagaaacctccagcacaatgggggttttttcatttgttaacaaaataattgtaaaatttattataatcatttataataaaggtgttttctaattttatggaggaataaaccatgcgtaaattctgggaaagtatatattgtccaaattatattagcggatataacccatttatacttaagggtatgaacaaagcaatagagagattagctttggcggtaaataatagacaaaaaatagttgtttatggtacatataatgtcgatgggatttgtgcagtttcatcgttaattcttgttttgagatatttaaatgctgatgtagaatatttaatatatgataggcaagaagctgatgctagaataaattcggtagatataaaaaataacgtagattttttaggtgctgaactattaataactttaggtgttggattaaaatctaaagaagaagttgagctatgcaaaaaactaggtattgatttaattattcttgaaaatgaagaaagtgatcttgttaatgactatatttatataaatcctaaccaaaaggggtgccaatacagatataagaacttatcgacaagtggacttacttttaagcttatgcaagctattgctatatattataatatgaaaagtataaataaatatttagatttaatacttataggtattcagtgggcaaaggtaccatcaaagggagaaaatggagtactaattaaagaaggaaataagttcctgatgaatactaataataatggattgagatcaataatagaatttaacagtttggaagagtttaataatgatggtataaataatataattgaattcataattccgcctataggtgcggtaggtgttatggataatgctagaattgtcttagagctcttaactacaaatgataaagatagagctgatcaaattgttaaatatttatatagacttaaaacaaataattccataaggtatatggaaagttaatgaaatagtaaagcaatatttattaattagtagttgtttaatattgaatcataaatgatatgttaaattaaattctatggaggagttaaaatggatttacaagaaaaaataagggtaatcgaaaattttcctaaagaaggaattagttttaaggacataacaacattaattgctgatggagaagcgctaagagaaactattaatagaatagttaaacatctagaggataaaaaaattgatttgattgttgggcctgaagcaagaggatttatttttggagttcctgtggcatatgctttaggagtaggatttattccagtaagaaagccaggaaaattaccaggagaaactatatcagttaattatggattggaatatggagaggatcagcttcaacttcataaagatgcaatcaaaccaggtcaaagagttgctgttgtagatgacttattagcaacaggggggactgtagaaggcgttgctaaattaatagaacaagcaggtggaatagttgcttcacttgattttgtaatagaactaactgaattaaaaggaaaagataaattagaaggatatgatgtactatcattagttaaatacgacatctaagttgtgattttaggtattttaagagttgtttctgggcattataattggtaaggattccatttcttttaaatgtattgttgaaaataattctaaaataatatataattattaaaaagttaggctggttattaaaccagcctttgaatttaggtatattcaaaaaagcggagcggaattcaggatactttattaatttaattgtattttatgctgataaattgactaacgctaagaatcagtatttactaaattatctgcctaaaaattatactgtaatttctaatctgttattttgttttagatacttacttcaaatgaattaatatagaaggagcgtaatccttatgattgataaattactggaaaagattgataagaattgtaataatgttgatgttgaaatggtaaaaaaagcatatgattttgctgaaaaagctcataaggaccaaaaaagggaatctggtgaaccgtatattattcatccgatagcagtagctgaaattctagctgagttgggtatggatactaatactattgtagctggattattgcatgatgtaattgaagatacggagttttcttatgatgaaacagtcagcctttttaatgcggaaatcgctaatcttgtagaaggtgttacgaagcttactaagcttggagaaatggaatataaaactaaagaagagcaacaagctgataatgtgagaaaaatgttgcttgctatggcaaaagatataagagtaataattattaaattggcagatagattacataatatgagaactctcaaatttatgccagcaaaaaagcaaaaaaacaaagcaaaagagacattggatatttacgcgcctttagcgcataggctgggtatgtctaaaattaaatgggaattagaggatttatgttttagatatttacatgaaaaagaatattatgaattagtagatagtattgctgaaaagagagtagaaagagaaacttacataaacgatatagtaaatgatttaaaacaaaagcttggaaattctggaattgaatcggatattgatggaagaccaaagcatttttatagtatctacaaaaagatggttagtaagaataaaagcatagagcaaatttttgatttaacggctattagagttctggtgcattctgttaaggattgttatggtgtccttggaatagtacacactatctacaggccaattccaggaaggtttaaagattatatagcaatgcctaaaccaaacatgtatcaatcattacataccactgtaattggaccacaaggcaaaacttttgaaattcaaattagaacttttgaaatgcataaaacagcagaatatggaattgcagctcactggaaatataaagagggagataacgccaaaggggagcaagataagcaaaaagattttgaaaagaagctagtatggcttagagatatgttggaatggcagaaagaaacatcagatgctgaagagtttattgaaggttttaagatagatttgttttcagatgaagtatttgtgtttactccaaaaggtgttgtaataaatttatgcagcaatgctacgcctatagactttgcatatagaatacatactgatgtaggaaataagtgcgtaggtgctaaggttaatggtaaaatagttcctttagattatactctcaagacaggagaaattgtagaaattttaacttcgcctaatgctaagggacctaatatggattggttaaacatcgcaaaaagtaatcaatctaagagcaaaataaaactttggtttaaaaaggctaaaagagaagaaaatatgctaaagggcaaggaacttcttgaaaaggaattaaagaaacagtgtgttaactatgctgacgttgctaaaggggatttttatgaaaaattagtgaagagatataatattcattctatggatgatttatatgctttaattggtataggaggattctctgtatctactcttattgcaagattgaaggaagacaatgggataggtgtagataaggtaaacaaggaaaaagaaaataaggaaattttaaataagaatatcgaggaacaaattgcaaaaacagcaagaaaaccagaacctaatggatatggaataacagtaaaaggtgaaagtaatcttatggtcaggtttgctaagtgttgtagtccagttcctggagatgaaattttaggatatataactaaaggtagaggagtatcagttcataggagtgattgcagtaatttgcaaaaccttatagatacagataaagatagagtagtagaagttaattggggatcagcacaaggtacatcttattttgcagaaattcaagttgtagctgatgatagagatggattgctagcagatataatgagtgttataacagagcttaaactacagttaagtgctgtaaatgcgaatttagcaaagcaaggatcggcactaattaatgtaaaaataaaaattacatctgtcgatagtctgaaggatttaatgaagcgacttaaaagattaaaaggtgtgacagatgtatatagagtaaatagttagaatcttatatatatcagaaaggtgagataacatgagagcagttgtacaaagagtgagctcatctagcgtttgtgttgatggagatataattggtgaaataggtgtaggctttaatgtattaataggaatatctaaggatgatacttttgaagacctaaaatatataaaagataagattatcaatttgagagtgtttcatgatgaaaatgataaaatgaatttgtcactattggatattaaaggtgaaatacttgtgatatctcagtttacattgtatggtgattgtagaaaaggaagaaggcccaattttatggaagcacaaggtggagaagaggctaaaaagctgtatgaagaattcttagatcttcttaagacatcaaacttaaaagttgaatgtggagaatttggagcagacatgaaggttaaaattaataatgatgggcctgttaccatattattagatagtaagagaaatttttaggaggaattcaaattgattataaaaacattaatagcgggaatgtatgaagaaaattgttatttaataatggatgaaggcaccaaggaacttgcaattatagatccaggcgggcagccgaatttgatagaaaaagagattagtaggttggatggaaagcctaaatttattcttttgacacatggacatatggatcatgtgggagcagttattgaattaatgaataaactcaatattcctttttatataagtgaaaatgaagaacaatatatgaaaaatgacgagtttgtatttggatcactgccaaaagcttcaaaatatttaaaagaaggagatacagtatctttaggcaataatataattaaagttatagagacagctgggcatacagcaggtggtatatgcttcctagtaaatgatgaactgtttacaggagatactcttttccaaggatctattggaagaagtgattttccaggagggaatggagcacagcttataaaaaatataaaggaaaagttattgcctttaggagatggtgttaaagtttatccgggacacggaccagcatctacaataggatatgaaaaaaggaataatccattcttataaaaataaaaatgtgcattaatttgcacatttttaaggggagaaacgatggaagttaaagttagtttaaatgattttaaatttagatacgaagtataccaattatttaatgtatattactcaatgagggaaattaaatttgtgggtgcagaagatgcagattatatggtttatattgatgagaaaaccttaaggtttgaatataataattattatgtagaagaatctttaggagaagatattaaaaattctcttagaagatttctttttctgtgccttagaaatgtaactcatgacatttatccttggggaatattaattggaatcagaccatctaaaatagcattaaaattgcttgaagaaggcaatactgaagatgaagtgatagaaatatttaaagaaaaatacttggctcatgaggataaagctagactttgtatagatgtggcaaaagctgagaaaaaaatagttaataaggataaaaatactatagctatatatataggcatggcattttgtccaacaaaatgtttatattgctcatttacttcgaaccctataggtgtttataaaaagatggtgacgccatatatagaggcacttattaaagagataaaaggtatgagttcatatgtgaaggaaagaaaacttaatatcgaatcagtatattttggtggcggtactccaacatcagtaagtgatgaagagttcaacataatcatgaaagaaatttataattgttttattaaggatgataatataaaagagtttacggttgaatgcggaagaccagatacgcttactagaaataaacttcagacaatgaaagagtatggagtagatagaataagtattaatccccaaacaatgaatgataaaactttaaatttaattggtagaactcattcttcagcagatataaaagaaaaatttaaaatggctagagaacttggatttgatgatattaatatggatataataataggacttccaggtgagacgcatgaagatgtcattcatactaagaatgagttaataaaactaaaacctgatagcattacagttcatggtctagcgcttaaaagagggtctagaatgtatgaagaatttatcttgaaaaaaggaatacaaattacgtcccaagatgaaattataaaaatgtatgaagaaagtaggaatctggcagaaaatttaggtatttcaccatattatatgtataggcaaaaaaatatggttggaaatatggagaatttaggttatgctaaagaaggcaaagaatgtatatacaatattcaaatgattgaggaaaaacaaacagtaattgcactgggagcagcagctgtaagtaaagtgatatttttagaggaagatagacttgaaagatttccaaacttaaaagatcttcatgaatatgtatctagaattgatgaaatgattgagaaaaagaaagcgttgcttgatacattgtatacataattaactgtaataaattagaatattgtaaatttgtttagtcaaataggaggaaaagatcaatggcgattgaaatgcaagcaccaaaaggcaccaaggatatgttgcctgaagatgcctataagtggcattatatagaaagtgcctttagaaaggttgctaaaacatatggaattagagaaattagaactccgatgttcgaacacacagaattatttttaagaagtgttggggatacaacagatatagttcagaaagaaatgtatactttcaatgacaagggaaatagaagtataacattgaaaccagaaggaactgcatcagcagtaagggcatttgtggaaaatagattatttaacgaagctcagccaacaaaattatactatattacaccagcgtttagatatgaaaatgtccaaaaaggaaggcttagacaatttcatcaatgtggattagaagtgtttggctcaaatgcagcttcaatggatgcggaagttatagcagtcgctatggatacattaaaagaattaggattaaaaagtttaagtttaaatataaataatttaggttgcccaagttgtagacctaaatataatgaagcgcttaagaaatttttagctgataattatgatggactttgtgacacttgtaaagatagatttgaaaaaaatcctatgagaatattggattgtaaagagaagaaatgtcatgaaattactaaaaatgcgccgataatattggattatgtttgtgaagagtgtagtacacattttaataaagtcaaagaatatttagatatcttaggacttccttatacaatagatccaggcatcgtaaggggattagactattacacaaaaactatatttgaaatcttaacttctgattttactgtatgtggaggaggaaggtatgataagcttatagaagaacttggtggaccagatatgccagcagttggatttggtatgggtgttgaaagattaattatgactttagaaaaagaaaatatagaaatacctaaagaaaaattatttgatttatatattggtgctagaggagaagcggaaagtaagtatgcttttaagctggctagtgatttaagggctttaggtgtgaagtgtgagataaatcacatgggtagaagcgtgaaagctgaaatgaagtatgcaaacaaattaggagcagcatttactactattttaggtgaagatgaattaacaaatagaaaagttaatttgaaaagaatgagcgatggtgagatttttgaagtttcattagaagacttgatggaaatagctaaaatagttaaataagaataagttaaactaagggaggattttagtaatgggtgaatctttaaatggattaaaacgtacaatgatgtgcggtgaacctagagaagaacatgtaggtaaaaaaataacattaatgggatgggttcaaagaaacagaaagcttggagcacttgaatttgttgatttaagagataaaacaggtataatgcaagttgtatttggtgaggaaattaatgcagaagcttttgaaaaggcaaaaggagtaagatctgaatactgcgtagcagtaacaggggaagttgttaaaagagaaagcgttaatgaaaatatgccaactggttttgttgaattaaaatgtgaaaatataaagatactttcagaatcagaaactccgccaatatatataaaagaagatttagacgctgcagaaaatatcagattaaaatatagatatttagacttaagaagacctgatatgcacaaaatatttgaaattagaagtaaaactacaaaggctatacgtgattatttagaagaaaataacttcttagatgtagaaactcctattttatcaaagagttctccagagggagctagagattacttagtaccttcaagaaattatcctggaatgttctatgcgcttccacagtcaccacaaatatttaagcagttattaatggtatctggatttgatagatattatcaaatagctaaatgctttagagatgaagacttaagagcgaatagacaaccagaatttactcaagttgatatggaattaagttttgtagaacaagaagatataatggcagtaaacgaaggattaattgctcatgtatttaaaaaagtagcaggtgtagatgttcagcttccaataaaaagaatgacatttaaagatgctatggaaaaatacggatctgataaaccagatttaagatttggaatggaaataactaatataacagaggatgttaaggatttagattttgttgtatttaaatcagcaatagaagctggtggatctgttagagctttatgtttaaaaggtggagcagaccttggaagaaagcctttagataaattaggggagtttgttaagacttacaaggctaaaggtcttgcttggattcaaattaaagaagatggtgttaaatcatcaatagctaagttcttaactgatgatgtaacaaattctatagtaaaaactatgaatgctgaaactggagatgctatacttatagtagcagataaaaattcagtggtattccaaagtttaggtgcgttaagattagaacttgctaagcaatttgatttgattaaggataagaatgaatttaatttcacatggattactgaattcccactatttgaatatagtgaagaagaagaaagatataaagcttgtcaccatccatttactgcaccaatggatgaagatttagattttattgaatcagatccaggaaatgtacgttctaaggcttatgacttagtattaaatggtgaagagttaggtggaggttctataagaattcatgatacagctcttcaagaaagaatgtttagagcacttggactaacagatgaagtagtaaatgaaagatttggatacttattacaggcatttaaatttgggccaccaccacatggcggtttagcatttggtcttgatagaatgattatgttcttagcagggacagaaaatatcaaagatgttattgcattccctaagaatcaaaatgcatattgttacttaagcgaagcaccaaatatagttgatgaaaagcaattaactgaacttggcatagcaatactaccaaaagaagaaaaaaatgataaagaatagaattaattaattataaaagactcttatacgaatgaaagtataagagtttttatttaagtttatattattatataggattaatttatatagataagacttttaattgtcttgtttcaatttacaattggttattattagaagagtattggtgcattagtatttaggatatcaatgagcctcctgcttaatagtggttcttcaactgcattatcgcaggcaaatttaagagcctctaagctcatagaaatatcctcttctatgaattcttttgattcccacgatatagactcctttacaaaatcaaatatatcgcatgggttatcaaaaatttctatgaatagcctttggttaggaatgttattccaagtatcattaaactttttagaaaaagattttaattcctgttttaatgattcagaatcacagtcccaaagattatttaaaatatcatatgaattttttattgaatttaaagaatttaaatctacatttgaatcattgtattttaaagtttcattaataacagtatcaaaatctgatattggaataaagaaaccatcagatttgcggtcaaaccaagtaaaaaaagatgttggcaagaatacatgttgtaaaaatcctaatagactatagccgcaaggataagcagcccaaccgcattggagaatgtttttttcaagatcaaaaattccagtgtaaattacttttgaggtgttagttatctctttattatcaaaataaccctcccataaattttcttcatttagaattttttctttccaaaaagaaaagcttctataaggtcttttttcaagagtattttgttttatattaaattccaatgataaattcctcctctcgatgttatcataatatttaaaaaaatacattttaaatttatgattaattatgttagagtttagaatagaattctacaattaatgaatcattgatttcaataggaacttcttctcttaaagggtatcttataagagttcctgaaaaattatcttgatccttggctagatacggataggtattaagagtatttgataaaaaagtatccctaaacaagtcattatttctggatttttcttttaaagaaattatatcacctatatttacttcataagaaggaatatctacctttttatcattaactaaaatatgcccatgaactaccatttggcgagcttgtgcaatagaagacgaaaggcccagtctgtaaactaagttatctaatctacattctaacctttttattagagcataaccagtaggttctttatcttttaacgcttttcgtacataggtggcaaactgtttttccattacaccatagtatgctctgagtctttgcttttcaagtagttgaaggccataagccgagagcttttttgcgtttctagcactgccattgttggctcttttcatagctttgggatgtccactaacatttaatcccaagcgcctacacaacttgaatctaggttctctcattcttgccataattatcatctcctataaggtcttgctttgataaaagttaacctaaaataatacaataaatataatatacgaatgaaaattatcttaatgttttctattccaatggaataatattatttagaaatctatattaatgatttcataaattagtttgtacaagataatttatttgacacgttgtattttttggtaattgagtttaattagctaaattcatgaaattaaattccttatttataaatcgcaaagtagggataataagtcatatatgttataattaatcggaaaataaaataataaaaaagttgggggaagaaaaatgttaggaacaatagttaattcgttagcaataataggtgggtgcttaatagggttaatagtaaaaggtagattaactgagaagattagtagcacaataatgaatggtttagccttatgtgtattatacataggtatatctggtgctctcaagggaaaagatacattgcaaataataatctgtattgcactaggtgctcttataggagaaattatagatattgatagaagattaaatgatttgggaaatatgattgagagaaaaataaatggaaaaaggaaaaataattctaacgataaaatatccatatcagaaggatttgttacatctagcttattattttgtgttggagcaatggcagtggtggggtctcttgaaagtgggttacaaggaaataactcaaccctttttgctaaatcaatactagatggagtgtcatcaataatatttgcatcatctcttgggataggtgtaatgttatcatcaatcgcaatttttatatatcaaggaagtataactttgcttgcaggaggactttcaacaatactcactgataatgtaatttctaatatgtcagcagtaggaagtctgttaatagtaggacttggttttaatatgcttgggataagtaaaattaaagttgcaaatttgttgccgggaatatttttaccaattatatttggattttttttaaaataagttgactggattttaatagaatataatattgttacaatttctgattggaggatttagaatgaagatatctgaactaaagagaaagtcgaaaaaacaattaaaaggaaaatggggaatagcaataacaactttatttgtaagtttaataataataagtggattttacgttgcgatgaagttgcttcaaccagatggaggtcttcttactgctattggtgaatgtgttagtgttttcttaggtggaatggctacgttaggaacatgcaaatttgtattaaatttggcattcagtaataatgaggaaaagtttaatgatttatttgtaggcattaatatttactttaagaccttaggattatggatattgattaatttaactgtatctattgcaacaatgtttttgataatccctggtattatagtctcgcttatgttttcacaagcgttcttcatattatgtgaagataacaataagtctataatagaatgtttaaagcagagtctatcaattatgaggggatataagattcgcttgttactccttgagttaagttttgttgggtggtggattatgtcaattctgacttttggaataggagtcttatggatatatccatatcaacaagtaactcgtgccaatttttatttagagataaaaaagtaattttcttatttaaattgcagctacataacatgataaaatatttttttattgagaaaacattttcgaatagtggaattataagtaataattttttatttgacgtacaaaatattagacaaaaaaatatagccaaaaattaatataagaattataataaatacgtatactattatttataatagtcgtaacttaaggggggcgcagaatgaaaaaagtaaaaatagcactactgggattggggaatgttggtcgtggtgtttggatgattttaaactctaacaaagaagaaattatgaaaagatgtggatatgaagtagaaatagcaaaagttcttgttagagataaaaataaaccaagaggtattgaaatatcggacgaacttgtaacaactgattttaatgaaatattaaaagatagtagcattaaaattgtcgttgaagtcatgggaggaatggaacccgctagagagtatatgctaagatgcatggaaaacaaaaagcatatagtaactgcaaataaaatgttattagcaactggtggagatgaactttttgaaaaagctgatgaaaacggaattatgtttagttatgaggctagtgtagctggggggattccaattataaagggaatagatgaaagcttaactgcaaataaaatagaaactctttatggaatagtaaatggaacaactaattacatcttaagtaagatggaacttgaaggtgctgatttcgatgatgtattaaaggaagcgcaagaaaaaggatatgctgaagctgaccctacatcagatgttgaagggtatgatgcacaatataaattagcaatacttgcttcattagcttttgggtcaaagatagatgtgaaaaatgtatatagagaaggaattacaaaaattgaagctgttgatatgaaatatgctaaggaatttaaaatgggaattaaattacttgctatagcaaaagaaactaatggcaaagttgaacttagagttcatcctacaatgattccgaagaaacacccgctttcgaatgtttatgattcatacaatgctgtatttataagaggaaatgcagtaggagatttaatgttttacggaagaggagcaggagatcttccaactggcagtgcggtggtgagtgatattgtttctattgtaagaaataatgttgaaacagaaaatccgaatccagtagtaaagaataacctatgggaaagagaaattttagacatgggttcagttgaaagtaaattttatataagagcaactgttttggatgaatcaggggttcttggagaaattactgcaatacttggaaaacataatgtaagtataaggtctgtgatacaaaaaggtgacgaagaagatggtcaggtaactattgtattagttactcacagaactagtgaggctcaaattgatggtgcggttgaagaaattactagcttaaaatctgtttacaaaatagataacataataagaatagaggattttaaataaattctagcccgaacgtacagcttcgtttgttggaaaaataggtaatattctagtaaagattaatgttaatgccacttattaaatgtaataagtggcattttttttaattaaaagttttttgaaaaatcttaaaaaatatgatacgaaaattaagtaaaatatagaaaaaatatgttataattactttatatttgaaaaattggacaatatatgagtcgatttgaataatagattatttatttagtggaaagaaaggggtggtcatttttgcccggaaaaataaaaaagatgattgacgaaatcattcaacaaagatcaaaggggaatcctgctattacggaaatgactatagctaaattaattctaaaaggaattaatcccaataaatttgatataaattctccagatgatatgacaataattaataaacttcttgatattgctaggcaattaaatgtaaataatttggataatattgaaaaaagtataagatcatcatcctcaagtaaaataacggaggaggatgcagtaaaggatataaaaaatcaattaaatattaacgacataaaattagtaatattttttgcatcttctaattataatcaacaaaagataagttcacttatggaagaagaattcaagggatgtattgttgtagggtgctctacggcaggagaacttgcaagcggagaaatattggataattccattgttgcaatggctattaactctaatattatttctgatataaaagttgaattggttggaaatataaagaaaaatttaaatttagagcctgcttttacttcttttgaagaatactataaagaaagtttatataatatgagctcagaaaaatttgttggtataacattaatagatggattaagcatgaaagaggaaagaataatggatctgataggtgataggactaatgtgttctttgttggtggttcagctgcggataacaatgagttcgtagagacctatgtttctgtaaatggatatacttcgacagattcagtggctttaattttaataaagataagcgatgatgctgagtttagtgttataaaaacacaaagttttgaatctttggattatagcttcgttgcaaataaagtggacgaagagagaagacaagtaattgaatttaataatagaccagctgcgttggaatatgcagatgctgtgaaagctgataatattaaagaaatttcaaaatattttatgagtaacccactaggattgatgattgaagagaatgatttttttgtaagatcacctcagagagttatagggacaagtatgatgttttattgtaatatacttgaaggaatggaggttaaacttttaaaagctacaaatattattgatgatacaagaaggataattaaaaataaagccagtgaattaggaaaaattgatgggattataaattttcaatgtatacatagaactttggaattaaaaaggaaaaatttgtcagatgaatatgctaaaatatttaaagatattcctactataggattttcagcttatggagaacagtatataggtcatataaatgacacatctacaatgctaatttttaatttaaagacaggaaaataaacaaagaacaaaagaataagaaatttaaatatatactttttattgaatattacaatgttttgaagcgaggctataagtaatgaagaatttagaaaactttttttataaagctaatattcttatcgttcatgagtactttgaagattcacgtgtgctaataaaatttcttaattatagaggatatataaatataaaaagtgttaaaaaaagtgaatcaatcataaaatcaataaaagaaaatataccagatatgattttaataaatataaatttggaagccattaatggatatgagttatgtgaagttataagaaaagatgatgatttgatggatgttccaattatttttataaacacaggtggagaagctattgatagaaataaaatatatattgttggaggaaatgattatttaagtaccccccttgaatacgaggaagttataaatagaattgaaatgcatttaagaattaagtttatggagcataagataaaatttcataaaggtaattatgatacaacatctactgaattaaagagttggaataaggttttattaaaaagaaacagtgatttggttaatgaagttattgaaaaagataatcaattagatgagataacatttgagttaaaagaattcaacattatattggaagaagaaatgaatgaaagaactagaacagaagaagcgttaaaggaaagtgagagacagttacgacattccatagaagaagcaccagtcccaataatgttatatacagaagatggatttgtaaagaagatcaatagatcatggagtgacattaccggatatagacttgaagatattccaatgatttcagaatgggcagatatttcagaggcttttaaagaggaattgagcagtacaaatataaaaaaattatttaattccgagaaaaggcaaaacaatggggagttttctataaggacacatgatggaaatataagaatctgcaatttttattcagcatatattggtgatttagaggatggacataaattattcatgaaagtagccatagatgtgacagagaaaaagcatatggaagaattgcaaaaaagtgttgaagaagagaggaaaaaattatatgaaattaaggaatacgacagaataaggacggaatttttttctaatatatctcatgaattaagaacaccgattagtgttattttctcggcgctgcaaatacatgaacttaggttaaaagattgtatatttgaaaatagaagtattgataaatataaatatactaaaataatgaaacagaattgttatcgtattttacgacttattaataatattatagatataacaaaaattgattctgggtattttaatatcaatgaacataatattgatattatcgctcttatagagaatataactttatcagtggctgactatattgagaataagggactgtctcttatatttgatacgaacgtggaagaaaaaattatgtcatgtgatccggaaaaaattgaaagaattattttgaatatactatcaaatgcagtaaaatttacttcaagtggtggaaaaataactgttagtattgaagattgctatgataaaatttgtataaaaattaaagatacaggaagaggtattccacaagataaattaaattcgatatttgaaagatttatacaggtagataaatctctagctagagatcatgaaggaagtggaataggactttctcttgtaaagtccttagttgagctgcatggtggagtaatatctgtaaaaagtaaaataagctgtggcactgaatttgttatatatatcccatgcaaactagtaaaaaatgcagaagagcaatattcgctttgcagctctataggcggagattgtattgaaaaaattaatatagaattttcggatatctataattaaaattatagatttcaattatattacaaaaataatccttcatcgtaattctaaaaatattacaagaattttaacagtaattatgaaattatacattgtgcaatgtgaattctaacatgtacatgcttgtaaaatatttcttttataatgtaagtatatgtgaaaaaaagttaagataatatagtaaaaagatatttttacttactttttttaagagttttaaacaaatgttgaatataaatttaatatttgttactatattagtgtgtttaataggttagagataatgaggtttcaaacaattaatgggactttatttatctctttttgattgttataggcactgagaaatgagaatttaaactatttgcccccaaaaggaatgtttctagagtgcgaggaataatttgctattgcatatatctaagtattcaagtaatatagtttccacactttatatgctatgttattagaaatattaccttttaataatatatgaacctctgtatttatatagcttcataaatacagaggctttttaattccattctttatgttataatttaagcaaaagaaataaaatacagtgtggaggaaaaggatggggaataatagagatttaattagatatttaaagatattattaagcgcatatttaattataggattaattttaatttttagtagttctatggttttagatttaagtcttaatattttaacaataacaggcatatttgtggcgtgtacactggtatatggagtattaattagaaataaaaaatatatatctacggcaattattgttgccttgttatatgttggtgcaattatcatatatagtcctttaattagttataatgctcataggaatttaataggaaatatagaagaaatggatttttctagccaaatagaatatattgatataaaccagttgcctattattgataaagaacttgcatacaagctagctgataaaaaattaggtgaaattactagtcttgggagtcaagtgagtgttggtcaattgacattacaaagtgtaaatggtcaactatgttatgttggaccacttgagcattcttcttttcttaaatggattagcaatagagaaggaacgatagggtatattaaggtaagtgctacaaatcaaaatgatgtagagttggttacccagcttgatggaaaagatattaggcttaaatatttaaattctgcatattttcttagtgatttaaatagagcggcttactttagagatatgaaagcagggcacacagattatacttttgaattagatgatagcggcagaccatattgggtcattacaagatatgatactggcgtgggcattacagaagaaaaggccataggtgcattaataatggatgctcagacaggtgactcaactatttataatattgataatctaccagaatgggtagacagaatacagccgatgaaatatattaataggtatattaacaaatggggagaattggttcatggtgttttgaattttacggataaagataaacttaagacaacaacagatggtatgaatattatatacgataagggtgtctgctactattatacaggtataacgtcagtaggaagtgatgaatcacttgtaggatttatgcttacaaatacaagaaccggagaaactaaaatgtataaaacggctggtgctacagaagaagcaggcatgagatcagcagaaggaaaagtacaacagtatggttataaagctacttttccatatctgataaacatacaaaatgagccgacatattttatgacgctgaaagattctaatggattagttaagcaatatgctatggtgaatgtaaaaaattataacactgtaggagttggagatacacttcaagctactttaaataaatatttagagggattaaccaatactaatatttctctcgaaagtggaaaccaggaagaagttataagaggagaagtagaaaggataggtctagttataaaagaaggtacgagtatttatgacattaagttaaaaaataatgaaaatattttttcggtttcaacggagacatctagagaggttgcattaactcaggctaacgactcagtggaaatgaagtttattaaagttggagataatagatatattataaccaattcatttagtaatctttcttttgttaacagtgagaaacagaaaaaggaataggaagaaaataattaaaattaagtattgcaattaaaagggagctatgatatactaaaatagttcctaaagggaataaaaaaatatatcaaagatttaattatattaaaatttctccttatgagaaagtattatttaactaagtctttaaatttggaggaattgaaaatggaagataaaacattagtatgtaaagattgtggaaaagaatttatattcacagttggagaacaagaattctacaaagaaaaaggattcgaaaatgatcctgtaagatgtgcagattgtagaagagctagaaagcaacaaaacaacagaagatagtttctgtttgcaaagataagctataagatattattcttatagcttttttattatatattggtatatataggatactattaattgacaaaccatacactaatttatatggtcattttgaaccccttctcttttaactgaatgtctttttctgtttggattgtggttcatattttcttgagttataggagtttgatgattgcatttttccattctagcatgtttgttatcaggttgactatcttttggcataataaaaacctcccttaaacaataaatttacatattaattttttgctaagtgatacaatattattcgtaagctgtagaaaaaataataacaatattagttatattattaattaaatagaaaataaataaacctgctaaataatatattaattatacctatattatttagcaggtttattcaaatctattttcagtatataggttatttggtaatagttaatctaaacaaaaattaattaaggttcaaatttaaaaagcttgtagcttcaatttcactaatattttttataactgaaacttcttcaactaaaaatttgtaagcagtattaaataattgtttttcacttgaactaagtgattttttcttattcataagaatcagatcgtaaactacttctgcactatctttaagtaatccagatcttattttttttgcattagcttgatatctttccttagatgatgcaagttcaaattcactacttttattttcaagagtgagcaatatatgatctaaggtagagttatcgcaaacttttcgtaaatttgagttagatgccttatcacttggaatcataatttctaaattatttgacgtaatctttactattatgtattccttggtatttcctgaaaaaatcttattttctattctttcaacagtgcctatgccttgcattggataaacaactttatctcctatcaaaaacaaaaaacacacctccttaaatggttgttctattattataacacattattaaaaaaaataaaacttaaatatatcatatctattatttcatgtcaataatatttgtgtttttttagaatgtaatattaattctttgataactatatacgtaaaaatttatatgacaattaaaggtaaaaagtaaattgaaaaatacatatttaaagaaattatgataagtaataataatacaaaaaataaattaaatgtaaaaaatgtaaaaaaatatagaaatataagtaaaacaacagcttgataataaataatatgtgatgtaaaattaaggaaatgattacagaaaagagggggttgctggcgtgggggttcataataaaaaagttataaaaagtgaaagaaaaataaaacggaaaaataagaatttacttgctgataagattttggcttataatcctgtgtttttggaaggaattgcagtatataaagatgcaagtagaaactttatatttttaatatttcttggagctttgttaatcgactttccgataatatcagtgccttgttgtatattgtctatgttttttattattagaatgttgcagtttattaaatataaaagcataaataatatagtaaatgaaatagcaaaggatttatcttttaaagggatatataataaaggtaaagtagaggatatgttaaatgattttaaagttaaatatggagaagatatcgttgagtatgaacaattggtaagcatgttggataaatatgaagctttagtaacaaatattgaatttgctttaaaaaatataactttcaaggataaaacaaatatagataacaaagaagaacttataatagataatagtgaaattactttctttgaaaatgataataatataaattgtgaaatatataatagggatgagcataaaaatacgagagtaaataattattatagaagttttaatgaaaaattttctgtgctttataaaaatggtgatggagagattaagagagttaacaaagcaattgagttctttgatgatggagataatgaaaacattaacgaaaatgccgttgtcctaaaaaatgttaataaagaaaataaaaatcttacagtatatttatataaaaagtcatcgccactacaaaaaaacgtattgtgatgagctaacatttataataaagttagtaaaaagtaaacttctattgactgtagtatatgatttgatatcgcagttataggagttgtctttttttttattttgtaataaaatctaatgagtgtagtaatatgtatttattaaaattaattataagtataattatattagattacttatggaggaaaaaatgcaagatataatgataataggcatagctggaggaagcgggtcaggtaaaactactttggctcaaaatataagagaagcttttagtgatgatatagtaattctttgtcatgattactattataaatctaatgagggaatttctttggaagaaagaaaaaaacttaattatgatcatcctaattcctttgacacagatctactaatagagcagcttagagaattaaaagcgggaaatacaatatatcatccggtatattcttttgttgaacatacaagattagacgaaactgtagaagtaaaaccagctaaagttgtaatagttgaaggtatattaatatttgaaaatgaggaactttgcgatttgatggatattaaagtttttgtagatacagctggtgatgttagaataataagaagattgctaagagatgtaaaagaaagaggaagagatttagattctgtaatcaatcaatatttaggtacagtgaaacctatgcatgaggagtttgttgatccaagtaagagaagggcagacataataattccagagggtggttgtaatgcagttgctttaagcatgctactggaaagagtaaggaattttatatataaagaatagcagtacataatttttaagtagtattaaataaagtgtgtctttttaagtttgaataaatttaaaaaggcatttattaattattgtagacaagttggtagtaattcataaaaaggagaagatacgtatgaaaaaggtagatgcagtaatatttgatatggatggggtattaatagattcggaaagaatatcgctcaaatgttatcaggaagttttaaaagattatcaatatgaaatggatgaaaagatttatgtaaaattcataggaagaaatgttgagggtataaaagaggcattgcaggaagagtttgggaaggactttcctttcgatgagatatataagaaaaaatctaaattagcattggaatttactgataaaaatggtgttaaaatcaagcctggagtacatgaactattagactacctaaataatgaaaattataaaatagcggtagctacttcaacaagaagacaaagagcccttgaattattggaaagagcaaaaataaaggaaaaagttaattatatagtttgtggagatcaagttgaaaattctaaacctgatccagaaatatttttaagagcagcagaagggttaaatgttaaaccaaataactgcttagttgttgaagattcagatgctggaataacagcagcacatgcagcgagtatgacaggagttcatgttccagatatgaagatattagatgataagacaaagaagctagcgtttaaaatatgtaaggaattggttgatgttaagagcgttttggaagaaattaaagagtattgaatttaattaagtttgagaaaggaacactaaatttatgagtgaagagttaataaattcttattggggagttaatttagaaagtaaagtaataagtcaatctagtacgacgctaactgtgttgatgccaggaattggctatacattagacagacctcttttagattattcgaagaaattagctctagagttaggttgtgatgttctttctttagaatatggttttcagattgcaagaaaaaacttgcttatagaaaaggagcttcagcacttaataaaagaatctatatgtatctttaaatcagcattaaaagggaattacaccaagatagtattcatatctaaaagcataggaactattgtacatactctactttgtgatgagattagtggttatgaagttaagcatatttacttaacgcctatagatcatactttaggagttggaataaaggaaaattcgttagtaataagtggaacaaatgatccgctaataaatatagaatctattgaaaaaataaaaagaattaatggtgtagagatgattgaaatagaaggagctgaccattcgctaaatataagtaatgatatattaagaagtatagatgttattcgtaaagtaattgaggctgaaaagaaatacttaatataacaaaaaacatttaaagaatgtattctttaaatgttttttgttatattaaaaaaattataatgttagcattaaatatcatgtttgtgaaatctatgacttcacagtcaactaagatttttatggattttattgataaatcattttaggttgaataactttaggatcatatccgctatccttgagagctctaatgattgcttctttgtgatcatgtccgaaggtttccattgtgatatcaagttcaactgcactgttacgattaatacttacaaattgattgtgatcaagtttgattatattaccatgagcttctgcaattaccttagatacattggttaattctccaggtttatctggaagtaaaacagaaactgtacaaatacgttctctttctattaaaccatgttgcactagggatgcaaaggtaattacatccatattaccaccgcttataattgatacaatctttttatcttttacatctaagtgttttaaagctgccacagttaataagcctgagttttcagcaagcattttgtgattttcgagcatatctaggaacgctcctataagttcgtgatcctcgatagttatgatatcgtcgagatttcgttgtatatatggaaaaatcttagaaccaggggttttaacggcagtaccatcagctattgtatctactgaaggaagagtagttacatctccattctttaaagaaacttgcatgcagtttgcgccagcaggctctacccctataactcttatattagggtttagaagttttgcaagtgtagaaacacctgtagcaagtccgccgccacctattggaactaagattatatcaacagttggcaattcttttatgatctccattgctattgagccctgaccagttgctacgtctaagtcatcaaaaggatgaataaaagtataaccttcttcttcagcaagttttaaagcgtaattgcaagcctcatcataaacatctccatgtaaaataacttctgcgccataggcttttgtacgattaactttcattagaggagtggtggttggcattacaattattgcttttgtgttataggctttggcagcataagctaccccttgagcatgattgccagcagaagctgtcacaagacctttgcttctatcttcctctgaaagtgtgctgatcttatagtatgcccctctgattttatacgcccccgttttttgcatattttcaggcttaaagtaaactttatttcctgtaatatctgagtaatagtcgctaaacactaacttggtttttaagattactttttgtacgatttcatatgcttcttcaaatttatcaagtgtcatcatttttgtaatatcccctttatatgtatattgcttttagctaatagttttatgataacatgttagcattttatgtcaagtaagagtttttaagacaataagtttcgtaaatttaaatcgaaaggtaactctaggaataaggaataataaaaaataacaagttaagatgatgctgtaatactataattaaataaatatatttatcaaaaagatatatttattagtattaaagtgttaatagcatttttaacttgttatttctgagcattttagataggaaaaaattcataatatatagttaagatatatgattttcataaagaacttttattgttaatgtcctttatgcttttcaagctttttattttttcttaactcgaattttctttgctcttcttgctccttttgttcttttgatttttgtttgcgtacaattttgctttgttcatgctgtaattgcattgctatttgggctttagttcctatgcctttaacattaacctcttttctaatgcttcgttgaagccttttaggattaggttttgctggtgatttgaagtcatcagacaatactggcgaactaaaatttagacgatagaattttttcagtatgagctcgtaaacttcctcgtcttttggttctgagccgaaggtaactttgcataccttatattcaccatttttaatactttcaaagacaccaatccaaaatggatcatcaaaaagaactgttaatttaattattgttatcataattaaatcctcctgtagtatataaattcacagagaatggacaaccccaggagggcaggttactgctatattataatataggttctgactaccaacagaaacagtgtttttatctctttaaatattattatagtagaagagtatactaatgaaaagagaggttgttattaattatatttatattatgtcttctatgacttagtagataatctagataaagcctataaaaatagaattattgataagttttatagagaaatttaggttgaaacataaaaaaatagccagttttaataaactgactacatttttttattaactgactatattattttagttgtccaatcttcgcaattccaagtttctgttattatatttctataaaattcaggttcatgcgaaactaacagaattgttcctttatattctttaagcgctctttttaactcatcttttgcgtcaacatctaagtgattagtaggttcgtcaagtattaatatattagtttcattatttataattttacaaagtctaacttttgcagcctcaccaccagatagaactcttatttgtgattctaattgcttagttgtaagtccacatttagcaagagcagctcttatttgatattgagtatatccagggaattcctgccataattcatctatacatgtattgctattattgcctctatcttcttgttcgaaataacctatgtattgataatctcctaaatgaacttctccacttattggttttattataccaagtaaactttttagaagagttgatttaccaagcccgttagccccgactaatgctattttttgtcctctttccatatataaatttaatggttttgtaagaggagagtcataacctataactaaatctttagtttcaaaaataactttgcctgaagctctagcagatttgaagttgaattctggctttggcttttcttttgaaagttcaattatatccatcttatctagcttcttttgtctagatttagccatatttgcagtagcaacattagctttatttcttgctacgaaatcttcaagtcttgagatttctttttgttgcttttcataagcagcttctaatttttctttatttattgcatatatcctttggaattcatcataatctccaacatatcgtgtaagttttctttcatctacatgatatattaaattaactactgaatttataaatggaacatcatgggatattaatataaacgcattttcatatgattgaagatatctttttagccattcgatatgttcttcatccaagtagtttgtaggctcatctaaaagtaaaatatcaggagattgtaataatagttttcctagaaggattttggttctttgtccaccagataaatcatcaacgtctttatctaaccctaggtctaaaagcccaagaccctttgcaacttcttcaacttttggatcaataacataaaatccgttatgatcaagcatgtcttgaattacagcagttctttccagcattttatttaactcatcctcagtacaatcccccatcttttcgtataaagaattcatttctgcttctagatcaaaaagatatttaaaagcatctcttaaggcatctcttatactttgacctttcattaatgctgcatgctgatccatgtaaccaactctaacattattagaccaaataacattcccttcatcaggcattagcttaccagttactatattcataaatgtagatttaccttctccattagcaccaataagaccaacatgttcaccctttaataatctaaatgaaacatcttcaaaaatagctctatctccaaatccgtgattcatatttttaacagtaagtatgctcatcaattacctccaaaaaacttataaaatttgcaactaagtgaaaagactcctaaaataagagaaaaataataagcttataatcactttttgtagttgcgtatccataatagtttaaagtataaaaagctagtatgtcaaagtaaatttaagaaaatttgtgtatattaaaaatatagatgagaagagtattgaaactataacaatatattcataaaatagtaaaattcattaaagctaatatttatcaattgcccaaagcaccctgggtataaattgtagttgtatatttacataatatgttataattttagtaataaaatccgtgtgtctataaattaaagaatgttaataattgtttagagaatttactcgataaaacttttagttcaatgtgttagaaacgaaaagaggatatgctggaggcgtaattagatatttgaccagattatataagggggaagcaagatggaggatttggttactgatagattgctattaagaacatggaaagaggatgattacaaagatttatatgaatatgccaaaagtgagttggtgggtcctaacgctggttggatgccgcataaagatgaggatgaaagtagaaaaataataagaatgtttattagaaataatgaaacatatgctgtagttttaaaatcagaaaataaagttattggtagcatagggcttcatgatagaaagcctgataataatttgttgaaactaaatcagaaagaagtggggtatgctctcaatcctagatactggggaaaagaaatcgttcctgaagctgtaaaatctttagtagactatgggtttaataaactaaatttagaattaatttggtgcgcacattttgattttaacaacaactcaaaaagagtaattgaaaagtgcggattcaaatataaatttaaaaagttcgagagattaaaatttctaaataataaagaggtaaccacattgtattattgtatttttagaactgagtataaaaataacttaagaatataaccaaatgttatgaatttacatgattctgactacaatagaatgtctaaagaacttttagaataattagttagtaaattaatattttgtttaatagtaagagaaaaggcacgaaattaagctaatggataagaaaatatctattagcttaatttttatattcagataaaaattgtttttgtttgcaagtaattaaaaaaataatttagccgaatttctataataatattcctattttggggcaaacttttagtataaaaaaatttttattgatggtattataaattgcgtaaattattatatgaaaggagatactatgatgttagatttaactaaggaaataaaagaaatggcagaaaaaatgggttacgaaatgaaaggcttggcagaagatatggggaatgaaatgagaaacgtaggagaattagtaaagtcaaaagcagaaaaattgactgatgaaataaagaatagaatgacaaggtgaatataaagaagatagtaattacattattagtgtgaatgctatcttctttatatttatttaaaagtaacataaaaaagtagaaatcatattatatagtggacatggttatagggtaaatagactacctcgatctattaagttcccttttcttagtgcaatgggtaagacgtcatatttaaaaagaaatttctttatttgatctccccatgtgtaactatctaaatcaccaaagaaagccatcttattattagagaccataccaccgaccccgcctataaaaccataatttagtgaaggtagtagtatatctccaggaggaagcagaaggatgtcaaaatcgtaatttttaagagaattaaaaatccctttatcacttgtgattaaggctttttctctaacagggagaatagaacattttgtgtaaccttgaggaacatcaatgtgtatttttgaattttgagagtttaagagattttcatcgctatattttaaagtatgtataaaatagttttctaaaattaaagaatttaaaataatatcgtttggatatgtattggacaatgtgttttttgaaacaatataatttatgtcgtttaatttaaggatctctttgaaattttctgagatatttcgttggataattatcttattaaatgaatcattttttagtacatttaattgaatatcaggatgaccatttatggcatcataaacatcattacatttagggactaatattggttttaggtctagtttggaaaggctaagtaattcttctttagtaattctataatcgacaaaacaatgcatataaattctccttataagaatgtataactgatatttaaaggcaaaataatcaatactgaaattattattttaaattatattttgcgctttaaagacagatatgtcaattaagtaactgctagaatgtataaaaattaatattttatcaactagaaatatatcatatgaattttgcatatcctcaaatttttaatacatactaatattaagaagggagtgaaatccatgcttattttaaaattagcttatagtgaagacttgactttttcccgtgacctgcaagagctaaaagagctactaaagaagaaggagattttaataggatttgttgaaagtatagaaggaaaaactcatataataaagataatttgtgaagaaaattgttataatgaaaaagtaaaagagattattaacttatatgttagtaatattttatatagaat

SEQ ID NO: 45 - DNA, 43598 bp, Clostridium beijerinckii
ctataagactatataacccattataatctatttttttcatacatggaataattatctaattgaataaaagataaatatggcaaaatttgtttaagctaacaaatcataaatctcttaaatatttctttctaactcatattgctaatatttattttccctaattcttcatctaaataattttcatctatttatgtaataactgaaatttatccatatatcctttatgaaaacaaagtaaaggaggtaatgaaacatggctgtaactaaaactattgactctgtttctcttagtattgaagttcaaaaagctctagataaagctggcgacccaatttataccaaaaaaactttctcaggtataaaaacagatgctacacctgaaaatgtctatgctattgctgatgcaattaaaggtgtattagaagctaacactagagattactttattaatgaatcttctagtttagcaaatgcttaggatcttattcttaaataatattgtaggaaactcgactcacattcgttcgctggatactcacagagtaagcgatcatcatcaaatcacgatttggatgcctgcttaactgattcacaccgaatcatagattctggttctctacttaaagattggggggaaattaaatggaatatactttagctatgacttttttaacttctgctggtgaaaaaagcactttgagtgtttctggtgttaaaactactcttacaaaagatgaagttaacgcacttatggacactataatttcaaaaaatgtttttaaaactaaggctggcgatctagttaagaaatccggtgctcaggttactcaaagacaagttactaaatatgaagtagcttagttttaggtaaaattatagaagcttaccattcttcgatatgctccctttatagaagcagttttattcttttaactgtctactataaaaggagctatcacttatatggggagcttctattttttatttagtatgttgattttaccttggaacctgaatcacttactagtaacccatatacattttccttatttgttctaacctatctgttgtaatttactcatccaccaatctttatcaaaatatataggtctaactggaatcataacgatatattcattgtttgcttctataattttagatgttcctgtatatactaaatctatatataaattgaatggcttaactttcctttgaactttattttcaaattcattaatatactcattaattttttcattgccaaatccttcaaaataagaaagagcattcctgcctccaccaaccatttcccaccattctataaaaggtcgccatgcatttttacaacattcccttaattcatagtatggaaaatctgaaaagtcaggtggattaaacatattatccccatgatcaaatctttgttttgaaataaccttttcccctctacctttaatcatattattaaaccattcactccattgttcttttaccaaaggtaattgtttatgacatttgttaataaaatactttgaaggccataacctatttccaccttctatattatcaatatctattaatccatatacgcaaccagtaaaaagagcaaagtttaatgacatatcactggatactactactttccatgattcatttccttctttatacatattataattctccttaactatactagctcatcacatcttaccattataaatcaattataacatatcttgtttatttctctttggccttagtattaaatttaaattatactaattacgaaaaattgactttttgcgatttatattatctctttgttattttcttataattaatgtatagaatattaaaatcgtgtcaatagttaaaatacgtttcctattcttaataaatatagagatagctaatcattattctcctaatatttttcgctatctctatttttttgtaaaaaacaaaaggtagactaagtatttttacctaatctacctttattgcagcttttattttttcatgcattactattaataaatcttattgatctatcttatctcgttttaatttgaaaatttcttcaactgcttttttataaccaccggattctttgaaagaatcacttatttttctcatattttcaagataacttggattagttaaaactttctcaacagattctcttaaaatctctggagtaatattatctttatcaagagaaatagttgcacctaacgcttcagctctttttgccatatatggttgatccgcacctataggtattgctacaaaaggcacattgttatacaataagtcactagtactattcatcccagcatgagttattgctacatcagtatactttaaaacctctgattgaggaacataatttcttacgatgaagttattaggtatatcaaatttagataagtctatattatatgctgtcattacaacaacttcatcagtattaccaaatgttttaaagaatatatcatatagattgctgtcagtattattaaacactgtacctagtgaaatataaacaactttctttccctctaatttttcaaaaggaaaatctagattttcttttctatcatagattggtgggcctataaatttaaagctctcatcataatattctggatgtgcaacaaaatatttagaggtatatacaatatttatatcacccttattaaaaaataaatcaaagatattatgggacatttccacattaaattcttcttttaattgtcttgaaacttttttataagtctctataaccggatgattttttattaaattttcattcattaattctttgtgctgcgaccttaattctttaggagttgcaaacactgcaaaggaagaaactgaaggtattttcagtatttgagcaatgatacttccaaaagggaacatggccgtatacataatataatcgaattttttgccttcaatttgatttaaaatatcttttataattttatcacttgatttaagcgtttcatttatataatcaagaagtttatctggccccatatcattagaagtcttatgttttcttttaaaaaggctcagttccactctataacttttaaatttggcacctgttttttcaattttttctttaaaatcttctgagcagaaatatgtaatttcttctccttgttttactaattcatttactaatcccaatgtaggatttatatgtccatacgcaggtatacttaaaaaaagtacttttgacataaatcaacttcacttccattctttatatttacacttacatattctcataatactcatagtaattaaatagcattttctctaaacgtccaaatccacacattaaatgtaaatttctcggtattaagtttagattttcaatagttaaactcaatttattcttaaagtactttacttatccattcttctttcactaatcttttcgaagaattccaacgacttaccaatacctagtgcaacacaatctaatggtgattcatttatgtgtactggcatatgagtaacattgctaattagaatgtctagtccatctaataatgctccaccaccagcaagcattattccgttttccattatatctgataataattcaggcggggtcttctccactgttcttttgatagtacttataatagctgccactggttctgccaaagcctctataatttgtgtctctgttacagaaatagttttaggaagacctgatatcaaatctctcccctttatctccatactcttttctcgatcagcagttttgaacgctgaacctaaggtcatcttaatagcctcagcagtcctttctccaataaatagatcgcattcttttttgatatagctaataattgcttggtccatttcatcacctgctattcttaaagaattacttgtaactattccatctatagatattaccgcaacctcagtagtgccaccgcctatatcaactatcatacttccttttggctcatctactggaagtcccgctccaattgcagcagccatagcttcttccatcaaaacaacttctcttgctccagcctgcttagtagcatcgtctattgccattttttctacttctgtaactccagatgggtaacatgcaattatccttggagatacaaaggcacttttatttattattttttgaataaacatttctatcatggtttgagttacatcaaaatctgaaatcacaccatcttttaaaggtctaataacaactatatttccaggagttctacctatcattttttttgcttcttccccaactgctataaccttctttgtaccactgttaattgctacaactgaaggctctcttaaaactataccttttccttttaaataaactaaagtatttgccgttcctaaatctattcctatatctttcgatattctaaataaacccatatatgatctccttccaaatttacaagatgtctttttcttttaaacttatatctaatgtttttttccaataatactatagtatagcatatctatagctaataacttattgcattacttaagtctgtgagtgactctaatatcacaatagctttgaaatgaatctataaaaattaaaccttgcaagatttaattgtaaatacgagaatattacttgttcaataatctactatgcttataataattctcatttaaatttatttcttatatggatataagctaatttcagcgtttctattttataatttttcaacaaatttcttttatatttttttcatatttttttagtttttttcatactttttattatttatattatataattattatatttagcttccctttgtatctattgttaattaaaggtattcaatcttaatttaaaatttttctcacttaacatgccaataatctttaatctattatgaaaaataactttatttaggtttgttaataatgctaaggagttaattatgactaataaattagaaaatattctagaaaaagaagatatacaatttgtatgtgacataatgtctaaaaccttcatgttacctattcatttcttagacaaaaatggagatgttttatttgaatccgcggaaagatttgtacataatcctgtatttccatgtaagaccgatgtattcaatagtttaattgagaataatgagatttataattttcctattttaaaaattaatagcttctatgaaacttttttttatatctcaataaaagactataaaagctttataggtaccttcatagtaggtccatctttatcatctaatcttacattagaaactattgacgaattaatttctgattttaaccttccaattacatataaaaagaaatttttcaattactataatcaacttcccgtgataaacactagtacattattaaacttcagcttggtgttatattactccatatataaaaccaagcttgatatagataccataaaagaaaagaattctgcattagaacataacgtccctcaaatgcacaatcttttgaacttaactttatctgaaactcgtaagaataatactttccatattccttataagtatgaacaattattgtttcttcttattaaggaaggtgaccaaaataagctattagatttcctgtacagtcctccaagtggagaaaaaggaactttatcaaaacgaagccctttacgccattttaaaaacgaatttatatacgcttgtacaatagcctatcgtgctgctattgatggtggcgttaattctgaagttgcttatgctcttagtgttcaatatacacaacatatggaagagttaaaaaacgttcaagatgttcaagatctaagattgaaaatgtttttagactttacaaatatgtcttatattgctaaaaataaaccacgatattcaaaatatatcactaaatgtcaaaattttattttcagccatatatatgaagatattacactttcacaattgtcaaaagccgttaatttgaatcctaattatctatcaggattgtttaagaaagaagtaggaatgacaataagtaactatattcaaaaagaacggattgaagaagcaaagaaattattgattttaactgataattccttatctgaaatatgtacacttctgaattttggagctcaaagctacttttcaactatttttaaaaggttcacaggcgttactccaaaagaatatagacatttgaataaaataacttaagtgctaattaaactgcaactcataaaaaatgctattgtaggtctaatacaaaccatgcaacagcattttttatactattagttcaaagtgattaacagtacataaagcaaatttcttgcaataataaaaattagaaattagaagttccatttcaactccactctcaacaataccagattactaatttttaatattcacttaatttcaatcaatattttattactccccaatttttcttcttataaactctattcctttttgaaataccattgtcttaatgtttatctttgtttcaccactaggtactgtgtatttttgctctaatactctaaaatatcctaagtctacaaactgttgatacggaatattgtttttatccaaaactttcttttctcttaagagtgagaataaattgtttcttcccattcctcttatagcaaggacctttgcaacatgtcccacttcaatgctatctttagatcctgcaacatcatcataaaattgtcctttaggctctaatatcttcaccttattttcggcttccagccttgcttttctctcttcttttaacttagtcgctgcagcaataagtaaatcaggattatctaataattcatctgtagcgtacattcctgtttttcgtatgctaggcaatacctcatcaaaaatccatgcttcaaatttctctgctccaggcaattctgatttggctgctaacctgtaaatatccccttcaggaatgacactcatttctatattttgaataacatctgttccatctctcctctttccagtaactacccctatgtcgtgtttcacgacacccttgcaatgccttaaaattgcatctcttgggtttttatatcccaaagcttttgctatatcaatcccaactgcataatccttattattaatttttaaccatcttatttctccaaatctttcatctttaaaaattcgtaaactctccatttttgtttatccccctttttatagatttaatcttgacctaacgcctttttgcactcactacagacaagtgcatctctaaattttgaaatacctttatcatttccacaaaagatgcagcctttactgtatttcctaacaactacctcattatcaaccttaattatttccatagaatctccatcattaattcctagtacatttcttatttcttttggtattacaatccttccaagtggatctagctttctcactattcctgatgctttcatttttacattctcctctacaaaattattttcttttatatgattaaatcatttcttgtatatctcaaattttatatatttattaagccatcataaccacaatatattgtgatgatttcttgccttgaattactcttgtctgttcttctaatattcctattttcttttctaaaatcagattttcaggcacatgagggaaaataataaatccaaaatgccatgattatttttcatcaggcaaggaagtagattggtctcatagcgggcctattagggcaatctactgatgtagcatgatgggaaataggcttggtagatggactgattatttttttgaatgtgccttataaccgagcttaatgttctctccggtaagctttatattttcattgataatttcctcaatagcttttttatccatatcctaaacactccttaaatcttcttaacttctactcaaaattttgaactatttaatctcataattgttatttaagaactcaacttattagatgaacatatttacaaagttgaaaaaactttaagttcatctcttcactagaaatcataaatatatttgtaaccacaagggtcataatatgtagaaaacatttgaaaatgagctgttaaaggttcttagctgtaggttgttctattttagcttgtcaaactgaaagttggagcatgctaaagtggatacaacctgctgcttagaaccttcagcgatattttcatagcttttcggaatcaaaatatttatgatttcggtaagtttccacttaaatttagttttaaagtgggatatctatatcttgtgctgaacttattttaatctatagttattgtgtatgtctttctcaatttccaccacatagtccttactcatctcataaattcttgagccaacagcttcatcaaaattcagtaatctttcaatactaaattcactgctaactatgattggcagaaagtttaaatatctataattaataatttcaaagactatgtttatatcactttcattgattttacccttaaagagatcatcaataagtaaaacctcacacagcttatactttgagatggccttaacgtaatattcttggtcaaggatgttttgtttaatcttagtaattccatctctataaggcatgtacacaactttaatcttctgctttaacaaatttaatccaatggcaacactgagatgagttttgccacttcctacctgaccacaaagtagaatgctatttcttctgctatttctaacttcatcaaaatcagtgcaataagctgctgatgtatcctttgctctttgagaagctctattccacaccttaaaattagcaaaagtatgctttgtcatttcaacattaattcctgaatgcttccattcattttttaccttctcaatttctctacactcacagctaactgcaaggggctgcctattttcttgtggaataagtacccacccagtatcacagcatttctcacacttatatgaggcttttttcagctctttttcgctgctcatctgtaaggcttcgtggttcctttggtttgaatcctgcaaatttgtttttatccgggttactattctttccatagctcctattgacatttttctttacctccttatcatctggatatccttctcttctccaatttttcagtatgccttcaatgtaagtcatattaggtttattagcttttaatgctatatctatagccatctttacatattcttgaccatgcacccctatagctaacttaagtgcacctaaattaagaacattaggtattccaactattaggtcacagtacttagcaagttcaatagatttagaatttatatcatcttctttctttatctctctatctttattattctcattcttaatcttgttcttattctctctcttattctgcaccgttacagtaacgttacttttatcatctgtaacgttacaagatttttttgcactatcacaaatatcatttgtaacttcaatgttatattctttactttcagcacatccatattctttactttcagcccagctatgttcttcaatttcaacactagtttcttcacttccattaactacagcttcaagttgttttttcttttctctatgattttgaactctttttctattttgatctctaactctgtccattccctcaacattttggtgtctttcccaattcactattctgattacgttattatcagctatctcaatcatttgaaattctgataatactttaagtgcaagtcttatagaagctagaggccttgagaatattgtagataacatttcatcactatatgggatattctcatttagatatataagtccattagcattagttttgccagcttgtataagtaatcttatccataaataatgaatagtatctctctctggcattgcatccactaatttcatcttttcatcatcatgcatgttagtagataacttaatccatttaatatctgacatgtttctcacgctcctttaaaagaaatgttttaaacctttccaatttttccatgaggacatcaatcttcatggaagtacatacatccgtctaatgcctagacattctaatactccaatcacttcctatagcagttaaaaacgtacactcttagacattttaccttgtggttacattgtgcccttggggtataagttcaagtaaattcatcttaaatacaaaatttaacatgaaattttttactttatatatactctaagtatttttaattccaaactgtaaacctctcaatcatttaatttccattaataaatttatctgtattaatatcttctaaatacgccctttgcatttcagcacttaacctaccccattttgaaagcatatttctcattactgttcttttagccatagccttataatcattattccatcttggatctccattaaaggaattattcctaaacgaatccatattctctttgctccaataaacatattttctaaagccatttaccatctcaaaatatcctgcataccctataactgcatctgactttttagctgaaacatctatactaaattcttcagttaatggattccatgattttagctgcccttcataaacttcaattacatttatggctttatactcccctgttctaagtaataattgaatatatcccttatatccaagctgaaaatttgctttcttcttataaggaataatccagacatactccaaatttttatcgatagataaatctaaggaagctgcaatcatacatgcatcaattattgatctaggttcacattcaataaacagagaatccaagtctgcgcttttgtgtgaatcgcttgctcctaaggcgttaggtgtaggagtttccttaactaaatttattattgaatttatatactcaaaagctttatcttttaaaacttctgtaaactttgactttatctcatcactatttattaaatttttgaatatagtttcttgaacatttactgtgctttgctctttttcaatcaattgattttttaaactgctattagttgccataaacacaacaccctctctttatttagatgaataattaatttaatatgttttatcattaactaacttgaaatctccttaatttcaaatcttctgctcatagactgtttgcaaacttctttataaatctcaggatatttttcttttaaaactttactatctattctgtttgaagttactcccttccaaattacttggaacttttccacaattcctttttcagcatttccaagctgattttttagattgttttctataactttaagagattcatctagaatcttcatttgattttttatatttaaatattcatttatcttgtccttatactcttccttcaagttaacttctaacatcttatctatacatttaaaagtcttgcttaaatatttactagcagcttcacttccatcaagctttggtggaattcttttttgaacatgattaatccaaaaatctttttcagcttcaactatcatagaaattaattcctcatcacgcttaatctctttatacacaaacctttgtccacctatcaatgccgctatataacaagtatcagcacccaagacctccatataatgctgacattgaagtatgtgactaggtggaatttcttcaccagcccattcctttgctctaaaggcattcaccgttgtgcattccaggagtgagttttcaccaacaattcttctatcaatattacccatcatgaattcatgagtcttatgaactaactgccttttatccttccttaccttcttgccactccttatcgaaaattctcttgctacaacttcctctaaggtatttccaaagtaagatgattcattagactccttcacttctctaatttcttctgtcttgtccacataaacttcaaaaggacttttccatttgttaactcccataatagctccaacatcagaacctccaattcccttttgcctttccttaagccattgtaatttatccattcccttcacctctcaatgaaacactctaaattaaaattaatttccactaaaatcatcaaatctaatgattttatttttatctacatgtttaaaaatttgaaaactgtacataactataatcagttaactgttcgttccacgcaacacttaatttaaaaaattaaacaccttttaaaaagtgcgtagcacaaccaagaacaattcaccttttgaagaagcagctatgctgcaaataagatcattttcaccttttgaaaaagtgcaaagtacaatcagaaactttttaccttataaaaaaagcagctatactgtaactaagatcgattcacctatgaaaaggtacttagcacaataacaacttttcatgttacaaaaggtgctcctatataaaacgagcatgaaacacaagtataaacttttaatcaaaactaatgtcattttatctttaataattaatagttataagctgttaacttaaaaatatatactttctgtaattaatttttttatcatcgcaatatttaattatatttgtaataacctttattcctgctttaccatttccatttgctattcgccatatggtacttggtgctaaatcaagattccgagcacatttattgaagttaccatcaaactgctcatcaacaaattttttaactgattcttttgttgtattcatatattcccctcccattctccttatgcaatattccttacacgcaatattatattcctaccgtttcttaaacgcaacactttttttactatttttttacttatcattgcatttacgcaataaattatttaaaattaatataatatatgtacgcacatccgttcgttagatgttaataataaatttggactctcacttatcacttaaaggagttgattatatgtttaatgccgaattacttagtagtttaataaaagaagcacaaggtgatatttctttaaacaactttgctagtcaatgtaaaataagctctagcacattgtcaagaattataaacaataaaaattcttgtccaccagcgcctagcacattacaaaaaattgcttctgttgcacacaatggtgtcacttatgctgaccttatggccgctgctggttatataaatgatggcgaaacacctgtagaaattccagatgcaactaatactgttttatctaaaaaagatgaaagagacattgcaaaaagaattgaagcattaaaagaagatttactaaatggtgaagggctcatgctttcaggaaatcctatgtcacctgaagctattgaaagtttaatagaagccttatcttctggaatacgtcaagcaaagattgcaaataaaaaatatacacctttaaaaaaacgcagctatgctgcaaataaattcatttcacctaataaatataaaaaatagataagaatgagaacttttcatctaagatattggctaaattatagatattcttatgcatatataactttagaattattacaaagcaggtacagaatgcgttttaagccttctgtatttgtactactttactatggtaactattacgggggtggcttttttgcattttatcgagggattattttcaaaattagttaaaaaatataacactacagatgtttatgaattatgtaaattagaaaaaataacatatagagaactagatcttcatcctgaaataaacgggatttatcaatatgtaatgagaaatagaattataacaataaaccaaaatcttagtcctgagtgtaagagaataacatgtgagcacgagttaggacatgctatccttcataaaaaatataactgcacttatctaaaaacaaagaccttcttcaatgttaataaatttgaaaaagaagctgatatattttcatctttatttgaaatcccatttatatctaaagatatattaataggaaaaacattagatgaagttgcttgtgaattaaacgtttcaagatatttattagatcttagaataggcatctgtaattttgattagtaatttaaatgcatataatttcctttattatgctcatattatattaaggtaggtgtttatttcatgataggaaaaattcgtgaatcttcttctggactcagtatttttgatttatttgatgatgagttatatataaagtgaaacttgattcagatggagttctacctccatcttgaatcttagttgaacttatctagggtcgtgccactgttatcgctcacctaaaagtagatgagagtgttacagtggctagacatcagataaataaaatcatacaacttcttaagggaaagtatgaaattaaattatcagatttctgtggaaatcctatctttgaagaatctcaagatattattataaacaatataaaaattaatatctcttgggatcacatggctggctgctcaatcatggctttagatctaggtggaaataaacttattgaagaaatagcagattatttaaatactcattattaataatattatttgcaaggagattaacatggaaaatacagaagaatattgcaatcgaattattcaagaaatgattaaatcctatgaagatactggaaacaaagatggcgttagtaaactgtgtagggaagcatattctttatacagaaataatgaattgcctagtgaatattatggcaaaatatattatacagccatggaaataggtcactataaataataatttaagcttttccctaaccagaataacttcaagacatctacgataaaaatgaggtgacaaaataaaagtagctatttaagcattccacgggaagcagatgtgaaaatccaaatggaaaggtagatcaaatatttaatatagttacaattaacttctcagcatattgcatgcataaatttattttatataaaaagaaaatatataaatgtttcgtggaattttcttaatcctcaaaaacatttatatattttcaattaagtttctaaatttaatttgaatgcaatgattctaatatacccttgctaagtccttctgccagtttttcttggtaactgtcttcattcaaaagctgatcctctttttcattagacataaatcccatttcaactagtaccacaggaacttttgaccaattaaatccagttaaatctgatctctcaactacacctctatcaggcattcctacggtagaaactaaatcttgcagtattgttttaccatatactttacttattgcactaatatcttttgcatatcctattggagctggaattaacatagatgttcctctagcactttgagaatccgcagaatcacagtgtattcttatagctaaatcagcattgttatcatttccaacctctgccctttcaatattacctggactttcagaatcttgtgtttttgtcattataactgttacattgtgttgttctaacaaagtttttaattttttagatacactcatagcaacaacatattccggcgtttttgtagaaattccttccgctccacctggatcttttattttcattacatcagaatctggagactgtttctccattcccttatttccattagaagaatgtcctggatcaatgactactatttttttatttacaactgtttgatcttccacattatttgaggaatcattatcttcttttggtgcctcactattatccactgttttattttcagtttctatagtatcacttttttcaacttcttgggtattattaacttcttttttctctatacttgaattacatccagacaaagttataaatattaaaattgataaaactcctgataaaattttattcatctatttcttttgctcccatgcttgtaatactttataattagctatttcatattcatttaaagtagaatcacttccatcgtaattgggatttggaacataccagctttttgatgaaaaatattttttatattcatcattagtaaatacatatccatgacgtgcaaatatttcatttcttgcaagcccaagctgatccttcgttaaattcttcagatcatcttccattaaatatgtcttatcgctatcttttaaaatatagtcatttgaagattttgtactctgggtagctttttctcccccacctgcatttacttctgtcggagttcttccatcttcatatactttgtaccatttcgtattatccttgttatttgatgtcaccaagcttgtactatttgatacaatttcatatattccgtcattatctacatcatcaggctttgtatctttgttccccaatacagttccctttaattgcagtttttcattatcaactccaaaaacacttgtacctgaattgcttgaattatttgaatagccgataaatactccttttttattatcagcataattatatgctccctgcattgtttgattccatgcatgatccattgtaaagctgtcaactaatttatattgcccattttttattttatataaatttaatttatatcctgaattatatgagtattttccatttccttttaattctattatttcatcaaaaggatcatcatcaaagttatcaaaacatatttgcctatcttccataagtaaggcttttgtatttgcaagaggagtattagttatttttgaaattacatttaacataatatcttcataatttttattatctttaaagtttcccccaagtttatctatttcactaaactcggctactgcatcttggtattttccatctttgtaaagcttgtctatttttttatcctttatacctattgcaatactttgatagtctccttgtgatatcatgcttgatacttgatttaaatcttcttctgctaattcaacatcattcttagcaatttctacaatactagcttttaataagtctttagtagtattagattttaatacctttgcagccttaacagcatattgaaatttttcattagcacttattgatgtatcattagctttaattatgtagtattccccttctattctattgaagaatacagctatgcaaattgctactattaatataaccgctgctgcgattttaggtgccattccagaaaaaaatggttttctacttctcttatgtccattttttgatgaattgttacctgtatcattgttatgctcaaatttttcgtattcagttgctctagtattaatatgcatagttctttctttctcaacattttcatttttctgcaatgattcattagcaggtataataataggttcagttatagattcatttatattttccttagaaaaatctatagtattatttacattattatttattttttttgataaatcaattttacttttatttatatcttcattatctatatctaagtttttaattgggtttccacattttttgcaaaacttaacgtttggttcaattggatttccacatttagtacaaaatttcattttctcacctctctattgttacgtgttaattattgtttaaagtatattaaggatttgttttgctactaatttgcactacatcttttatagaatatactttaaaatctgaagcagttgatctaaccacataagtatctctaaaatcagtatatgatgaggttttatttttcccatatgatatataatatttttcatatacagttacttgatattcagaattgcttattttttttatatcttctatcttatgacttactagttcctcttctatttgctgttctgaataatttttaataagtgaagtaaactcacttattaaacctccacttaaatctattgatcctttaatatagtcaatattctttgagttaatcattcttatatatgcactttcataatcttctattgagtttttgacctttatctcattattatcgtatgtgttaactgaattagaagagttagattttttatccactgtttgctttttttctggtggtgtataactatactctgctgtaacttcatcattatctaatgtacaagctattttaatatttttttcactgctagtagattcgtctgaagtcttgtatgatattgcatattcattatcatttactccatcagataattttaaatctttctgaaacgcatcattttcttttattgtaatatttttaacattaatcttatttgcataattattaatttttattgaagctgttacttcagggtacttatcaatatctacgtttaatatttccatatttttagttgcatcatctttatgagatgcattttgtttaatatatgctacccctgctgatactgaaaatattaatatcaatattacgctaattaatgtaatttttaagccaatcttcctttttttattgactatattattaggtgtattatttgaattaatgagctctccacactttggacaaaattttatattatcgcttacttcatttccacattttttacaatatttcataaactaactccttgaattatttatatacttaattcttaaatgatatttttaaaagaattaaatatattaattgttgatatcaacgatgattctatttgacttgtaataaataatgctaatatagcagaacatgaaatgaataatattatcattattataaataccttatcatttttttcttcgctaatttgttttattccgctatacaaagtaataaatgataatatataccctgatccaattataagtaatccaaaaataatgctaactaacgtaactatacttgctaatgccattgaaattactaatggtatatatgatgaagttgatataaatagtatatctgttggttttatcttactcttcaatactattgcatttaatattgctaatattatagctgtcaaaataattattacaaatacttgaataaagccatttataaatatatccttattgtcaataaatgcattaattttatttttggcatccaatatttcattagacatcataagttgttgtgatgctttcaaagcttcttgctctgatattatttttgcacttgctaaaatcgtaggtaacttttttaccatactgaatattgaattaataatagctgaaacatataaaatatttaataatccctgaataataggtagtcctaaaagtaaagcaattgatgattttaataactcttcatcttttaactcactaaaaaaagatactggtttaataaagtaatttttaaatacttttattattccactatcaattggttttactgttgtgaatgtttcttttcgcatatcattttcaaattgttggcatccacaagatccacaaaacctatctccatctaaaatttcacttccacaatttttacaaaacattattacccctccgtttgcatatctgctaatacataattagttatgcactaaaaacaaactatgccatttactatatttataatatcgatactaagtaattatagcaccccacataatggaactgcaaacattaattgcatgcttttattcatcatatccaattttctatacttttttgaacaaaatctaccatatcatgtttccctttccaatttattcttgcttagatttcaaatacttcccacacatctatttttattgtgtccttttcattctgctatttattttaatttatagtaaaacctttttaatccatatactcaactcccaatcctaaaatatttaggcactatatagcttgtaataaaaatccaattcacttaaatatcaatttaaatttataagcactttagaaataataaaagccgccatttctagtgtcaaattgttttgcaaactcaatttacaaaagaagtgagtttaatagtatcatcttcaagtaaaatatttcttgggagcacatagctgataagcgacatactatcagatgactttattgagtttactagctcaggaagtgaatataattacaaaaactaatctcaatatgaatatcacaaactctttccgcgaataataaataaaaagtaaggtggtgatataaatgggatcttctcaatacaacagaaataagaatgacaagagcaatgttgataagatgaaaggcaagaataatcgtgataaaggcaacaatcaagttggctcaacagataatggaaaataatctattttacttaaatatactataactaaaataacagcaaatatataaccaaaaaacacagcctgcatctatactcactaggctgtgttttttcacattattttttatataaatttttaattcaaattttaaaatactaattaagcaagagtacaaattcactagaaaacctaaattctacttataatttagaccatactagaaagagagattactcttttttgtagcattgcattgagaataaagatgtaagatttcttcattagaagttgttcaattattgtttgtcacaattttatattgggaacaaacagtaattggtgcaacttctaatgttagaaatcatcagcttttattctctagcaatcgaaaaacagagtattctctctttcggttgagtatgaattataatctacactgcgtcaaagaagctcatttgatcactttctggaaggccatttaaacaatcaaattttctaagaagttctatggcagcattaccaatctttgaacgtttctttacatcatctactgaattaaattccttttcctttgctgcacttgctataccttctgccgctacatttcccatacctgctatactgtttattggtggtcttattccatcttcttctagctggaattttgtagcactagatttatataaatcaattggaaggaatttaaatcctctttcatacatttctaaaactatttcaaggtcatcatacatatccttatctttaggaccagcatcatttccaagagcctgaatttcctgcatctttgctttaaccttttcttttccaaagatcataaattctgcatcaaaggcttttgctcttatagtaaagtatgttgcataataagcctgaggtatatgaactttaaaccatgctattctaaatgccatcattacataagctgctgcatgggctttagggaacatgtattttatctttttacaagactctatataccattctggcacatcatgttctctcatcatagcttcatattctggaaatttaggttcttttaaggctttacctttacgaacagtttccattattttaaatgcggtattaggtggaagtccttttctaattaagtaaaccatgatatcatctctggtacataccgcatcacttatgctggtaattactccattatcaattaagtccttagcatttccaagccatacatctgtaccatgtgaaagtcctgatatacataataaatctgagaaagtctttggttttgtatctacaagcattcctcttacgaatttagtaccaaactcaggaattccaaatgttccaacctctgaatttatctgatttggagttaccccaagagcctttgttgagaagaataaggacatagtatccttgtcatccataggaatctcatgtggatcaacccctgttatatcttgaagcattcttataactgtcgggtcatcgtgccctagtatatcaagcttcaatagattttggtcaatagagtgataatcaaaatgtgttgttataatatcagaattagcgtcatcagctggatgctgcacagggcagaattcaaatatttctcttccctttggtacaactataattccacctggatgctgacctgtagttctttttataccagtacaccctactgaaattctcattgtttcagccttgtttattggaagattcttttcttcataatattttttaacataaccaaacgctgttttttctgctatagtacctatagtccctgctttaaatgttgttccctttccaaagataacttctgtatatctatgggcttttgcctgatattcccctgagaagtttaaatctatatctggttctttatctccattaaagcctaggaatgtttcaaatggtatatctattccatctttatgaagcttttctccacaaacaggacatactttatctggcaagtcaaagccgtttagaacgccataatcctcaaaatcagaatacttacacttaggacatctataatgaggtggaagcgcattaacttctgttataccagtcatatttgcaacgaaggatgaaccaacagatcctctggaacctactaagtatccatcttcatttgatttccataccagcttctgagctatgatatacattactgagaatccattttttataatagaatccagctctttatcaagtcttgcctgaactatttctggaagtggatctccataaagttcatgagctttttcataagctatatcttttattgtctgctcacaaccttctatatgtggtggacatttttcaggagaaattgggcttatttgctcacacatatctgctactatattagtatttgtaactacaacttcataagcttttgttcttcctaaataagagaattcatcaagcatttcttcagtagttcttaaatataatggtgcttgattatctgcatccttaaatccctgtcctgcttctaatatacgtctgtatatttcatcttcaggatctaggaagtgaacatctccagttgccactacaggctttcctaatctttctgcaagttctacaatctttttattaatttcttttaaatattctttatttggaacttgctcctgtcttactaagtaatcattattacctaaaggttgaatttctaagtaatcatagaaattagcaatttcctcaatttgttcttctggttttccaagaagtattgcttgatataattccccttcactacaagcacttccaataattaaaccttcagaatatttcttaaacatgctctttaatatacgtggttttttataaaaataatctaaatgagaatatgataccaatttatataagttctttaaccccacgtaattttttgctagtattattgcatgatgagttttaacctttttatatgctactttcttagcttcttcatcagctgcatataaatctatatctgatagagtttgtgcacctctttcttttagcttttcaatcattatgttaaataccttaacagttgtatcaacatcatctaaagctctatgggcaacttcaacctttattccaagattcttagcaattcttcctagcttataagatttataatcagggaatacatcttgcgctaatcccaaagtatctacataggtaaaatcaaactcataacctaaaactttcgcattatgctttaagaatccaatatcaaagtcagcattatgcgcaactaaaacacttccttcaataaattcaagcaatttagggaaaactttatcaatggtttctgcattttttaccatatcatcagttatctttgtaacctctacaactctcataggaattgacttttgagggtttacaaaagtactaaacttatctataaccttaccatccttaattttcattactcctatttcagtaatcttttctgtctgaggagaaaaacctgtagtttctaaatcaagaacgcagtatactgtatcaatactttcttccctaacatttgttacagatggctttttatcaggtgctaggtaagcttcaactccatatatgactttcatatctggattatctcttccaagcaatttgtgcgcttctggaaatgactgaactactccgtgatcagttatagcaatagacttcattccccagcccatagctctcttaattaaatcactagcactagacatggcatccatctggctcatttgagtatgcatgtgaagctctactctcttgacctcagaattatcctgtctcttatatttctttattccatttgtttcaataacagtgttagcaataagttcaacttcatgagagaaattactatatcctgcatttccagcaagtctaagccccttagccttttttattctagaaaatacttcatcatactcagtaggctttgcaaaaatcttgcaagtcattgaatttgatccatcatataaatcaaaggagattaacatctttccacttcttaattcttttgcttctaaattagatatttcaccctctaaagctactcttccctcatcaggcgttatatcattaattttaattatgttttccttaatattagcatttcgccctaaaatcaagaatggattacttgcctttttgccatcaccctcagcttttacctctggcttaccttcttcagctttaggtacttcaggaggattattgctttggttaatttttatttctttaataactttcatctcattagcacgtttatcttctgcaatttttactaattcttcgctatctatttggtcaataaagttgatattataatgtttcccgtacatatgctttatagctttattaatttgcttatcatattccatggtttttagaaaacctgctacaggaattttaaaattaaaatttatagtatttccttctatttcatagtcactattattaaccgctgcctttaatgcaggatactttgtagataaggaatatacgatatttttcaattctttttctataggtcttatttcgacctcgtcactatactttacaataattttagaatcatttaatccgaatttaccttttataaaactattgaaactttcaatttcccctagttcaatataattatctgaactaatttccatttccagcactttagttttcttacgcaagactacggattgtataacggcagtatttatgctgccagccgattcataatcactaaaagcttcatttattctcttcatactactcattaaccttttctaaaaaattttcagtatgctactattatatagattaaacttgcaatttgttaagcttcaaaaaaacgcatagaaataattctatcaaaaaagtattcctatacctccctcatatttaatctagataatatttatattatttttcaatctcaactaatttttcatttgtacaataattaatcaattagtagttttccgacatttaaggcatatgaacaaaaataacgagcccaaaataccataattatttttcattaggcgaaaaagcagattggactcatagcaagtctattagtgcaatttgctgatgaagcataatggaaaataagcttggtagatggacttgttatttttttgattatgcctaactatcattccataatctaataatgttgtcaaggcaaaagaatgtttgctaattctattagacgttgaattcactggcaaattaataaataataaaatttgcatacattcttcttagagtgaaactatttattttaactcagaatggcacctgccaaccgtttcctttattgccatagcgttctcattttctgatgaaataactaactgacttatgtaattattattaaatatctcacagtaaaattccttactcatttcatcaatttcttcataattttcacttaacttctgtaataaatcctcttcaccaagtccagcgttatctatgaaataatatagattcattctatttacatattcttcaattcttttaaaattatacttatttacaacaaatcctattacataatctttatcagtttttttagttcccttttttatgctaataccaaacatagatacttctggtaccttctttatttcaaacttcttatatgctattcttgaaattcctaaatgctctactatttcttcaactggaacctcatgctccacttgatttccaaaatacaacattctagagtctaaaactattaaacaaaggttctctccaatcatttcatttaagacctttactttaaattcatcgcttttcttcattccatagtattccacgaaagttttaactccatcctcatcttcttcgcttcttaccttcaatttattcccgccaaataaaaacatattttccttctccttcatcaagtgatatataacattataatatataattgcttgtttaataaattaaaaactgcagaaatttaaaataatattttaaattcttatgtaggtatctatagataaacaacttagacctgaacttatgcatataactcaccgaaaggacaggcactctgttgtttcggttactgagaataagttgaggctttctaacatcataagttgcaccatttcagcatgctcccgagacaagctcgtgacaagcaaaaatggaacaacttatgatgaagaaatgcctgcaacatattctctaatgtaacactgcacaaaagagtacctgtcctttctgatatatcagatttttcaagctataagtataattctcaaattggatatatatagggttcctaaatgatattcgaacttatgaaattccaatatcgctgttattcaggaaattgaaacagttgatatgtattgttatcaatatggagccctatatagataagccaattataagttagatttatactatgaaatatatcccaactagaaatgggtaatatatttttgtggaatgtttcattggtaattttgatggatgtgattctttggctataagttgttccaaatgtgctagttcaaagcttgttctttgaggctagcactttgggtacaactttatagccttagaatcacccatcataattacctagaaactggaacaaaagtatattactcatttcggtgaggtatgcgcataagtatagattatagttgggttatctatatacaatattaaaaggaataactaaagtgatgtttactttaattattccttaaattcaatatcttaatatttcagtattatctctacttaattatagagctttatttttaacttcattatttattctttctattaaatcttctaaatttaatgttccctcatctccattacttctgctgcgtaatgatatattattttctgcttcttccttttctccaacaataataatgtaaggaaccctttcatttctggcttctcttattttgtaacctatcttttcatctttctgatcaatttcaactcttataccttctgagcttaatttatctttaatcttttctgaatagctattaaatttatttgatataggaagtatttttacctgaactggagaaagccatgttggaaactttccagcaaaatgttctattaatattcctataaatctttctatacttccaaatactactctatggattactattggtctatgcctttctccatcactacctacatactctaattcaaacctttgaggcaattgaaaatctaactgaattgttccacattgccaagttctgcctatgctatcttcaagatgaaaatctattttaggcccataaaaagctccgtcaccctcatttattttatattcaagatttaattcatctaaggcacctttcaatgagctttctgctaattcccattcttcatcacttcccattgaatcctctggccttgtagaaagttctaaattatacttaaacccaaattttgaatataccttgtcaattaaattaataacgccttttatttctgactttatttgatctggtaacataaatatatgtgcatcgtcttgtgtgaatgctcttactctcataagaccatggagtgctccagaaagctcatgtctatgaactcgtcctaattctccaactctcattggaaaatctctatatgaatgtgattctgatttataaactaacattccacctgggcaattcattggctttaaagcaaattcttcttcatcaattgttgaagtatacatattttctctataatgataccaatgccctgaagtctcccatagtttcttattaagcattattggagtttcaatttcaacataaccatcttcgtaatgtaattttctccaaaaatctattagggtattttttaatattactcctttaggaagcataaatggaaatcctggaccttcttctgcaaaagtaaataattttaattcttttcctaatttcctatgatcccttttctttgcttcttctaaattatgcaaatgcacttctaattctttcttactagaaaatgcaactccataaactctttgaagcatcttatttttttcatttcctctccaatatgctccagcaacgcttaatagtttaaatgccttaatatactttgttgatggaatatgaggccctctgcaaaggtctatataatcgccctgtttatataaagatatcttttcagcttcaggaagatccttaataagttctactttatatgtttctcccttttcctccattaattttattgcttcgtctctagaaatatcgattctttcaaagctaagattttcatttattattttattcatttctgcttcaattttatttaaatcttcattggataatgaattttcaatatcaaaatcataataaaaaccattgtttattgcaggtcctatagcaagctttgaatccttataaattcttttaactgcttgagccataacgtgagaagtagaatgtcttataacttcaactgctttttcatcatcgtaagttaaaatatttacctcatcattattttttaatttgtaagttaaatctactaatgtcccatttacttcccccactactgcgactttagctaagtttttactaattgaatttgctaaatcataaatactagattcatctgcaatttcttttattgatccatctttaagttttatatttatcataaacttgttacctccttctttaagattttataacattagatatatctataggttaataatcgataacacaacttattccaaattgcgtctcatacttttttaaattcatatatttttgtacaaaaaaagcacccgtcccaagccttgggacgaatgcataatatccgtggttccacccaaattgaattaaataaactcaattcttctctaaaatttttaacgattttcaccgatggcatttcacaaaatctgctaataaaccatagctccagggtagtttttctcatagtcatatttagaaatgcttacagtcggtgacatttcctctctgaaaactgtactctataatacttttccctttcattgcctgaaaatatttaatttttaagagttacgtgcactttgctcttattaataataaatactagcacttttgtagtatcttgtaaatagtttttaccacaaaaattttcttgcttccataaactcagttatatacaagccgaaattataaatattttgattccgaaaagctatgaaaatgtcgctgaaggttctaagcagcaggttgcatccagtttagcatgctccaactttcatagggaagctcgactcattacattcgctgaggaagttcgagaacccaaaataaaattttggactctcacttcacaagctaaactggaacaacctaccgctaagaacctttaacagctcattttcaaatgttttctccacaaatatatttataatttctggtaaagataagaccttaaagttccagcaaatttgcaagtatatttatctaacgagtttaatccttaagctgtttatatatatggttcctcaatgatattcaaacttatgaaatttcaatatcgctgttattcaggaaattgaaacagttgacatgtattattatcaatatggaaccctatatagatgcccactttaaatctaaatttatgtagtaacttatcaaaatcataaatattttgattacaaaaactatcaaacatatccaaactaaaaataagacttatgcttttgtaaaatatgagaacttgcctttgaggctagcatcttgggtgcaactaatgagcttctctccttttttattttttgaaaaaaaacacatcatccgtttagaataatgtgttttagatttgatgcataattcaataaaataacgtattaattatttcttgaatttcacttttatttttttactgctaagcaataattaacattatcaaatgctcttataggatgttctggattcgcttgattatattttttaaaatactgctccgttatttcatctggtgttaaatgttcataaattaagaaatcactatcagacaatagtttttccaactctaaataagaataacttgcaagcattttttcatttgttgcattagctagtgcaatttgctttttaactctttcgcctgccttagaagtatatgtgttttcatcttgataatcaaaaacaatgctactacctttcggcacaatggttgaaatagtattaattgcatatgcaaaatctttcttagttaaatagtaattcaagccaagtaaactacaaaaacttattttactttgctcaaattgagagcatttaattatgtttctttcccaattcttttctgtaaagtcaatagatatatagtgtaaattcggaggtatttctttcattactttttgaatacgcttttgcttatcttcaccagttaaaggatggtcaagttcaaatatctgaatatttcttgcccagtcaggctgacgatatgcaaaggtgtcatacccagcggcaaaaatcaaatattgttttgcaccaatttttacggcattttcaagtgatttttctgtaaatgctgctctaccaattggagttggagataactgattgtcaacgataaagcgtaacgcttcatcttgtgtaccatcaaatgatgggttgaaaaatttaattccttttgacatattacttgaaatttgttcatattcattttgagttagaatatcctttgctaagtaatcatcaaaaactttctctttgtttttaacagaatgatacgctcttgaaaacgcactaatcaatgcagtcatacttttttgttccataaaattatcacctctaataattaataccaattcaccaaccaaattacaagtattgacatttttattgttttatggtattataaatatagtaaagataaacaatttacaaaacgtcacatttatagtggcgtttttttaatgtattcatatataaaaatatttttctaaattcaaaattacagctaaaattcctttaatatttttagaattattatgaagaattatttttgcaatatatttgtttaattttttctggattaattgtattatcattagactgttgaataaatactaaggagatctagtggcgtcagctttactgtgaaaaaacataaaaaaataaggtaagatataaattttacttataaaaatagagtagcttttgcactaccctacaaaactatttatttttttgatttattatttatggctaagcacttactatgattttgcttgcacttacaccagaattaattaaaatctgttttaatgtttgactctttacataaaatgtagcatttgtacaatcatagaatggattaattcctataccattaggcattttttggtgagttgctatgcttgttacactatctggaatagttatgctggttaaatttgtgcagccttcaaatgcacttctttgtatacttgttacaccatttggtattactatgcttgttaaactactacaaccttgaaattcattctcgtttatgattgttataccatttggtattgttatgctacttaaactgctacaaccactaaatgcactatagcctatgctttttacactatccggaattgttatgtttgttaaattaatacaattcctaaatatagcatcccccatatttgttacactatttggaatggttaaagtcgttaaaccactacatccagcaaatgactgaggcccaatagactccacactatttggaataattatgctttttaaactcttacacccactaaaggcgtattcatttataattttcacactatctggaatagttatactttgtaaattactacatccattaaatgcatatctatctatacgttttacactacttggaatatctacgtgtgttaagttactgcaattcatacatactatagattctatacctgttgtactgtctggtattgttatgcttgttaagtttttgcaggtagatgccgatgtaaatcttatacgttttacctcagtaccatcaattttatttggtatcacgactgagctatcagaaccggtatattctactattgttccagttgatttatcaaatttaaagtttccgcttgttgtaagttctgtccatgcaccgctttcatttagataacacccatcaattgttgtatctttagccatgtagcctttagaatcaaaataataccatttagaattaattagcctccagcctgtagcccatgaacttccttctgtataccaccagcctctaggatcgctcttccactctgcactcgctcctattgggtttagtgctaataacgaagctacacataatgaactcgctattacttttattagtctcaaacttttcattctttacccccctatgtaatttatcgtatttaatggaacaatatataattatatcatatttatggcaatattttcattatttattctacaaacgattgaaaattgatcaataaaagacgtattttagtgttataacacataaaaaaaatcgtattattcaatctcttgaataatacgattttacaatttgctatttatttttattgattcatgatataagaacattacaaattacctcaacgataaattggaatttatctaactaattaatatctatatcactacattaataaagcacatttatatatctaaatttaattgaattttaatctacatttttattatcattatcaaaattattagatttatcaaaagaatagaatctgtaatacatttttccaaagtttcttcctgttaataattcaaatagcttacctaaaaataaacctaagataattccaggcgccacacttgaaacatatgcaaaaatttctattctgctattactattttcacaaagcatgagaactgccatagcaagaaaaatctgtgttatcaaaatacaaataacaactaaaacaagagtaagtataattttttctgttttcatataaaacacctctattcttatttttattctatttccaataattttataagttagatataacttttcaaatgttcatcaaacaattctttatttaatactattggtgttatgggctcgccataaaaatcttctgtttctccaataactttgcatccaaattttattagcatatttacggttacttctcttgcttcaatatataactcgtccgtatattgtctaaaaatctcttttaatgaatggatagccattttttgaccaagacctaaacctcgcagtctcttatcaatagcaaatcttccccatttccatttatctttttctttccatgttgcaacaaccccaataacgtcttcacctactcttgcacaccaccagattggttttaaattagcatcaattgcaatcgattctactgggataccctgctcattaaaaaatacttctgttgctaattttattgcatcatccatataattttctgaaattttttcaatcaaaattctagaatcattctttttaagattgttttttaatgcaagaatacgaaatactttaaatgccctaacaatattgtctatatcctcgctatctcctaaatctaaaatttcattcataaatgtatttgctttataatccccatcattaatagttgtcaaacccaatggtaaaaggcaaatatctctcattctcttatcactttcagactttttcaattctaagtaattttttgcttccatattactaactattctactaagtgaagccttatcaatacccaggtttatcaacaattcattaaaaggagtctttccgttttgccttaggtagtttaatatgtgtgcttgtgcaagtgtcaagcctgaattaaagcaattgtaatttaataaacccaattctcttacaattaatcttatctcttttctaattacttcctctttattcataccgcgcctccaaattaattgatattatcaactatattatctcgtttttatttttttgtcaagtcgactttcaaaaatgggtatgcaccgagaaattataatttgtctactacacaatctactattgtgtagaactgtacataaaaatatcacattatctatcgattactatgataatgtgatatttaaatacgttattaaattttaaacaatacataaatctttttaatcaaaaataattctattttctttccttgactgtggtttaccatttttagatatgtaaccaagaggaatgatactatgacatttataagtactatctaatccccatttttccttacttttcttacctaattcagtttcaaatgttttttctcctcttgaaatacaaacagaaccaatatttatttctgctgcttcaagcataatattttgacttgcaacacaacagtcatgaattgcataaggataattatctggtgcgaataaataaattactacaggagctttataaaaagcacttttaatactatcatcatcagcaatacttccacttgatttatcgtttctccttgcagctccgaaaagttctctatttatctttcccaattcatcatttaatctcttatcttgaactacaacaaattttaccgcttgtagatttcctgcacacggcgcccataaaccagcctctaaaattttctctaactcttctttttttatctgttcttctttaaaaaatcttatagatcttctttcttttataacttctaaaactgtcttcatataatatcagctccttcatcaaactattatataaaaactttttttatatgtacagtacgcacaaaaaagtctctataatcgctctttatacaaatgtccccattgcttcactgtttcgctttggtccatctatcaaatctcttataattaatagtttccacttactgcccaatatctgtacagttgtggcaacatcacaaacaggcatatcttatttctttatcataaccttaaccttcataatatctattaaacaaactttcttttctttaataaatattataacagatttttaaatatcacattattcaattttcaaagaacatattttatttacttcaccaaatctacattatgcatatttatttaataattccacatgataaatttaattgcttacttgtataacactcgaattgtgaaaggtggctactcaaatggaacaatctatacgctttgagccaaactccttgcaatatgtattaaatcctatgcaatatggttataaagtcataatagctggtagtggtcaattatcttttacatcttaaatttcaaaatttccaaactactaacatattagtttgaattgaattgtttgaatacttatttaaaaattatattaatatttttaattatatgaatttaaccttcatataattaaaggaaacctcttgctcgttattttgatcttttagttgctctttatttataagtctttacacttttgttcattattttttgagctccctatttttagggagcttttattatttttatcatgaataatttcataaaatactcataaactaagaatgtctccataatcagatcagtactccattttcaatccatttaatgtgggaatatgatattttaattacgtattatttaagatatattaacgtataatataaataccccgcaaatattaattatcacatacatatacgcccctttattggggcattttttgtacctattattttaagtattgtgcagtacttaaataaaaaaataccgcaaattcatttttattgaataatgcggtatttcttctattttttatttttattactccataaataatgtaatcaggacatgactatctaaatatatttatttattttctaaccattcttgaaaactaaatgctaattcttgcatttcattaataaatctacattactttcatgcagaactcaaaaaaaataagcatagaatattctatacttatctttaaaaattttcagttaaaagttcttaattgtaggttgtttaactaatgcttgtcacaatgaaatttggagcaagcattagtgatgaaacctgaaatttagtacttccagcaatatttccatagtccttggaaataacactatttctgctttttgagattcacatgtttctatgtgattaagctgcttttttgataacgttcaaatatttctttcctttttctgtatcatatttcccttcccacttagaaataacgataacagctaatgagtttccaattatattaacaacagttcttgccatatcaacaatacgatctattcctgcaatgaaagctaccccttctacaggtatacctacagaaccaacggttgctaataaaacaacaaaggatgcccctggaactccagccataccttttgatgtaaccattagtacaaatactaaatttatttgcgtagcaattggcagatttatcccatatatttgcgcgataaaaagtgctgcaatcgcctgatataaggtagatccatctaagttaaatgaataccccgttggaataacaaaagatgtaatagctttcggacagccatacttttccatcttctccataagttttggtaaaactgcttcagaacttgctgtagtgtacgcgaggataatttcatcttttaaaatcttcataagtgatataatgcttgaaccacacatcttacctatcaagccaaatataacaaatatgaagaaaatcatagctacataaacactaataactaatttacctaatggaatcaatgaagctactccaaatttagaaactgttacaccaattaatccaaatactccaagtggtgcaagtttcataatttgattagttacccaaaacattgaatcagccacaccttgacaaaaagcaagaacaggctttcctttttctccaattgcagcaacacctaaaccaaacataactgaaaagaatataactgcaagtaaatcaccttttgaaagagattcaaagatatttgttggaacaatatttaaaaatgtatctgcaaaaccatggctagatacagtttcagctgtattcatatatttttcgatactaactgacgaaagttgttgaatattaattccacttcctggatgagccacattggctacaactagtcctattacaatggcaactgtagttactatttcaaaatacagtatagtttttcctcctatttttcctacctgcttaatatcgcctacaccagcaacaccaacaacaagtgatgaaaatactataggaacaactatcattttgattagtctgatgaatatatctccaataggctgtaagtatgatgctacaactggattgccataaaaagcagctcctattgcaatacctagcacaagccctagaagaatttgaaatgctaatcctaattttttcattttaatatcccccttctaaaatgctgcaacttagaattttctcgtttcaaaaacttactacagagaatatatttgataaaaccttataagtatttaaaaagacaaaattccaaatttaaacatacttaataaaaaaacaatagattttcattaaaaaaataatgttattttactaaatttcttattgcttttataatcaagcgctgacataatgtctcacttttgaaaatttatacaagaaaattcaatttccgcatgtattataacacaaaaaatcatttattcttatgtttttaaaattctgaataatcaaaaaaatccagtttaggcttattaaaatattcgttagtgcgacttttataaattaaatttattataattccaactcaaataatatacgttaaaccctctattttagtgccttaagtacatattacaagatgctttcttgtaatatagcatctatttcaaacatctttatatgaattagaaaaaattttttcatgtcaattaattaatatggagtttaccatgtgccaagagcataaaaataaggagtgatatgagattaaaattatgaatctcatatcactccaaatgatttttcttgctatttaattataaacttatttacaaaattttatattatagataatccaactaatatgttaagttatgcatacatctcaccgagatcataaatattgtgatttcgaaaagccatgaaaatatttataacttctgacaaagatgagaacttaaagttttagcaaattggtaagtatgtttatctaataaataccttactagaaagattaaactgtttttaattcgttactaatagatttctttcctgatatccctggctctgtcatattaaatggatctaaaatttcatttagttcatcttcacttaaaagccccgcttctaatatcaaagttctaatagatgttcctgtttttatagcttctttagctaggtttgcagctgttgaatatcctacatgcgggcaaattgctgtgattattccaacactgttttctactaaatcacggcatctttcttcattggctgtaataccttttacacaattatctatgaaagtttgaactgcataagttagagtatcaattgattgaaataaacaatagaatataattggttcaaatgcattaagttctaattgtccaccttctgctgccattgtgattgtcgtatcattaccgataatattgaatgccacttggtttactacctcaggaataactgggttaacttttcccggcatgatagaggaaccattttgttttgctggaagattaatttctccaaatcctgttcttggtccagaagacattaatcttaagtcattagcaatcttagataatgttactgcacaagccttaacagctcctgatactgctacaaaggaatctaagttttgtgttgaatctattaaatcaaaagcttgtataaggtccattcctgtaatctctgatagatttggaacaactcgtttaagatactttacgtctgcattaactccagtacctattgcagttccgcccatattaagaactcgcatctcatccatagctttttccatacggttaacatctctcattatagctactgaataagctttaaattcttgacctaaacgaattggtactgcatcttgcatttgagttcttcccatttttattatgtgatcaaattctatggctttttgtgaaaatgcatcatgtaatctatatagctcactttgagcatgttccaataattttaaagcagtaatttttcctgcagttggtataacatcgttagtagattgtccgcagtttacatgatcatttggatgtacaatagaatattctccttttttacctccaagtatctcaattgcacggttggctatgacctcattagcattcatattaagtgaagttcctgctccaccttgaattgggtcaacaataaagtattcatgcagatttcctcttaatatctcatcacaagcttttacaattgcatctgcaatctttttgtctaaaactccaacttcacaatttgttatagcagctgctttctttatatatgctaaactatttataatttctggatgcatgaacaatccagtaatcctaaagttttcagcagcacgcaaagattgtacaccataatatacatcttcaggtatgtccttgcttccaattgagtcgttctccttacggaaattgatatctttattttctaactttatttcccttatcataaccttcgcccccacattataatcggcacttcttgtataaattattggtttattatcaaattcttctaattcatctgttgacttaattataagtgtcctctacaatataatcaaatacatataatgatataagtattatagatttttatttatatgtggaggttatttatgtttaaaggtatggaatatgtgtatgaggttaataaggaaaaaagtttttcaaaagccgctcaaaacctgtatatttctcaaccttcccttagtgcaactataaaaaagatagaagagcgtgtaggttttcctttgtttgaccgaagtacaaatccaattcaattaactccttgtggacaggagtatgtaaaatgtatagaaaagattcttgatattcaaaatggattcgagaatttcttaagcaatatgaacgagttacgtactggaaatatagccataggcggaagtaatctttttgcttcttatattcttcctcctataatcacagattttagagaaaaattcccacttgtttctattcatatggttgaagctaatactgcacttttagagcagcaactcttctctggtgctttagatcttgttatagataattatgagtttaacgaaaatatatattctagacataagtactgtaatgaaaacttgcttttagctgttccaaagaaatttgaagttaatagtaaaaccataaattatcaattaactgctcatgacataatagataataaacatcttgattcatctacacctagtgttcctttggaactatttaaagatgaaccatttctatttttaagatctggaaatgatacacgtaaacgtgctgagaagatatgtcaacatcataacttttcaccaaatgtaattttaaaattggatcagttagttacgtcatataaccttacctgctatggaatgggcatcagctttttaagtgatactcttataagatatacaaaacctgaccctaacgtaatctattataagctgaatgaaaatagtatttgccgtaacgtatatttctacaccaaaaagggaaaatacttcacacgagcaatggaggagttcttaaaaatggctatacctgaaattaatgaggatataacttagaattatgagataaattaccgaaaggatacgtactctgttgttccggttactgagaataagttgaggatttctaacatcagaaattgcaccatttcatcatgctcccgaggcaagctcgtgacaagcaaaatggaacaacttctaatgaagaaattcctacaacatattctctaatgtaacactgcgcaaaagagtacctgtcctttctgatatagcatatatttcaatccataagtgtaattcttagattggatatctatatctggtagttcatttaaaagcttttagaaaatgaaaacaccaacttttctaaaattgaaaggttggtatttttatttgggctgtattttaatgtaatgttgaaatataccccaaaaaattatgggtaagattgtccacctataatactaaatataagaaaattgtgaacttgtatcttttattttattataatgactgtgacctttattaaatcattttcctttggacaataatattttatcaagaatcatattaactggtacgtatattagcaaccataatcccaaatcaattaataattttaaatttaatattacttcagaaaaattataatgaaatcctgttaagttataaataatgtgaacgattataaaggttagtataactgtcaatatattcacataattttttttactcatttaatttcctcctataattcgctctatttactatgttacataaaaatttactgttacgtcttatagcaaaattggtactgtttattttctattgctgcaaatatgtataccagtcagtattgatactaaagttccgcccaaaattgcatatccccaaatgggcatttctattttggtaattcctaaaatgacgccagaaattgcaccaaatgcaatagtaaataaaattgatttccttaatctatgttctaagatcataaagattcccctctcaaccatatgtgttcgtaattatttatactagtgcaatactcataaattctaagtattacatcatcgcttactattataacatattttgtaaaaatctcttttacagaatattacacataccatgaatacatcggctctctatttttaagtctttcattctgatatatgagttcgctacattactttgaactataaagcttttagtctttattatctctttgtctatacaaaatactttaggccatttcgaacacacttcaaacacccatatatgctctgaattttgtctctaaaataaaatgatgtaggtatttcaatttactatttattaatacttgtaagcataatactaaacttatcttattaagtagctttcatatttgatatatcaatactagcttttactaaaagaataattggtattgataaaattaataagctgattattactgaacatattggtaaaatctttttatatcctttctgagcaattgcaataattccaagtataaggccaataagagctataacaaacatactgatcataatcgaagtaggtaagcgcatattataacctgaatttatagggaacaatatgtcctcaactgttattattacagcataaataattggcatgagtgccaccaaaaaagatataattccaaccttagaatgtttcaacatttccataattatcccccataaatgcttcaaaataaattactattattaattaattataacacaaattgtaaaaaccacattgctaaattttcaaagaacattattctcattaactaatacacaatttaagaatacgaagcacttattatagcatttaatgtatatcacccaccaccgccagatgcaaaagcaagatatctatcgccatctaaatgcaaataaactacttttccgtttccaataaagtttttttctttgctataaattcttttacctgtaagtttatcaatatttctagaaacttcatattgaggcttttcataatctagtaatgttacaactattccaatatcatagcggtattcatcgaaatacatcctattaggatagctaaatatattccaagtaccatatatcacacgatttgagaatgatgcagacaaaataataagggtcagtgtcattattactattttaattataatttttgatttttttatttacatctccccctcatatacgtttataattaatacataataatttactattacgtttaataataaaattattcattatttcaactacacaccatgtccataatctatacataaatacaattattttttcttttttacgcttgaaccaatcgctaatcccaaactcataccaatgcacatgccagtaccaatatttttaaaaagcaactggcctacggtcatcccaagacaaatccctaggcacatacctaatgccaaataattatcttctcctttttcttctgaactttcattgttttcatcatcaatctctgtatttttattttctttatccttttcattcataatttcattctccccatatttccattatataaacctgaattattcatagatatagttaataacataagaaagttagtttttcatgctattagctatttcttttcttaatttttaattatttttctaaatatacgtacagcttcgctacggactttaggtt

SEQ ID NO: 46 - DNA, 43491 bp, Clostridium beijerinckii
tcctaaataatatctataaaaaattaatattgaaatcatctataatagtagatgaactaaaaacatttacggaaatgatattatcccttcatactgtcaagtttattattttaactgactattataaagggagcatatcaaaaagtaggtgtttttattatataaaaataactaataaaagaggtgtagtagaaaggatggtatatatgaaaggcatagacgtaagtaatcataatggaagcataaattttggacaggtgaaagattcaggaatagaagctgtttacattaaagctacagaaggtacaacattcaaagatcgatgtttagaggttaattattccaatgcacattgcgaaggattaaaaacaggattttatcatttcttggttgggactagcgagccagaaactcaggctaatagtttctataatgctataaaggataaagcaaatgatctaattccaatgttagatgtagaaagtaattttgatggattaatggactttgtattaagatttattgctaaatttaaagagatatcaaatatgcaaattggtatttatacttatactagttttacagataacttggatgatagaattgctggttatccactatgggaggcgaattataataataatccatggaaattaaattctaatttctttgctaatagagtgggccaccaatattctgaaacaggatgtgtaaatggtatagatactgattgcgatatgaatgagtttaatgatggaataataaataaaactaatggatatgtaagaaccaattatcttccaattggatatagaggtgatggaagttttgctggagttgacatggaatatgtgcaagaatattttgaagatattcgtatctatgctaattcaaatgaaaagggaatttgggttgaaactcaaaatttgcctatgagcaaatgtttggaattaaaagatacgttaggatgttggttttatgaaataaaatagtttaaagggcatgagagtaatcttgtgccctctatttttttgcacttttctgatatgtccttagtaaaaggatcgtagagagctatgatataagcagtttatgtggtggtttgaaatatatgttataataattattatatggaatagaaatttggttcagatagtaattaatattactaattatagatttttatactggagggaagtagttgaatgagagtaaaatatggaaagtgattttttattcaatgggtattataagtgtaattgttttggggttatacatatatgctatgtctacattttctgaatcattttcatagatataaaaatgaaattaataggggtgggagtataatatgaaaagagttttgcttttaatctttactaccataattatgtttcaatttttgattgcatgctcgacaaataaaaatgtagcatttaaagaattttattctaatgtaattgggtttagtaaaactgatgaagaacaagctattcagcaagatacgattctaatgttgactaatgaagagtttcaaaggtttaaagataaatattttacaccaagagaaattccaatgaaatcacctgataaagaaatggcaattttatacttacaaataccttccgtaaatagttcagtacaaggatatagagttgaaagtataaatgtaggcaatgatactttaacagtaaacctaaaacaatcatcagttgcacaagttgatggaatagaaggttttgatggtacatggaaatgggttatattagttcaagtagataaagctaatttaaaagataatatgaagattgttttaaataaataaatttaatctaatacttttaagattagaataagccacaaaataggaggtattatggagatagagtttaaaatttcaaaggatgaattaatagcttttaatatgaagtatattgttaacacaaaaacttacaaacagcaaattcgtgcatatgctgtacttgctttttttatactgcttggattgatgattttacttagaagtaccttatacactgtaactattattattatgtacattatattcttcttttttagaaaaaaaatatttaacagatcattaagaagaagatttctaagaatatatggaacaaataaattaacagatacatttgagacaacgcatttaaaatttatagaaaaaggaataaaaactaatactagattttcagagaaaattcataattggaactccataaaaggtttgtatttattagaacaatatatttttatacctacaatgaatggtgaaagtttagtaatacctatattgtcgttctattcaatggacgataagaatttatttttagatactattattaagaatacaaatttagagttaaaatatagttatcctgattcggtttagttttaaattctataaaacctcctcaattttgaggaggtttttgatattttataaagtaaagttatgcaattgcaatgactgccgaaattgcttcaattgcttctgaaaaagcagatataattgcagcacctaaagctgtttcaggaagtgcaagtaatatagcagcaacaactgcaatgcatattatgacacctatagcgggattttctttaacaaaatcaactacgctgcttgcagcaagtttaagatcttcaagcaatttatctttatctactctaaattcaattgataaagtttctgaaagagaaaatgtatcatgttcaggcacgttaaatgaattttcaagctcaatctttaaactagtaccattagttgatgttttaattgatagttccatatctttggcttttgcaagaattgttgacaattcaatgttatctttatttaaagatgctttaagattatcaagaggcgtttgtatatcggcaccatcaaattcaccacctttaaattttataacttttgagtcatctcctaaggcagcttttactgctgctcctatagcgattttaacaaatgcattattaaatatttctatttctgcatcaggggttgagaattcaacgccaaatagtttggcaaaactgttatcattaagtgctcctaagatatcgactggaactacgctattaacacctggattctttccagaagaaatattattatcaatttcaatatctgcattgccatgtaaagtaacggttgaaatttggtcaaatgcccaatcttttggaagtggatatccaagatttccactaaagccagtagacatatcacatacgaaactactgcaagaataaccggcattttgcactctgctgcatacatttctaggtgcatatatacctattttatagatggaatttgcgttagtgaatttttcgcttattgctttaaaataaggtaatacattagatgttacatcagaatctagtgcatcaaaatcaacagcaaaatatattattgtatctttagtaaaacctaattgggctgcagcaaatatagctgagtctgcatcgaagacaccttgctcatatgaaaaataacttaatttgtatcctccaacttcaaagattggaataactcttaatccattatcaaatataatttttaattcagatgaggtcattctaaattttccagtaagatatctgccaactacttcatatttattagatttaagagtagccgcaattgcgtctgtaatagtagttgaacaatcgcaggcagtaccttttctagtgttatctccagtacttacaagcagtgatgcaaaggtttggcttccagcaattccatcagcatttaagccgcaaaaactttggaactttgtaactgcatttttaactccatttccataaccaccatcaaatccattaggatcaaattctttaccgttacaatataaagcaaactgtagtaaatatataaatttagttttagtacttcctaatgataaaacaggacatttacttttagttgaaggtccaaatactccatttggtgtagaaatgccttcctcaatctgcagagcataaattaaggctttattagtagaacggtcataaattccattgcatggtactaagcctatatctatactaaaagaagtatttgaaatataatttttgtttaagtattgttgaatagtacgtattttttgatcacatttgtccttatattcaccataagtaagcatttgaaaagcatccatagataataaagctttcattaaaatactatcaacaacaccatttgcattagataatccagcatcagtttgaagttgttttatagcagcttctgtatttgtaccaaatgtaccagtaaatccgccggggttatatcctttgcagaataatgctccttggagaataaatattttatgctgataagatataatagcggattcagaccagtcattttgtggctgagagtcaattgataaattttcaaatgcacttcttgttgcggggccaaagcttccgttaggggtagatataccaagttcaatctgcagagcagttgttagtgctgttattgttgtccagccagtagccccatcctcaggaattattttgtaattagaattatccttgtaaattccatttaaccattgttgggtttttaataccatttgatccaagtgaatcactcctttatttttgttttcataatatataagagaataatttaataatatgtaaacctaaaattaaagaaatatttttattatgctagcagtaccaaaaataaaatctacatggatattagaaatatagatataaaataatctcaatggcgtgaaaataattttatgctctccatttttttgtaaagaatcaaagatatgctataataaagtaaacgttaaaataaagatacaatacaagctgttattaaattttatgagaatattgtaaacttaaaggagattgataatttatggtagagaacattacagaatattcattaaatgatgggcttaaagtgccaagcattggttttgggacatacagtctaaatggtatagacggagctaatagcataaaagaggcaattgatttagggtatagattaattgattcagcatttaattatgaaaatgaaggtgcagttggagaagcagtaaggaaatgctctgtttcaagagaaaagcttataattacttctaaattacctggtcgtcatcactcatataaagaagctattaatacagttgaagagtcattatttagggctggattagattattatgatttatatcttattcattggcctaatccaagaattaatttatatgttgaagcttggcaggcaatgattgaattaaagaaaagaggcttaattagatcaataggtgtttgcaatttcatgccagaacatttacagactttaataaaagaaactggcgtagctcctagtattaatcaaattgagcttcatccttattttaatcaagaagaacaacgtgcttgtaacaaagaacatggtatacttacagaatcttggagccctcttggaagaggtaatagtatgctacaagatgagaaaattgctggaattgctgaaacacataaaaaatctatttcacaagtaattttacgttggcatatacaattaggggctattccacttccaaaagcatcatcaaaagagcatcaattagataatctaaatatttttgatttcgaattatcagaagatgaaatgaaaatcatttctggactttctcgtgaagagggtcgtacaactaatcaagatcctagagtttatgaagaattctaataaaataagtagtagaaagtaatagctgcagaaataggtacaactgttgttcttgctccattctaataaaataagcggtagaaaggaacaacctgactactgcttatttttatgtttatatatattacttctcatgataaaacttagtaaagcagtagagaggaaggtcctaactactgcttttgtcttttaggaaacacaatgttctatatcatacattagtatgagattaagaattaataatgaaaatatatccactccattagtatattatccggcaataaaaatgtgataaaaattagtaagataattgatattttcattatttcttttatagcaaatcataaattaatacatagtatggaattgtagagagattcttatgtaccataacttaatgatagtgtaactatgctatgaagaaatagatataaaaataaatttacactgttaaatataaatgtttaattttattattcattacggaggagaaaaagatgagtaacaaagagtgctgtgattgtgatgatcttggaataatgtatactattaattgcgaaggaactcttagcgacgatgccgagtgctgtccaagaatggattaccctggaaaagatgcattggaagatgcgtataatcaaggacgtaataaagggtattgtgatggtgtggaagctggacgtgaagatggatactgtaaaggatacgagcagggagcaagggaagcatgcgaaaacacaaagcaaaaagctttagattgtgtaagaaatattaattgtcgttaattgttaaaagaatatttattgtttagtaaatttactgaataacaaaaataagagatagcagaaaatcatgtgaatgataataaggctatctctttatttattgaaaataggaaacgtattttaattattagcataatttttaaataatatacatgaataataaaaatattattaatctttttcgcttttgtattgaattaattttttatttataagctttgcttccctttcgccatttatgctcatcatagtataaactaaaaattttactataactaatgcaaagatatatgctagaagtaaattaatattcataaccttacctgggctaaaaaacaacagccataataaaatcattaattctgagagagttaagaaaacattaaaagtaattagtcgaacttttttattaatatcgtttttgtttataaaagccaatttgaaaaatacgtacgccaatgagaataacataatttgaaaaagttgtgaagtttcaattgtttcctttgaataaatcgctgaaatcgttgtaataaggatcattaggaatccgctagatataaagaaatcttttaaagaattttttaaataaccaataaatttcatagtataacctccttatttataatcctaattttttcttaaatacaggaacatattgtcttgaaatgaatatcttttctccattttgtagtaatgcttcaaatttgccatagaaaattgggctaacagattctattttagaaatattaataattgttgactttgatgctctaaaaaaatcactgttctcatattcagactcaatttcgtagagcttaagtcttgattggaaaattttttgcttacagtagatgaagactttattatctacagattcaaaataaaatacatctttaggattgataatatgcatttgtaaatctgtaaatccaataagcttttttgaagatgatttgagagaataaattaattgtagtaatgattcgtcaggctcgttacattttattattatttctggttccgatccagcagggatattttcaataataattttcatttccacgtccctccttgctttatatttatagtatatgtcagcaaatttcactattcaatagatttgaagtgagatgcaaagctagctttgtaagttgtatttttagattgataggttgaaaaatatgctaatcaaaagagaaatcactttggtaaattaatcattataggatgtatttcacaaaaaataatatatgttataatttacttaagatgggaagtaaggctatattatgaaatttgagagataataagatttagagttatttggattttaataatgaaattagtacaatcttagaattgttaagatttattattaaaatataatcaagattgtttcaataaatggaggggattttattatgaatactgaaaactatacttatgtggcaagctgtgcttttacaagagaagaaccagaacttagcgcaaaaattcaagactatttaaaacagagatttgatatgcctattataaggtgctgtgttcgaaactataaggtagaggaatttacggctgatatgccggaatggatgcagccacgttggagatctactccacattataaggagttttctgaggatagtacaatggtatatgtttgtcataattgtgctgctatttttcaggaaaccatgaaggaagtaaagaggatttcactttgggaacttattttgaatgatgaagaatttaagttcccagattattcacatgaaaaaatgacattacaagattgttggcgttcttatgataaccgttcagagcaagatgctgtccgtgggttattgaagaaaatgaatgtagatattgtggagcaagatgagaactatgaaagaacacagttctgcggagtatctttgcatgcaccagcgccaaaacgaaatttgaagttggcaccaaaacgatttgttgaaaatgcagatggaaaatttattcctacaacaagtgaagagcaagagaagttgatgcgtgaacattgccaaaatattactactgataaagtggtcgcttactgtcattattgtgtcaagggacttaagatcggtgggaagcaagcaaagcatttagctagcttgctatttgataattaagaatattaaaaaaatcctaaagtatggttggagggtattatgaatttagaagaacagagacaattaattttatctggtaaaatgtataatgatttaacgacagaattgattgaggcaagagaaaaaactgtatttcttacaaatgaatataataatagttttggtaagcctcagcatgaaagagaagaaatattaaaaaggttactgaaaggtattggaagaggagttcactttgaaccaacatttcgatgtgaatttggttttaatattacaattggagataatttttatgccaatttcgattgcgtgatgttagatggtggagggataaacataggggataatgttttattcggtccaagagttggaatttatacatctaatcatgcaacgtatgcaaaagaacgagtggcaggaggttgttatgcaaaacctgtaaacataggaagtaatgtatggattggagcaggcgttaatataaatcaaggggtaacaattggagataatacaattataggatctggtagcgttgttacaaaaagcattccagccaatgtaattgctgcgggtgtaccatgtaaagtaattagagaaattacagaagaggacaagacaggatttgaaatatgaaaaaacaagtgatttgatatatattctatcaggtgttattggtgcgctaggaattttattcaatatatatcttttatcgaaagaaaaatttagaaaaaatgagtgaggattataaataagaaatagtataattcatcatagctcatgtgatataaagaattaattttgaagcaaaatattttaattgatattaagtttttaggaagagaatattctaatattctttaccatatttattctcgagaatatatattctttagaatattaccagagaagaatatatattcttcagaatatgcttgaaaaatgcgggtttgaagctagtggaatggatattaaaagatggtgaatagcgtgggatgttattgggcttaacacagttttatgttctcatcaaaaataaattatatatgttgtaagtgaactttgtatatttttattttaattaagaatttgacctgataggaataataacattacctattaggattttaaatgtaagtttattattacaacacatatatttaaaattaatattgaattattagaggtggagtatggagagtattatacatatatgcttttcgcaatcagcgggaggcagtttgaaacatgctgttaaaaagaaaaaattatttgaagggaaaaaagttatagtgtttcctgacgatatttccattggaataatccaaaatggcataaacttaagtgagagattaaagtgggtagatagtattaataaagaggatgaaagaattcgtttggaagaaattgattatcttaaaagagcttataagcaattttataaggaaatttcaaatattaaggatacagatgtaatttatctatggtatggggaatgctgtagtgatatatgtggaatgatgtatgctttagaattattgaagaataaaatagagaatatttattttataaatgtttcggagaagatttatgagggcaacagtatcatatatacatatagagcggtagcagaaattattactgagaagctaaaagaatttataaaaataagaaggaaaattgaatataaagaatatcatgatttaattaatcagtgggaatcattaaaagataataattcaatacttcgtatttttaaggatggcaaggtacaagctgtaagtgaagattattttgatataaatatattgaagtatacagaaaatgaatttagaaaatgtacaagaattgttggaagtgtaatgggatatagtgaagagaaaatttctgatgactatatattttggaggataggagaactcactaagtctggaatgttagaatacaaagggaaatttgggataatgagagaaatggaagttaaaataacacaaaagggaattgaatatatgagcactgattcagaagcaatatcattttggagaagtaaagagactgaaaaacaatttgaaagagataaaataaatgaagctaaaaataaggggagaatggaagaaagaataaacatagctaaaaagcttatgtatattttagatgtagaagtcatagcagaaaaaacaggtttaacagtaatgcaggttaaaaatttaataaattgaaataaaactcaaagaatatattaattatcaagtaaagaaacaatgtatattataatttatttatagaggttatagggttcatcaatgagagtcgaacttatgtggatataagccgaaattgaatacaactggatgattagaaccttcagcgatagtttcatagcttttcggaatcaaaatatttatgatttcggtaagttatcacataaatgtagttttgaatttggatatctatatataaacaatgaatatatgaattgatcatgtataaagaggaggtattggtttgaaaaaattaagtcattcatttagtggagcattaagaactttttcattttggattgcaaatggaactgtaggttatccgttgttagaggggattgattattcgtgtatatttgaagaaccaagtgctatggaacaagcatatgcaatctttgctaacgtaattgaaatggatgatgaaggtaatgtgctaaatgcaaaatatgccgagaagagagctgcgcaatttataagaagttatgttgacgaaaattatgtagtagatccacctttagaaggatgggaagtacaactctattgttgtgatagcaaattaaatgatatgtaatgggcgttacttagatataaatataatattgtagtgagtagacgtagtttgtatctgctgatcttgcatacattttacttataaattctattttctatttacaaaagcagtagtcaggaggtcaccaactactgcttttttatattaaaaaataaacatgaaaggtgataatattttctgtttatttcttttaagaaataatgtgcattgagaaaatgtcaattatattaattaatatattgtagaacaagagaaatgttacaaaatagaaaagataataaattaatataggaagcttaatttattgtggcagtatatgtaattaacaaatctatgtttgataagttttttacgaggagggattatacatgatatataatcccttaggtatatatgatacaaaagatattcagctattataagtatattaagcaggcctaaaaaaagaacaaaagacagtaaactattaattaatttactgtctttaggcaacctgccaagctataaaagattagcatttatagcattagcaaatttccagtatttatactatggattattttggattcatgtaatataatatctcataataacatcaaggtggtgattttattttatgaaagatgtaactatagatacaatcaaagatacaataagagatcttccagaagaagaacaagaaataatactacacttgacagagatatttgaaggagaagaatatactattaatgaatatgttaagaaagaattgattgatagataatatagaactttttatagtagtatgataaaataatataaatccattgcaaaagaaaaaattatatataaggaatgcagtcattgagttggctgcattttatttttaaatgggccataagaaatggtaattaatacgtattattttgcataattgaacacgatgatttttatattaaaaatactattaagaaatgcaaattaagataaattaggaaggaatattgagaatatctctattatttagtaaagaaatagagatagcatagcgccaaggaatgctatctctattttcagtaagaatttaataataatattattttcttaggttaaaaagaatctgtagttaaaatatagattctttattagtgtaattcgaaagactgacaatcagtacattctacactttttggactagattcatgagtacctactttaattttgtctaaagtgcagtaatcgtcttctttacaatgatatttgcaatctgctacagaacatccaatgctttcgttatgtttcatattaatcactccttaatgttatttctataatattatttgataaaatttttattttatactttatatataagatgcatattcaaacattttctgaatattatggcttttgaggttataaaaaaatatatatttctggtataagtgtatacagaagtttaacaatatagatatccaatttgagaattatacttatagcttaaaaaatctgctatatcagaaaggacaggtactcttttgtgcagtgttacattagagaatatgttgcaggcatttcttcatcataagttgttccatttttgcttgtcacgagcttgtctcgggagcatgctgaaatggtgcaacttatgctgttagaaagcctcaacttattctcagtaaccgaaacaacagagcacctgtcctttcggtaagttattggataagtctaagttttgttttggatatatatacagtagagaattgaattgatttttttaactaaaaatgttatggttatgaatataaatgcaaattagaaaaattttataaataaaatgtaggtttaattaaaatcaatttaattgaatttttaaaatgatttttaattaattaaaagggaattaggtgaaattcctaaactatcccgtagctgtattagaggagtttaaatacattggatgccacttaaaaatagggaaggcgtatttaaatgatgattcttaagtcagaagacctgcctatgttttgcaccaaagggcacattaaagaaaataacaagtctaagatgcaatgcatatttttatctttcgtcagatgacaagatagatgcatcttatagaggagtattatgtgcatgtggcgataaagtatgatagtaaataagctattatatcgaattgttatctttttaatgtgactaaactctacgagtgatagagggggcgttttaatgaaaatttatttacatattttatatgaataaatatgttttgttattatgtctttttaacacttttgttagaaggactttttattttgcagaaaaatatatgaagattacagacaagttataataaattacatattatgccatagtacgcatatataactagcaaactttaattgttaatttgtacataagtaaatatgtatattgcaaaaataattcttcatcataattataaaagtattgcaagaattttagctgtaattgtaaattgtgaaatgtgcattgtgcattgtgaattgcaacatatatagatagaaaatcaaaggagatgagatatggaaaaaataattattttatgcgctgtgttttcggcggctatcttcttattagtatttatatggaaacatcaaaatatgaatgataataggaagcgagttcataaacataatcataaaattggacataaacatggagaaggatattcaattgatttttatgcatatgcttcaaagattagacattggaatgctgaatttaaagtgtatttatcagttttgacgcttgttctttgcattgtatttaacaatccatatgtatctgctaccgtgataattgcaatggcttatcttacagttattaaagggaaaattccggcagctgaatacctgtcaatattggcaattccaattacttttattttacttagcacttttaccattgctattgatttttcaaagcaggcaatagggcagtgcaatttatatcttgggtttggctatgtttttacttcaactgttcagcttaagaaaatggtgtttttaattttgaagatttttgcagctataagtgctctgcagatgatgaccttatcgactccaacttctgagattatttatgtacttagaaaggcacatgtgccaaaacttattgtagaattaatgagtcttatttatcgctatatatttatcttaatggatgtatttacaaaaatgaaaaactctgcaaagtcacgtcaaggttattgtgattttaaaacttcatgctatacatttgggagcattgcaagtaatatgcttattatttcacttaggaaagcaaatgcttattatgatgcaatggaatcacgatgttatgatggggaccttgtatttttagaggaagataaaaatgtagaagttatgcagattgtcttagcagtagtattcataatgtttttggttttaatttggtattttacaaggtaaggcacattcaaaaaataataaatccacttgcatccttgcctagctcaaagaaaaatatacacattaaaaaaggtagctatgctacacataagatcatttttttttagaaaaggtagctatgctacacataagatcatttatctagaaagcgtagatatgttttatataagaacattttgttagaaagataggttatgctgcatacaagaagatttttaaatttgctatgtatcttcatgtgcttagaaaggaacgattatgagaaaattaatattaaaaattgaagatctccattatgcttacggaaatggaaagtctgcattaaatggggtaaatgtagatatttatgaaggtgagaaaatagctgtcattggttctaacggctcaggaaaatccacattcttcttaaatgtagatggggtacttaccccagaacaaggaaaaatcatctatagagatactgttataaataaaaagaatttaacggaacttagaaaaaatataggaatagtgtttcaagatgctgataatcaaattattgcatctacagttagagcagaagttggatttggacctatgaatttgaaacttccaaaagatgaagtattaaaacggatggatgaagcactagaatatatgaatatttctcatttaaaggatcgtccacctcattatttaagtggtggtgaaaagaagcgtgtaagtattgctgacattattgcaatgaagtcagaaattataatttttgatgaaccaacagcagctctagatccattaaatgcaatgatgttagaagacgttttattgaaacttgggacagaaggaaagacaatgttaatatctacgcatgatgtggattttacatatagatgggctgaaagagttcttgtttttaatgaggggaaaatcattgcagatgggtcgcctatagagatttttacaaacatggaaattttaaaacaagcaaatttgaaacaaccaacgttgttagaggtctatgaatcgcttatagaaaaagatatttttaaggacataaaggcctatcctaaaagcataaaagagtttaaagaaatgcttcaaaaatagaaatttccacacatatatataaagcatctatgctgcaaataagatcatttcacatatatataaagcagctatgcacttacaaaaagatcagctatgctgcaatacggaactttcctgcaaataagatcatttcacttataaaaaaagtagccatattacaaataggaatttatattattttattatttagactttaatattataaatattaaagttttattgagggggagaaaaatgaataagaaagaaaagagaattgtcgctctagcggcagcatttgctttgatttttggagtagctccagcagcaaatgcaatgcacattatggaaggttatcttccaccacaattttgcattatatggggtgttatttgcattccattcatagccataggctatttatcaattaagaagacattggctgaaaatcgtagagcaattaccattttggctatggctggagcatttgtttttgtactttcatctttaaagataccatcagtaacaggaagctgttcacacatgactggtactggacttggtgcaatattatttgggccaagcgctgttagtatcttaggaatcattgtacttgttttccaggcaatactgcttgctcatgggggaatcactactctgggtgctaatacattttctatggctattgcagggccatttgtttcctatggaatatatagattatgtaaggctttaaaagttaataaatatgtaggcattttcttggctgcatcaattggagatttattcacttattgtgtaacaagtatccagcttgcacttgcatatccatctgaaaacggcggatttattgtatcggcagctaaattccttgcagtatttgcaccaactcaagttccgcttgcagttatagaaggtattttgacagttgttattataattggccttgaaacatatgcaaaatctgaattaacaggccttggattagtgaagggaggagaaaattaatgtcaaagactaagaaaacagttataattctgctaattattgcggcattaattgctgttattccattattcacattaagaggagctgaatttggtggttctgacgatgctggaagtaaagtagtttctgaaattacaggtactgagtacaagccgtggtttaagccagttatggaaacttggattggtggagaattgccaggagaggtggagagcctgcttttctgcgtgcagacaggtattggagttggcgtaattgcattcctaatgggaaggtttgtagagagacacaaaatagaaaaagataagaaaaagtaatatttcttttatccattatgagatattctgtggagtatattggtgtccttatttcttaattataggttggataaaataattagaaacataaaatataaaaatacctaagtaagagctgataaacaatacatagtcagctcttttattaatttatttgatgcctagctattatgacattagagatagaagcttttatatgaaagatttagcgtagtaaataataaatactcttttaaaatcgtgtaatgtgatatttgtaaaatatgctataatactaaagtatgttcgctgggattaatatacaggggtaagaagaaatacttaacttgttactagtacaaacggacaagctttttcatgcaattatgcacttatggggggtattggaatggatgtcgtcagcatgtgaataaaagtgagtgtttagttgtaatttgcttaagattaacaagattatagttaatctagaaataagtgtcgggaggaatttatgaatataaaacagctttggaataaagctatatcaattttaaaaacagaaatagtttttactatatcattatttttggcactaggtacgtctctgatttctatgcccaaaatagattatataaattttgaggtactaatattaatgtttaatcttatgatagtaataattgcatttgaaaagttaaaattattagataagatagcagttgaaatattaataaaacataaaaaacttagaatggtttcattaatattaacatctctatgttttttttcttcaatgtttataacaaatgatgtggctttaataacttttgtaccgcttactatgattattgctcaaaaagcgaagtttaacccaatgaaaataataattttagaaactttagctgtgaatattggtagtagtcttactccaatgggaaatccacagaacttatatttattttctttttttgatgttggaatgttagatttttttagggatacaatattttttgtgataattggtgcaatatggttatttgttctcaatcgcaggatctcaaatgtaaatttggaatatgatttagataaaatagaaattaaagataaaaaaagcgcaattatttattttagtttgtttatttttatattactttcagttttcaatatagttgattatagagttgcttttataataactttaattattagttttgttatagaaaaaaagctctttaaggaagtagactattttttattacttacttttgtgtgctttttcatagcgataggaaatttatctaatatgacaactatagatgaattaatgaagaaagcattaacaaatagtacaagtgtatacttttattcgatattttttagtcagttaattagtaatcttccttgtgcaattttgctatcaaaattcacaaattcttggaaagagatattagtcggtgtaaacatcggaggtatgggaacaattattgcctcgcttgcaagcttaatatcgtataaattttatgctaaagaatatgatgggaaaaaatatatgtttaaatttaccacatataattttgccagccttataatattcacattaatattttatatatttttggtaatttgataaatcataaataagatatttaaagaagtatataatagaaaagttttgtattacttataatttcagtaacctttaatataggtatccaatttaaaattatatttatgtgtgataaaaccgaaattagatacaaatttgttccagcggactagtgaaattttcgatggatagttctaagtgaaaggttgaacccaaagcgctagcatcaaagagcaagctttgaactagcacatttggaacaacttatagccaaagaatcacatccatcaaaattaccaatgaaacattccacaaaagtatattactcatttctagttagaagatatttcatagtctaagtatagtttatgattgtgttatctatatataaacaatttaagaattagacttattagatgaacatatttacaaagttgctaaaactttaagttcatatcttcactagaaatcataaatatattttcatagcttttcggaatcaaaatatttatgatttcggtaagttatcacataaatgtagttttaaagtttgatatctataatgggggatttgggaaatgttaaatttgtttgataagcaagtataaatttatgaaaaaggggttataaattatggttcttgagttttttcaaaatgcatgtattttaatagcgtttatgagtattgctcagcatcttcttagaaataaaagaatttttgaagatatgtcattgaaaagtaagtttttatggggactttatagcgggatattaggtgtgatactgatgataaacagtgtacatattacaacagatacttttattgattttaggtacataccaattttattttctgctatttatagtggatttttctcttcaattatttcttccattttgatagctatttttagatctttaattttgggagtgtctgatatatcactaattggatcagcaattgctttagctatggggatcggatttggaattatttctttattaaagatatcaaaaaaacgtaaatatatttattctatgatcttctttgttatagcatcagttatttcatcatttacagtacctcaaaatattacatttgattttaaaacagtgagtttatacttttctggatatttaatagtatcgtatatttcaattaaatacgcggactacatatttgaaacagttagaatttatcaaaagttaagaaatgaggcaacaaaagattatttgactggcttgaataatgtaaggcaatttgacaacagtttcaacaatatttctcagagggctgtacgaaaagaagaagatctatctatgttgtttatagatattgatttttttaagaaaataaatgatacttatggccataatgcaggggatactattttaaagagtttagccttaattcttcttgatacatgcaggacttatgatattgtatctagaatgggaggggaagagttttctgtaatattattagattgttcagactctgaagctgttaagattgcggaaagactaagggagaagattgaagaaaatgatttttatatttcagacaataattttataaaaattacaatttcaatcggaatagcatcgtatcctaatacgacaactcaaattgataatttgcttgaaatggctgacacagcattatatcaagcaaaaaatactggaagaaacaaagtggttttatttaacaatgacgaacataaaatataaaaaatacctaaggaagagctgataaataatacatagtcagctctttttttatttgatgttcagtcactacaacgctaacgctaaaaacctctttatgtaaaattcatcatatctctctttatgaacttctatgcatttgaaatttaataataacaataaatcctttaaatatataatttttaatatagtagtgctgactatgagttagcttgatgtattaacctatagaatagtctttgaaagttggttaatgagatatttataagatattttattaaacaattttaaacagtaaaattgacatacatatattaaaatgataaaatgtctattaaattgatagacaaggagaataaaatgaaagagcttattcgtgatgcaactattgacgattttaaaaggggttacatatgggatagcaaaaaagcagaatttatttgtttgatatgtgggaaatatacaggcaaaaatagtaatgacatgagcattcatacagcagagcatgggagccctatggacagaatactgatgcttgataagaaatataccggacttactgaaattcagaaagagcttttggaaatggtgtcaaacaagtatagtaataaagaaattgggattaagcttggatgtgcagaatcaacagtaagaaatatgagatttgcactaagagaaagggctagacaagcaagagcttttttagcagccatagagttagttgacgatgggaatagtaaaatagctaatccaaaacttagaagttttccggctaaagaggagaaaagaaaagtattattaccaaggtttgctaatttgtttgaacccaataaagagtatacggaagctgaagtaaagaaaattattaagcctatttacgaggatgatgcaataatacgaagatacttagtagactatggatacttgggaagaaatgatgatggaagtaaatattataagaaatgtgaggaagttattatggataaaatgaataaaaaagagataataaataattataagcaacaagaaatagaaatgggaataattcaaatctataatacagttaatggatattctttcgtagatatatgtacaaatttatataaaccctttgaatcaatcaaatttcagctaaacttggggagagctaaatctaaaaaattaaaggaagattgggcggcttatggggaaagtgccttcgagtttaaagttgttgaaaagctcgaatctaatgaaggtgctacagataaggaaagggttgaagatctaaaagagcttttaaatttgtggattgaaaaccaaggagataattttaaattatataaataagctaatttgtgacgttataaattaagacaatagattatagactatgaaatttcattatgcaagagatttagatttgtgatttttagctacttaatatcactaaatcatgtatgagtttaataattacttgaaatgaaataaagagtaacatgtcataacggggatatgaatgttactctttgacttatatttatagggggaaaaatttatgaaaaaaagtttttattatctttataatattattataatagcccaatgtgtcaggatggtggcaaatttaaattacaatatgtagatttaactaagtaattataaaaagcttatttgaaaatacaataatgtaatattagaaaatatattataatttacagtataagtttcatataggacaaaataagaaaaaaattaggagaatagtatatgagtgaaagaataggtatgatttgcaaacttgcaccacaagaactaaaaggaatttatacatttgataagatagattccgatgatatagatggattatcagtttctatgttagacgcatttaaagatacagtagacttcaatggtgaaacaatagaagagttaaataaggagatttgtagtattgttgaaagtactttcggaacatttattcccgatgcttcatttcaaattaaacaaaatggagaaattgcggctgtagttcttattagtttatttaaagggaaaccatttgtttcagaattatttacagttaagaaatatttgaaacaggggatggcaagtaatcttttgaaaaatagtataaatgtattaatgaatttaggatacgatgatttaattttatatgtgcaccctgaaaatgcagctgctgtaaatctttataaaaaaattggatttatagaattataattttataaccatattgcattggttttaaaacatattgtaatgagttcggttgaaagcggatagattgtttcattataaggtattcgttaagtatggtgataaaagccataccaccagaaacgttccgaatcttatacggaacacttgaagtagctttaaatcctcaatactaatatttagcataaaaatgccccaataaaggggcgtatacatgtgtaagttaatatttatttgatatatatctatactatgtacaatatattttaaaaaatgcaaaattaaagtatcgcatatttctatattatatggatcgaaaattgagtactggtttaattatagattttcaatttaagaattcaatttattagattaatatagttacaacgttgctaaaattttaagttcatatcttcactagaaatcataaatatatttgtaaccacaagggttataatatgaagaaaacatttgaaaatgagctgttaaaggttcttaagcagagaacccaaatctttgatttggtgagaatcgcttactcagtgaacgaacgtgagccgagtttccgctaatggttgttccattttagattgtgaagtgagagtccaaaattttattttgggttctcgaacttcctcagcgaatgtaatgagtcgagcttccctaggaaagttggagcatgctaaagtggctacaacctgctgcttagaaccttcaacgatattttcatagcttttcggaatcaaaatatttatgatttcggtaagttatcacataaatttagttttaaagttgggtatctatatattcgctctaattagagaataagaattcaatcaattcacttcttttatcgatatattatcttattgccattgctttaaagcactaatcatgaaattttttacgtctatattataaacattttttaagttatcttctagaaatacctctttaggtgtaccttggctgactatttcgccatggcttagcaatatgattttcttaccaaataaattagataaatttaaatcatgtaatacagctattacaattttattattttcttttgcccaaaggtttaaatattctaggatctcaatttgatattttaaatcaagatgatttgttggttcatctaataaaataatttctggatcttgggcaaaggcttttgctatgaagacccgttgaagctgaccgccagataattcacttataaatgtatcttttaaatctatcagcccaacactttttatagctttcattacggttaaattatcttccttacttaaagaggataaagccccttttaaataagcatatcttcctaaagcaacagtttcgtagactgtgtaaggaaaataaacattgttactttgagtcataagtgcaatgcgctttgcaaattccttcacaggtaagttttttatatcctttgaatcaaaggttagtgttcctttatattcaatgagtctgcctatagcttttaaaagcgtactttttccgcatccatttggaccaactatgcaaagaatttctcctcttttagctttaaaggttatattctttatgatatctattttgtcatatccacaagaaaaattcttaagttctaacaaaatcatcacctactttgatttattattttcttccatgtgccttattaaaatatatgtatgcaaaaaatggagctccaatcagagcagtaatagcaccaactggcaattctgatggtattataattattcttgctactagatcagtaatcaccataaaacagccgcctaaaattacacagactggaattacatatttatgctttgctccaatgatccttcttactaagtgaggaattattaaatccacaaaaccaataattccacttaaggctacagcagaacccgttaatatagcagagaaaataagaagtctagtctttattgtattaacatctactccaactgattttgcttgatcttcaccaaaagataatatatccatttcagtgcagtagcgcataacaccaattattccaactataaagaagggaactcccatttgtacatatgaccatcccttcatggaaaaggaacccatctcccaaagagctatgctttttatatcttcactatataaggctgttacagttgtaagtattgcactgcaaaataaagaaaaaaccatgccagataaaattatagttgaagttgacatactgttatcaactttgtaggcaaattttatgataataaatacagtcaaaagcccacataaaaagcctgttaaaggaagagtaagcctgccgagcataggtattgaaaaaccagatattataagaaatccaactccaagagaagcaccagaagatactcctaaggtatatggtgaagcaagtggatttctaagtaatgattgaaccacagcaccactaactgataaggaactacctacaagaaaagctaaaaaaactctaggcaatcttaaattccaaattatcgccacatcattagggttaatctctttaagtagtggaattcctaaaactttatatccaattatcgatgcaatatggattaagctggtatcagaacttccaatagaagtcccgatacataaaattaaaaatgttaaggggattaataatataataattttcttatacatttgcatattcctcaggataaatagcctttgctatttgtttaagtgctttcagtatattttgtgatggtctggaagagggattattatcaatagcaaagactttattgtttttaattgcagtaacctcttggaagccttcgcgagtctttatattatcgatagcattacttgtaggttcatttgtaagtattacatcaggattagcttttactacagcttcaggacttggagatatccacgaattttcattagcaaagatatttttggcgcctacaatttcaatcatttcatttaaaaatgtattattaccaaaactatataaacctgaagttgatcctatttcaaaatatacatttttcttatcagtaatagtgtctccaattttctttattgaacttatttcatcctttaaattagctgtcatctcatcaccttttttctcagtgccagtgatttttgatataaagtcaatatctttataaaggtcttccatgcttgaacttgtaggtatgtatacaacaggaattccagcttctttaacagctgcaaaggggtcttcactcccagttttattatgtcctgaagctattattatgtcaggctttaaactcacaagagtttcagcatctggattcttaaagtcaatcttaggtaaatctttattgataccatccacatctgacgaatatttatctatagctactagcttatctgaaagtcccagcccaactaatatttcggtatttgatggggctgtagatattatagtttttactttttcaggaagcttaaagctgttaccttctctatctgtcattgttgcagtcttattaccacaaccgaaaagtgtactcatagctaatataactattaaaaagagtgataaaaatttattttttagtttcatgatgccctcctaaaatatatcgtatttaagggtaacaaaaaaagcatacccatcgagagtatgcatagaagcataataaacatgcctataaaaatcagaataaaacttaaaagtcttattttcataaaacgcatgattacttaagtcacattcaaaaaataacaagttcatttaccagcttattttcaactatccttcggaagtagactgacctaatagacctgctatgagatcaatttactctcttatctggtgaaaaatattcatggtggcgttgtacttgaaatttattttcatgtgcctaatatcccaccctcagaggatattatcggtgtataaaacaaggtatcccgacttaacttcatcctaatttcaagccttcccaatttctcagtggcactttagacacaatcaaaaaataacagattggacttgttagtttttaattgtgtctttgatttcgtcagtttcacggttactggggtagttgaagaatttcactccattcccttattacttaaatgcagactatagtttgcatttattataattaaagtatttgacataaaaagattatactattcatagtaagttttagcaataaaccacttaaataactaagggggactaagccctgaacttatgcatataactcgccgaaataaggattatgctgttgttccagtttctaaggaattatgatggatgatcccaagattacaagttgcactcaagatgctagcatcaaaggcaagctttgaactagcatacttgaaacaacttataatctaggaatcagagccatcaaattcctaatgaaacatttcacaaaagcataattcttatttctagttgggatatatttcatagtacaaatctaacttataattggtttatctatatcgataaacaaatcaagaattagatttattagatgaacatatttacaagttttctaaaactttgagttcgtatctttactagaaatcataaatatatttgtggagaaaacatttgaaaatgagctgttaaaggttcttagcagtaggttgttcccctttagcttgtcaaactgaaagttggagcatgctaaaggggatacaacctgccgcttagaaccttcagcgatattttcatagcttttcggaatcaaaatatttatgatttcggtaagttaccacataaatttagttttagagttgatatctataaaatgctaaataaaaatattactttattggaaaaaattctataaaatcactctaaaatgatgtaaaatgtttgataggttaataaatttattaaaatgaattacgagggcgattaaagtgattaaaaaaatatctatgttaatgacatgcatactatgtattcttattttttcagggtgttcaaagaatcaggagattattactaaaacagcattgaaaatggatacagtttttcagctaaaagcatatggtccaaaagctaatgaagctatagaagaatctctttcaagattagatgagattgagcaaatggcaagtgtgactatagatagcagtgatataagtaaaattaatcaagcttcaggtaaagaatatgtacaagtacatcctgagattgttaaaatgcttgaaaccgcagttaagtattctaaattgagtaatggtgtatttgacataactgtaggcccacttgtaaatctttggggaataggaactgataacgaaagaatacctacagatgaagagattaaatcaaaactaccgctagttggatataatgatatcagtataaatgaagagaataatagtattaagttactaaaagaaggtatggcaatagatttaggtggaatagctaaaggatttgctgcagatgaagtgttaaaaatttataaaaagtacgatattaaaggcggtatcataagccttggaggtagttctatatatacagttggtcaaaagccagatggaacaccatggaatgttggcgttaagcatcctagaaaagacagcgatcaagattatgtaggtataattaatttatcagaacaagcactttctacttctggggattatgaaagatattttataaaggatggtaagaggtatcatcatatattaaacccaagcacaggatatccaacagataatggtgtaataagtgtcactatagttgtagacagcagtattcctgatagcaatatgcttgctgatattttaaccaaaactgttttcatagcaggtgtagataatggcctgaaatttatagacagtttgcaaggtgtttcttgcatggcaataacttctgattataatatttataaatcttcaaattggaatataaaattagataaattagatccagactttaaatttgcaaattaatttttttattatgcctcagtctagtataaattttacaatatgtttacatactgacaatataggaggctataatatgaaaatgaaaactaatcaaagagccttaattttattagtcattatgtttataggttttataattactttgtttccacaaaatacacctataataactatattgcaaagtggatttgaagctggagtggtaggtggattttcagattggtttgcagtagtagcactttttcggtatcccttaggaattccaattccacatactgcacttctgcctaggaatcgtaaaagaataacagacggtttagtatcaatagttgaaaacaacttgctcaataaatcaagtattataaataaagtacatgaattagaagtagtaaaaaaaatattaaatatatgcaaaaaaattatatgttctaagcaaggaatagaagcaggaatgtatattattaaacgtgctatagagcatattcctatagaaaaagtttcttcatctttgcttaaactaattcaaaaatatttgaataaattagattctaaatactttcttgaaaaattaattagcatattcttaagaaataattatgaagagaaaattttagataatttacttattaagcttgaagatatagtaaagcaagaaaaagtgaaaaatgaactaggaaatatagtattcaattctataaataaactaaagataagtggaataatgcaatattcattaaatacaatcttaaatgttttaggaaaagataaagtaggaaaaatagctcaagatttagtcgttgtaatattaaaagatttaaaaaaacatgataataccagtagaattacactgcttgaattaatgcagagcaatataagaaacataagtaacaatgaagaagttatacaaaaaatagatgagtataaaatgaaattaggcagtaatgttgaactaaataactttacaataaaaatattagatgaattaaaaaatataatattgggttatgttaaagaagattacataagaaataatatactcccaatgctaaataatttaattgacagtatatcagaagatgttaatttgataaataaattagagcagcagatacaggaacgtgtatcaggttacataaattccaatcatgaaaatataggcagattagttagagataatattgaaagattagatacagaaactcttataaaattgattgaagagcgtgtaggcgatgacttgcagtggataaggataaatggtgctatttgtggtttttgcgttggtctagtattagggataattagagttttgtaaatattaaaaacgcatgatcagtatttgttaatcaataatagcatctgtaggttgaaaatttcactgctaaaaaatagagtttcacaatgtttttttagtagattttagagcagatattattgctgtagaaggctgtagaagaatgtactgaacttataaaagagaattgcaaataaagaagatctataaatgcaattctgtattattatatgtgttgcaatgcacaattcacaattacagctaaaattcttacaatatttttagaattatgatgaagaattatttttgcaatatatattattattattatttacattttatgaacaaaatttcttttacagtctcctcaaaaggtattgaaacacttttaatatttcctgtgctatcataattaaaggtcacatcaaccaagtaatattccattattgtcatggtaaaaatgtcatagcatttatgattaagcgtgtagtctatattattataaattaattttaagctattatcttttacttcgatttgtaaagaaccatatgctggattttcatatatgccagtatactcttcaagggagtgagatggagttgagttatcttttttggagtttattgtaggtttagtagcagcttccattgctttcatcatctttgcagcttcatcctctagtttttcacaaaaatcactatggtcatatcctaaaagcttgtcatatatatggtatgctataggcattgcacaaacaggattatttaaattagtaagaataactacgccaatattctcgtctggaagaaagcttgtataggagcaaaatccatctatatttccaccgtggttaacatgttttcttcctctataggcttcaacaaaccaacctaaggcataagatgaaaattgtaattcatcaaactttaaagggattagctcacaagggagttgaggtgaatgtaactcacttatagttctttcagatataatctgttttccgtttactttacctttatttaaatgaaggctaagccattttaacatatcagtcaaacttgaattcatagaaccagcaggagcaacagaatctagttttctaaagtctatttgattaatttcctcgcctttttgcgcatatggcttactgtaatcagaatactcttttaaagcttctactgagaaatttgtgctgttcataccaagaggctcaagaattcttaatttcacgaattcttcccaggtcattcctgtaactagttcaacaaggtagccagctgtggcatacatcaaattattatattgccatgtttctctgaaatctttactaaattctaagtatttaattttatctaccaattcttttctgcttaaagaaggatttgtataccataaaatatcatgtctaggtaatccagaacgatgacaaagcatgtctcttaatgtaagatgttcttcagcatatttattttgcatttcaaaactaggcatgtatttttttataggagtatcaagatctagcttaccttcatccactaatatacctattgatagtgaggtaaaagatttacttgcagaacctatagcaaataaagtgtcttttgttacatttaaatttttgttgacatcgcgcagtcctaacccattgcaatatattatttcatcatctttaataatacctacagccattccaggaattttccacttattcatatactcagataaaaagtcattaagatcttgagagttattagatagaatatcattcataatattgtaccgcctttatttattttttattttccttcatttctcgctctatcaaattcatttaatgctctcttttgtatttcaagtgtatcttcacccatgtcaaattcagcttcttcttcaaaaccgtcttgttcttcgccatcaaatctatataatttctttaataacgtccataagatttccatttcttcaatggaaaagcctttagaaagcatcccaaagaactccatcgatttttcggcacctatcatcatggcatctgttccagctttagtaatctttacattaactgcacgtttatcatattggcttggcacagtaaggacatatcctttgttctctaaattagtaatcaattgttttacactctgttttgttgtacctaattttttagcaatattatttagagttgtttcattttcaggtaaatgaataatagcaaccattgccataagctgtctgctagttaaaggctcacaatattcatcgcctttaatttgaattttattagtaagagaaaacagagttgcgtatatttgttgtatcaaaaaaagcgctttatagttatccataaaatatctcctccttagttggacaatatactgtctaaagttacaatagcatattattccaatatagtcaatatactgtctatttgttttcagtcatacttcattataaacagaaaggacttgaataagaaaaaaggaataggggatattgcttagtactagtaattggtactataactataatatttttgaatcttttttgtagaaaaagttatttaatgatattacctgaaataatgttttggataggctgtgcagttatcattgttggaattatattgaggttgtattcagtattgacacttgaaagatctttcaccgtatcagtgcaagtggatttagaccaaaaaataattcaaacaggtccatatagatacattaggcaccctgcatatagcggaagtatactatctttaattggaatagcattagctctcagaagcataattgtaactataacaattattgctgtcatttatagatatagaattaagattgaagaaaagatattagaaaataacttcaggacacattataaagagtataagaagaatactaaaaggattattccatttatttggtgaaaatatagtttaatgatataaaagcaagaatatatttattggatattaattataggcgtgttaataaattaatcttaatctattaatactagattagaatttttctatattattttttatatcaagtacaatttcttcaattatatctttaatttgtagatttctagttccaggaatataaatgccatgtttttgtaatgggagtatatatttagtacaatccatattaaatattgcattggaaatcatagtagtaatttctccgtttatacctccactacagattattccgattggtcctattataccgtctattttagttgtcttgcaaaatgaactgatcgccctttcaccgcttataccaacatttgcaccagcttgtaccatctttgaggtagcaaatgagttggtaccaagtgcaataatataaacatcattatctatttctttacgaatcctctttatgatgttttgaccaaggcctgccccttgtgcatctattactgcaattttcatattaatgatcattcctttcgctatgattaagagatataatttaataaaagtagttaatgtataaataaactagtgctaaactataaataagatttttatttatagtttatgatattattctatacctttgagttaactacaagtcaagtgctttttaataatattaagtgattggtggtcacatatttcataaaaatactatataattttaaattgactgaaattaatctgtgattttgttcttaacatatattattatagaataaagagaagagattttatattattattggaagcacaaaataacaaagttattaaaaaattgcagatatgaggtgaatggatgaaaattaaagttgtaaaacagctgctagaattaaacaaaaatttcaacaatgatattaaagaaattttaagaagaaaaaatgtatatttagtaaatgtgatgggttcaccagggacaggcaaaacaagtttgattatagagctaataaaacaattaaaggataaatttaatattgctgtagttgaaggcgatattgcgggacaagtagatgctgaaaaaattgattcacttggaatttctgtcattcagcttaatacagaaggagagtgccatatagaatcaaaagcaatttataatatcttaggatactttgatttagatgaaattgatttgatttttattgagaatattggtaatcttgtctgtcctgctgagtttgaacttggtgaagattttaaaattgctgttttaagtattccagaaggggatgataaggttgaaaaatatccattactattttctaaagctgatgcagttgtattaagtaagtatgatatgatggaatactttgactttgatgacaataaagtagaagaaaatgttaaagaattaaatccattggcagtcacctttagaatatcatcaagaactggacaaggattaaattcatttgttacatatattgaagaaaaaataaaaacaagaattcaagggtaatttaatatttacaattttggaattgtatagtatcataaaattgtatactacgagggtatacagttttcatacaatatatattgcaaaaataattcttcagcataattttaaaaatattaaaagaattttagctgtagttgtaaaatgtgcattgtgaattgcaacatatataaattaatagattaatttggattattaataaccacgaaggttgattgctttatttgtaatcagtttttgtggttttgtttttattaaaaattgggcatattgaggaaataacaagtgtaattatcttcacatgctttaaaggaggaattaaaatgcatattccagacaattatctaagtccagctacctgtgcagttatgggtgcggcaatgattccagtttggacaagagctgtaacaaaagtaaaaaaagaggtaactaaaaagaaattgccgcttatgggagtgggggcatcactatcatttttaacaatgatgttcaatgttccgttaccaggtggaaccactggacatgctgtaggaggaacattaattgctattcttttaggccctgaggcggcatgtatttcagtgacgatagcacttttgattcaagcattactatttggtgatggaggtattttagcctttggagccaactgctttaatatggcattcgtcataccatttgtaggctattatatttataagtttttaaaagagaaatttaagacagagaaaggagaatatattgggacatttattgcatcgtatattggaataaatttggccgctttatgtgcagcaatagaattcggagtacagccattactttttaaagatgcagcaggtataccgctatattgtccttatcctttatcaattactataccttcaatgcttattccacatcttgtagttgcaggagtattagaaggaattataactgttggcgtattaagctttataaaaaaagtttcaccaggaattatttatgagggagctactacaaaatcaaagcctgtatatggattaataatagcgctaatatgcctctcaccattagggttattagctacaggtacagcttggggagaatggggaactgatgaaataagttctgtagtaacaggtggtaatacgttaggatttatacctaaaggcatggaaaatggatttagctttaatgccttaatgccagattattccgtttcagggcttccagataattttggatatattttatctgcagttgcaggtgttgcaatactattgttagtatttagaataatagcaagtatgaaaaagacaacaaaagtataaagtgaaacttgattcaggtgaggtgatttaaatctgaatcttagtttaacttatatgtgctccatcaattcagcaatatgtagtgaaacaaaagtgagagtccaaattttatatttgggttctcttttaaatgtgcctaatatacgttataagaaaggaagttattaatgccagaatggcttttaaagaaagacaattatacaccgctaaaagacaagaattcttttatagataagagcattctgtcaatatttaatgtgcttgctatgtttaggcagcaaactaaaataagaaactctaaatttggaattaacccattaactaaattaatatcaacgctcatactaattatttttgtttccttaagcagaaattttcactttattgtgattacaactgtgtttatgcttgtgctaataaatcttttaagtataaaagaaataaaatatgttgtcaaagcaagtatggcggcggcaatttttacgtttattattttgttaccagctatttttttagggtatagtaataatactttaatgatcacattaaaagtattagtttcagttgcttctgtcagtatattaacttgcactacccaatggaatgaattaataattactttaaaaatatttagaataccagatatatttattttggtacttgatattactataaaatatattataattttaggcgaattttcattaaatatggtttatgctcttaaattaagatcagtaggtaaaaacaatcataaaagcactgcactttccggagtcgtaggaactatgtttataaagtctaaagagatggcagaagagatgtatggagcaatggaatctagaggatttacaggaacatataaagtatatacgaaatttaaatttaagctagttgattatgtttgttttattcttaccataatttttgtgttaacatatttttattttgataggttgtgatttaatgattgatataaaagatgcgaattattcatatgatgctgaagttaccgcactaaaaaatgtaaacctacatattgatgcaggtgaagccattgctttaataggtgtaaatggaagtgggaagtctacattaatgaaattaattaatggattaataattgctgatagtggaagctatttatttgaaggtgaagaaattaataataaaaaaatgcaaaatgaagagttctcaaaggcttttcataaaaaagtaggttttgtttttcaaaattcagatgtacagctattttgttcaaatgtatatgatgaaatcgcatttgggccaagacagatggggatggatgaagaagaagttagaaaaagggtagaagacactttaaaattattgaaaattgaagaattaagagatagacagccatatcatttgagcggtggagaaaagaaaaaagtttctatagctaccgtagtagttttaaatccagacgtttatatatttgatgaaccaatgaatggacttgatcctaaaactaagagatttttaaaagaattcatgatagctataaataatgcaggaaaaactattttatgttctacccatgactttgaatatgtgaaaggggtatttaaaagagcaattgttttttcaagtaatcatgcaattattagagatggtaattatgaggagataatgaacgatagtgactttctatatgacaataacattatataatgtttaagctatactgaaaataataatatgaagaaagaacaatacaagttaagaaaagcaatattattatatggaataaaaattgcaactaatcttatcaaattagaggaagggttaacatctctttaaagtcatttttcaaattaattatgtcattaaattaaataacattattgaatattagctcatgaaagattcataaaagtaaaaaagcggtagttagaaatgagaaatccaactaccgtttatttttgtatgtacaatttattctatattaatttctgttactttatcatttgtaggtaaggtaaatgataaaacttgttggatggattcgaatgcccaaattgaagtagaagtacatttgtctagaggcaatagaaatatagaataagaaaaaataaatcttagcaataatgttatatatgttaaaatagatatatgtaaaacattagacgtaaatacaatttcaggtagtgataatcatgtctatgctagaggggccgcaagaactccacgatgctaggaaagtggacatacactgcctcatcacaaaacgtatggaagatgagttatatctcaaactcataggtttagaaaaaagcgtatttacgtgaaggtaggctagtttaaaatcaaaatttagataagaatattagtaaagatcagtgcgttactaatattcatgtggagtaatatatgaataaatatactaagatagagctatttttaataattggttttttagtgtcaacttttgcatttagtttaacagtaagtattgtatattcaaattataatagagttacagaacaaaaccgatttaataaagattataagtatctaaaaatagatatagtacatgagactaaatatgttgatggagctgaagttgtaaataaagatgaggataaagaaaatccaagcttatcagaaatagtagatgctgttcaagaggcaggatataagaaaattattttaaagccatttgaagatcaaatacaagttgataataagttttatattaatgatatatggccttgctctaatgggattgacatagaaagtagaaatttaattaaaggaagatacttaagtcaagaagagttaatgagtgatgaaaaagttgctattataggttttggtttagaaagattagttgaagagaaaaatggagaacgttatataaaaatatttaatgaggattataaagttgttggggttcttggaaatactgaagtatttaaatatagcagtataattcctataagatctctatattttataaacactaaggttcctaatgttattttttatgagaataatataggtaatatagacatcaaagaaattaacttgaaaaatattaatgcttctgaaaaagagatttcgagaatttcggttatagagtatttattcaaaaatgtttacgaacttaaaaatagtttatatcaaataatacttggtatagcaaatttacttttattttcatatttctttgctaaaaatatacgtgaaaaagttgcgattatgaaagtattgggagctaaaaattctcatgtatttaaagaggtttttgcaaaattcataagaatatcttcgattggaattattgctggactagctttatcaaaaattacaatagattttatgatgaagtctttcccatctcaatattcagctgttaacattccaaatattatattaagttcaatgctaatatttataatatctataattgtatctatactagtgttgtttaatgtaattagatttaaaataatgaaagaaataaggtaagtagtatgaaaagcaaatttatcttttttgatataaaaagaaacttgatagttaatgtattgattatattggaagtagctttatggatattttatgctgcgtctttggtttctttaattaactttgataggtcatatagaaataggtataatagatcaatttccatagataattctaagttcatgacattttataaaatgatccttaaagaaaataaagatattgaagattataaaaatgatataaaggaaagtcttaagttgatatcaaaaaataattatacttatggttttattcaaagggatttgtatacggatattccaactgatgttttgggattaaattccaaagacttagaatcagattttacaaaaaaagatgaaatggatgagttaatacatccaattggatttaattatggaatgatagagcattatcaaaataatatagttcaacaaatttcaaaagaagaatggattagaagtgaggactatatatcggtaattgtaggaaatgacttggccaaaaaggttaaggttggtactagctatgtagttaataatataacttataaaattgtagggcaatttaagaaggatgtattagcatttgattatacaaatagtgtagatagctcatttttattaaataagtcatttgttattccactaagtgaggaaacattctttcaaaattttggatatcaacctataacaatatttttcaatggtgacaaagaaaataattcaactgaattagaatcaaatataagaaaaatttcggatgacatagttatttcagattttggtgatgatttagacaaattcttagaagaaataaaatcaaaaaagtattatgaaatatttagaataattataattactattattgcatctgcatcaataattactacaattaattataaaatagccgaagatgtagataggattggaattctttattcttttggaattagtaaaaaagatatatttaaaacattttcttctgaatttcttataaatatacttgttggaattataggaggaagcttattttatttagagaactgtggaagtgtttatgaattttttattaatgaaaacttattattcaatttatatatttccatggggatattattattaacaattattttaattatgctaataagctttaatgaaataaacaagttgactccgaaagatatgatgggaggatttacagaatgagtatattagatttaagaaatatatataaaacctatggaaaaggtgataacgaagttatagctgtagatggaataagcataaaggtggataaaggtgacattatagctattatggggccttctggttgtggtaaaagcacattgcttaatatattaggatgtatagataccccaagccaaggtgaatattatattgacgattttcaagtagactttaagaagcttaatcagttatctaaaatcagaaatgaaaagatttcgtttatatttcaaaattttgcattgataaaagatcttagtgtactagaaaatgtaatgcttcctcttaaattcagggggattgcgcgaaaagaaagagtaaataaagcaataaagtatttaaatgaattagatatatttaatttaaaaaataaaagtattaggcaattatcaggagggcagcagcaaagagttgccattgctagagcacttactcaagaaagcgaaattatactagctgatgagccaacaggtgcattagatcaagaaaatagcattaaaatcatgaaaatattgcaagaattaaaccaaaaacataataagacaatattagttgttacacatgataatcttgttgcaaggttttgcaataaaactttaaaaatgaaagatggaaaatgggatagtattaaataaaggagttataatttatgaaaaaagtactttcaactatattaccgagtgtattaacatttttgtttatattcatagactctcattttccatatagtaagtggattttaattggaatttatattttatttccaataatgtttatcattcagactattatttctttcaaatcaataaataatatgttgattggatttttgttattatcattatcaataatactacctattaatcaatggtataaaatgggcagcataattccagctatagtagtttatttaatattgtctttaataacatatttactgatagtagttatggatattattaaaaaaaataagaaaagaactagaaattaacgatggtgtttttgtagaaacaactaaaaataataattagtgagttggtatgaagtttgttaaaaaatatagattctagataagctattaagaaattttcgagtttagagatggacttatttgtgggaagtattttatttacgggaaatgttggaggaatgaaatgaaggatactttaaaagaaccgtatcataagagacactataaaagtatctcttatgatatgattagttcaccatcgccagttattataattttatatccagctttgagaggaaataaattaaatttttgcgattgaggccatatgcgaatagcttgaacaggagtttcagtagaatctaaaataaatatgtaaatccgctcattaaaagaattattttgaactgtatgtgtagcatctagagataaatttaaatcttcaactttgtagaaaccacgcttaagaattttactttcagccatacaaggtgaaattataatattagaagaaataaagaagaagaatagtaatgcataaataaattttttcataaacataatcacctctaaatttttatagataacaagaaaatgaattgagcattttatctagtttataataatgctacctttactagatacaattatttcaaattcagattctaaaggtattaaaatatacttgtctgactgaggatctaatcgcatatattgcctagttacttgatttgaatcgaaaatggcaataaaggcataatcactggttgaagtattttgtacagtatgaatgccgtgggataaatttaaatctgtagctttataaaatccttcgtgtaaggtttttggttcagcgccaacagggattgtaaaaatatgaaagattaatattaaaaaaaataaaaatgccagtgggtactttttcattagatcactcacctttctaaatcaaaatattatggaattataaacttaattttattatgtgaaagtgatgagaatatattctgaaatattaaaaataaaaattaaacctgaagaggggataagacaagattagtagtttactatttaaaatgtaaaaaatgagtgttaacggagaaagaggcgtttatagaatcttggcaaaatttgaatcatgagggacgtagaaatcttaagcatggtttttcatgaggtattaacttgaatgattgaatcattagacaatgaagataataaaaaaggaagcttatccactatgagataagcttccttttttagattacttaagacttaagctacatcaaatttagtaacttgtctttgagtaacttgagcaccagatttcttaactaaatcaccagaattagttttgaaaacatttttagcaattacagtatccataagtgcattaatctcgtcttttgtaagacttggtttaacaccagaaacacttaaagtacttttttcaccagccgcagttaaaaaagtcatagataaagaatattccatttaattcaccacctttctgtttagattagagctaaggaagttaaatcatatacatgatttaactaagttcgagaaaccaaatcatagatttggactctcacttatctgcttaagaatttgctaaactagaagattcatttataaagtagtctctagtattagcttccataacagctttaattgcatcagcaacagcatagatattttctggtgttgcatctgttttgatgcctgagaaagtttataccaataggtaagaatttgaagttatctccatcttttcccctggttcacaccgtacatgagactttcacctcatacggcgttccaacaatttatacttttttaattaaataa

SEQ ID NO: 47 - DNA, 43059 bp, Clostridium beijerinckii
aggagcttcatcgctcgacttgcatgtgttaagcacgccgccagcgttcgtcctgagccaggatcaaactctcaataaaaagtttaatcttagcttactcaaataaaaattgctggtttacttaaataaatgtatttatatcattctgttcaattttcaaagaccaatttttctttctaaaacctgttgttataaggctttacaagtatctatcgtttctgacagcttactcagtatatcaccgctttcaaagcttgtcaacaactaaaaaaaactttttgaacttcattttcattagttctattagctttaagttattaatttcacatctcttagcgacgtgttttatcttaacacctctggcatatattaatcttctatcttctcaccttttttatgaagttattctattttttcgctattattcgctattatgctaactaatacatatattgatacactagaaaccgttgtatacattgaatattctgaagtaaatatttaaaaaatccaacctctatacttttgatattttaaaaatatgaaaccttaatttataaattctttcaattcactttatgtactattcagaaacatttgcatataaggttatatctaaaataataaaaaattgatgatatcaaacattttatatcatcaatttttattaagctatatttattatttataaatgtatatataaaacctattctctaacccacaatctcatttagactttcctctttgaaataaagtcatacccacatttttaaaactcacttgttaatacttattgaaacctccattatatactacaaatcctgatttagtatttgcgcctttagacgtattataaactacactcaacttaccatttttacgatacagtggtgtcgcagtctcaccaggagatagtgatcctattatatttccattagaatcataaacagtttccgatgtagaaccatttttccaggctccagcattaaaatatttgattatatttgtagcattgctaacatatcctgtccgtactccattaggtgttggatattctatcaaagccagttgtgttgaataactaacatccaatactgttattttatccccatcatcaactctacgaccaggaataatattaccactcgaatctcttacataaagaaaatctcctgatacttgagcattatttgtataagtaaagccactttgtgttggatcactcggctcagatggattaccctgtagatatatgaatccaagaaaattcgcagatctgctcttaaatgctgatactgtctgattttcctctgcgccatcatatgccttactcacatgatagttagcttcgttaaagtatattgtgtcaccagaaacactttcaataaatacaacatgccccgcgctaccattcccgaatacagctatagaattagcggctggtgtttgccctttcgaataagtagtttcattccaccattgttttgcattgccataaaactgagagtttaactttattcctaatttctcatatgcacgcccccatacaaaccatgtacattgtcctttgtaaccactctgcgtaaatatgttttcactgttataagcactacttgatatgtttggtgaagttgcagcaaaaacaatgttaggagtttgtcccaaaagcattaataatgatacagccaaaatcatcacttttctaagttgttttttcatctcacctctcccctcttaattactagtattattaacatcaccatcagcttaatacaattgttaataacactctttaccacatttatatattctcatattactaaacttaaataaatagtatttcttctaaacatacaatataaagcattaaaagcaattcaataaataattgcttaattattaagcaattattcttttcattccaaaatttgtacgttttattccaataatattgaaattttatccaatatactttataaagatattgttcactaaataatctagagaggttaaaatgataaaattaatatcaacttttataacaagatacttagaaaaaaataatccttctttaattaaaacagatttactaaaaatccaatatacattagaggttattttaggtaatttatttgattttgtagttatattcttaatatttctaggcttgaatgaagtccctatacttttactatcttatgttattttaatttcaatcaggccttttatgggaggtactcattgtaaaacttttatttcatgtttgcttgttactataatgtacttcgtaatagtactgctttttacgacactgactcccaagctaagcaatagcttttatataattttttttacaatatcttttattatagttgcagcttatgcgccatgccgtaatttaaagagacctgtaaaaaataaagcgacattaaaaataatttctttaatatcgctagctttttggattgtagtattctttaatctatcaaatatgcaattatgtaattgcatatttataagtatattcttgcaaatacttcaaataattattattaatacgaaaggagtggtttcaaatgcaaaaatctataaacattttttcagctatacttcttaagttatttaacttagcatctaaatcaagctgtgcaggcgtatggggtgaaccagattatcctgaagaattattaaaataaatatcaaaaataatttcattacattggatattaattttaatgtatcccttatgtaaattaactatttgttgtacattatataaaccataacctcttgtatctgtatttttagtagaatagcctcttgtaaaaatctcatctaagttaatgtcactaggatttaccacttgattcttgactattagatgagattctttattttcattaaaaatctttatttcaatacattttattgaacaatctttttttgtcacctcatcaaaagcattatttagcaaattatttaatatattagaaaattcattatagcttaatatattatctaaaacattattttctatttcatatttaaaaacaatattatgcttttttgccctgcacatgtttctatatattatagatctaacaactacattatcaatatatataagttcatttattttactatcatatatatcttcgtctttcatataagttctaatagcttcctttaaatctttttcacttaaaacttccaccattcctcttattgaatttttataattaacaaaatcatgctgtctttgttttatttcttgaactatttcatcgataacagcattatactcatttgaaatttttaatgattctttttctcttgtcaccttaataaaatacaagtatatcaaaacttgagataaagccaatatgccaaatattaaagatgaaagaaataaattgtttaaaattactatgttatcataataccaactaattttaaaaagcatagcatatatactgcatattagaatagaataaatgaaaactatattatccttattctcaaaaataaaattttcatttaataaatttatctttgagaatataatttctcctaccaatattattccttccacacaaatttccgtgactatattatcgtagataaacttatcaataagggccgcgaatattaattctaaactcattactgcaatcaacactaaaaaaaatcctagtataacttgtttaaaatctgccttatatataattttaatgcttataataactgctatatattctaacataaagtttaattgtaatacttcaatacctgtaactaatattgaagcaatcaatacacttaaagccaatttcaatatatcattatttttcttggttaatgttgcccataaataaattatattaaatgtattcattccatttataatcgctgaacttaacatattatcacttttccttttttaaattcagacataatgctatttttaaatttgtatcctaaaaatgctgtcttgctgcattcattaaaatatacttcactaagtttaacgtctagtttttctatcttgtatatataattcgtgtttattgcaaaagctctatggctttgaactatataattgcagtcaactagctgcaatattttttttaaacttatgttatatgcagtataaacgccattgtaagtattaatatcacagtttttaccatcaacttctataaatataatatcatttacctttattccaacgtacacgccattttttaaagtgattacaacttctttgtctttctcctcactataattatcagctttgttattcaagtcacttgtttcattaagaataatcttattcagcatagcttgtacatcatttttatcatatggttttacaatataatcatagcaatgagtttgtttaaatgcttgagttatatattccatgtgtgttgttaaaaaaatgatttgcctaaattcgtatttagatatacttctaatcttcatagcaagatccaatcctgaagattgttttaaactaatgtctattaaaaacatattaatatcattatttaaaattatttctaatgctgacatttcgctatcagcctcataaatttttacaaagtcacatacagataatatcattctctttaaaatgtctctttgtatagaatcatcctctactataataatagaatacaaaagtaccactctccaatccatatacaatctaaaaaatatgtcaataatactgtcttatataatcatgaggtttaaaggctaatttcccttaatcttattttttaatagattatcaaaatgcctctacctatataatacaatattatataattatatacaattatcccacttttgtgtaatctttatttattattctttaaagacagtgataaaacgtgctgtatagactatttaatctaatgcagcacgtttcaattataattattcttattaaattttttaaaattaattacataaatatagctattttttcagaaagaaacatttctaatttcccatttccttcatactataatctgcatatgaagcatactcagttttaggatatttatcttttacttgcctaaaatatataagagcatttgaataatcatttgtctctttatagcatgtccctatttgatacatcaaccaaggcataatatctatatcagaatcgatttgtgaagccatttttaatttaggaagtgcttccgcatattttttttgtttatatagcttatttccatcattgtatataggccagattcctcttatttttaaatcttgccataatttatcaaacttcactttcatatcatcatcgagattttcattcttcacatttattaaatcctcaacagcaatttcatattttccgtctctaattgatttctcagcctcatctaacatgctcaaaatattatttttatagctatcgctttttactttctgatcttctgaatctattttagctttctcactattttcaatatttaccatgttctcttctaacaaatcatctactttgttctgatcgttatcgacttcctcttgctttactattagtttattatttatactaagcttatgtaaaaattcttgagtttcgataggaaccttcgctattgccacctgaataaactttggataaaaataattcattacaataccacccataatgattactgtacttaatataaccataattattttccctgtcgagcgctttgtttttttagagtactcattccatatatcactattaatatgatttataacatccatattatttacatttcttcctctggatgattctatttttagactttgtatataatcatttgctaaactatcatatatcgcgtattttttgagtttcttaaagatcttttctgcatttctatattgcttcatactaacatagcacaatccaataagcttaattgcatctgaaaaccccttattataggataaagcttttttcaaatcatttacagccaactcaaagttgctcttttttatttctcctattgctgaattatatagaataatggatttcttaatgtcattatcgatcttatatctattcaattccatttcctttatattgattggatttatttttttaatctccatctcaaaattaaccaaataattacctcctaaaatattacacaataatacactaatgttcaaacagtaatatcttcccattaaaaccagaataactttacatttgtatttaaaatttgatttatttctatgtataaatcttagcaaattatgtaatataattcaatataaagtcttactggcaaaatattttctaaaatatttttaagcgtacataaaattattgaatatcttcattttaaaagtaatataaaaaacttaagactatgtataagtttaaaacaattatctcttatacatagccttttttcgcttccaatataatattttattataaataatctccttaatttaaattttgcccgtttccaattcgtattccttgaggaaatttaaacacctcatacggatcatatttcaatttaacttctcttaatttctctaaattttctccatagtactctttttcatactcatcaatatcttcgcacggaaaattaatatatgaacctgttgtgatactatttatgtatttaagcttttctttaacccattctatattcataggcgcatactcagcctcttcccaaacagattgaaaccccattataaatttcgcatctctatagtaaaaagctgtatcatttttatctttttccataattgctccacctaatccatatagggaaacagctgcatatactgcacctttagccctctcttcaacaagttctataatttttttcatttcacttctactataatccttatatacgaatcttcctgctgatttatatttttcatatggaggatgaccatcttgaatccttctatttacatctaaaactgaaatatagttaaaatcaaatactccctttttagaaatattcttaaagtcgcctaaaattacttctgcctcttctctggaaccatatactattcctgtaattctgactcctcttccttttatttctgaattatatatccccatctttaaattaactcttttatctaaattcatatataaatgtgtccaaatctcaaatatatctaatatctcatgatcatcagcacctatataatcgatatctattaaagtcgccatcttaattttttcaggaagtttaaatatcatgctagtaactactccaaaatttcctccaccagcacctcttaaagcccaaaacaagtctgtattagatttatctgtagcaactattctttcccccttatagtctatcaattcaatttcaagtaagttatcagaggctaatccaagcaatctatttgaataaccccatccgccacctaaagttagtcccgaaactccaacagttggacatcctcctcctggaaatggatagcccagttctcccaaaacctcgtaaagttccctattcctaactccgccttgtatctttactattcctatttcttcatctacactaattgcattcattttgctaatatcaataaccaaaacatcattccctgttgaatatccctcatagtgatgtctgcctgaccttattctaatttctactgaatgcaatttggcccaaattattgcattgatgatatcatcattagtatggcaatatacaattgctaatggatatttttctatagccctattccaagcttttcgttcttcttcataactaaattcctcttttgtaatgatatctcccgttaatcctctataatcaaaatctatcaagtctatcaccttctacttttctactaattatttcatctactcccataataccatattatattttttataataagcgtattttatctaataaaatattttttacacaatcttttgatgtaaaaataaaatttattaaaacttgttaagaaactgtgaactttcattttttattgaatattataattttcccatgtcaaatatatagctaatcataaaatcataaaggagagatttattatggataaagaaagagcacaggaaattgtttcatcatcagtaatggcaaatgtaacacttaatggaactccaatttacatcgaaagcgtgaatactaatacagaaactgctaatatccatttttttaaaaatccaaaaaattcacgcgaagtgcctttaactagtttacaagaacataataaaaaatagtattaaatataaaattataaaaacgccttataattttacatttaaatttcaattcttaatgactacaattttgtagtcattaagtctacatattgcacgcaaaaacttttaactaatcactatatcactagaaatttttttaaaattactagttaattattttatcaatgaaagtttatatagcactaccatgaatttcatagtatcaaatacttcctttaggatatgctaacatcataaaggatataacagttaagcaagcaaatatgttcaaaaaacaatatatttgtttatcagaatttaatacaagtcaaaagacttgtattaacattagatgagattttatatggttaggaaaagttttattatagtagattaattttattataataggattccaacttatcttataaagtcaagctaagattatatttggtagtgtaataatcatatatagtcaaaagattatatatggtcgtgtaagtatcttatttagtcgaacaaaatattaatataggtattgcactgtttaattatggtcgaaagattataattagatactaagttatctatattagtgtgagttatactgctatattctttatttaatggccataagtgaatttacataaatttacttatggcttttatttctactcatttcctataacaaatccttatttatattctgaataactacaataaattttttccatatacaacaaaaatgtacatgtgaggaagttgcttttattaagctttcacatgtacctttagtttatattggaatatttgcaactaataaagctcatacaaattattttaaaaaatatatcagctttttatatctgcctcagaattttctttaaatacaattttatttgaattcaattcagtttcatcatatctatatggctttttcttaaatacctttattactttaccaaatagacctcctatagcagccaaaacaaatatccataccttcttaaatattattagtattttagcaagcaaacctatcttagatgctgtgcctccaacaattagtgctgctaatcctgcttctgctaccttatcgcctttcatgtaatctgagtatctttttccttctttataagcataattcttaagaatattttccagtttaggtttaaccgccaacatttcgtccttacttgcaaccagtgtgacttcagtcactccaccacgccctaaaactcttacattataattaactatctgttcgccactactattacataatactgaccatactaaattattggtatttggatcataatgtggtttttcatcccatccaattatatctaatgtagattttccattcttcattctttccttattatcctcttcagttccattttttatatcggacaataactgatcagcatttatttttcctgcatcattgtctttgacatatcccatattatcaaattcaaataaaacataccaattttcattattatcttttgataaaactattccctgttccatgccggtaactgaattatccatttctttcattaattcctttgcatcttttccattcgcaaaaacgtattcactaggcaaatctaactttgctaagtcagttcctacatcaacagtctttggcccttcaatccaatttatttccgatgcatttgttgagtcattagcatatgaaataactggaataatagtaaatatagttaaagcggctaatgttcttaatatactttttaacatttttatccccctatgtattaagttacatttattattctaaagttattttcatgtgttgtatattatacttttgtatacttttttatactttttcagttctaaataatataaaaattatataactgaatacgctaagataattcagattacttttaataactaaagtttatattttagaagcagcttaagattaataaaaaactattcccctttgtattacataatcaaaatatccaatatttacaatacaaattccttctcttaatttcgtatatttaattaagttatgctcatactaactttgaatgatttatataggaggtgctaaatatgccaggaaaagctaaacaatatgttgatcaaagcgtatcttcatgcaaagatactattagctcattacaacaagctcttagctctgcagaaaaacaagataataaaaataaaattcaacaagcaataaattctcttaattctgcatgccaacaattatctcagtatcaagactaattaatacttagatatattgttaacaatataataaaccactttattctgattaatctagaataaagtggtttattatcttttatcttaaatatttcttaaattcatactttaaaaatgtgagcatacgtattaaaaacattcatcacatcaaaatctgcaatcatttaacagagttatttgagtgttaaaatcttatgctaaatttcttttaacaacttcttttgtttccgcttttgatttaatccccttatggatcaaccaaagcataataaaccatactggcgttacaaatagagccacacgagtttcattattaaatgctaatgtaattataacaaaagctaaaaacgctagaattatataattcatcattgggtaaagtggcatcttgaatttgttcgaagctgcaagttctggattagttttacgatatttcaaatggcaaacaacaataattgcccaaataaagataaaacaaaatgttgatatacttgtaattagaacaaatactccttctggcataatataatttaaaataactgaaatcaagataataattgctgagaagattgtagcattagcaggtacttgattagacgttaatttattcattgactctggtgcattaccttcttttgcaagagagtaaaccatacggcttgtgctaaaaataccgctgttacatgcagaagcagctgatgttaatacaacgaaatttacaatactcgctgccgctgcaattcctactgctgaaaacacttgtacaaatggacttttatctggattaattgaagtccatggatatatgctcataataataaacagtgctccaacatagaaaataataattctaattggaatattattaatagcccttggaataactcgttctggatcttctgtttcaccagccgtaagtcctactaactcgattccggtaaaagcaaatacaaccatttggaatgaaagaataaatccagttgcacccttcgggaacaatcctccatgactccaaagatttgtgaagctagctgcgccagcatctgtagaaaatcctttaataaccataaatataccgattataattagcgctaaaattgcaacaactttaattaaagcaaaccagaactccatttcgccgaataactttactgctgtaaggttcataatcaataaaactataagaattataagacttggaacccattgagctacattcgggaaccagtattgtatataaagacctgcagcagttacatctgccatcgcaagtgaaatccaacagaaccagtaggtccatccagtaataaatgctgctctctctcctaaataatcatatacaaagtctacaaatgaatgatagtttaaattagaaagtaataattccccaagggcacgcataataaaaaaacaaattattcctgttatcatatacgcaaacaatatagatggtcccgctaagtgaatagaccttcctgaaccaaggaataatccagtaccgattgctcctccaattgcgagtaattggacatgacgattttttagtcctcttgataagttttgattttctgattttaattgatccattttatccctccatcttagttaaaaggcatgtactaaaaagccctttactaatataaatattttgtgatttgagatataaatgggaatagataagatctaaatgaagtaatctataatatattactttgataagatatgttatctgtcccctgtccttttacctgagagtttcgcctttacagctttctccttcggtgctcttttcgagtctctccaaggtttcatccaatagcggtcatctctaattaaataggtacctgaaagatttacttcttcggtgaatgaccatagccattactctcccgctatcttcatctgaacttttagattttactgttatatagtaatacatttttaataaagttgcaacatttttttcattttaatcagaattcttaagtatttttatcataattttaaaacagccacaaaaagaaccctatttctagagttcctaattatttacccatttgcttttttattattttatccatcaattcctttgttgctgcttctttctgaaatacgcttttttattttcgatacataagagtttcttgtttcttaataagatttcactacccttactctccgtttcttatcaagctatttgcatacatttagtttatatttcatattgatgatcaccttaaattctactatttttatataactaactacacaaaatcaatttttattttccattgaatttagaaattatataacaaaaagtctagtataaaaaaatactaaactttttaaatattttcacttatataaacgctaatttgatattttatgtatcactaaatattttttcttaactctcattattcatcttcttctatatagaaatgatttggatatcgctcttttttaagctccttttcagtctctaattcacacgccatggtgaaatagtcaaccttgtaattaatatgttccatgtatttatttaattcatctatctttttttgaacattttccctgtgctttaatattaactccaaccttttatataatgtaccatcaccttggctatttaaaacaacgaattcttttatctgctcaatgggcatattcgtgttctttagacaattaattactgctatccactctagatttgactcatcataatatctatgtctattttcagcccttttaatattaggcaataatccttcagattcataatatcttaaggtagatgctgttagtcctgtaattctagctgcttcttgtatagaatatttcatagtttctctccttatactagaaatttctaagatacattatacgccaaaattactatttttagaatagaaagaaaaagaaaatgtatacataaaacttaattttttatccctagcctagttagcacttatttcatcaatcatccttaactcttcatctgtgaatccaatcttatgaactattcccacattttcaataatttgagacggttttgatgctccaataagtacacttgttacttctgaatcttttagtacccagctaagcgccatttgagcaagagtttgccctctatttaaagcaatattgtttaatctcctaatttgctctaacttcttctctgtcaatatatcttgctttaaaaatcttccatccacctttatccggctatcgtctggaattccatttaaatacttatctgttaatgtcccttgggctaatggactaaacgctataattccttttccgttttcttttgctgctcttttaagtccattattttcaatagttctatcaaatatagaatatctattttgattaattacaaatggacattttaattcatttaaaatcgcagctgccttttccattgtctctccattataatttgaaattcctgcgtaaagtgcttttccactttttacagctgtatcaagagccatcatagattcttctaatggagtatcaggatccattcgatggtgatagaatatatctacatattccaatcccatacgctttaagctctgatccaaactcgctaatatatatttacggcttccaaagtctccataaggcccttcccacatcttataacctgcttttgtgctaatcaataattcatcacgatataatgctaattcctctcttaaaatacgcccaaaattttcttctgcacttcctggaactggcccatagttatttgctaaatcaaaatgagttattccattatcaaaagcagtaaaacataattctttcatgttattataatctgcattgctcccaaaattatgccaaaggccaaaggatatcataggaagctttaaaccactttccccacatttactatacttcatctcattatatctattttttgatgcttgatatttcattctctcaactcctttgtttttataactttactttaacacttaaagttaactttaagtcaatattacatttttagatttttgtaaaatgaaaaactaacttcttgattgcaagagtaaattcattattaatgactttaatctcgcactactttttttgacaaaaagattgaagccttgtattttcagaaattatcaaagatcaagaatttacttattcacttaatgatttttagattgtttaaaatatattatgcaaaaataaactacctaaaccaggactaccataaacatttagtattttatattgcataatatatattttcatttaaattgaattgtatacctaattagcatttggataaaccgaggtgtcccatgaatgatctgcacttatttcttggtctgttaagttataatagtcatattgtataacatcaccgtaattagatacaggatcatcccacgtacagtccacatgacgccatttgttatttatataaaccaagttccatgcatgagcctgtccatcagcagtaccctctacaaccattgatttaattcctgcaatagtaaacattttttgagccaaaagagaatatccctcgcagactccagtatgtttaattaaagtattataaggatcatatatagttaaagattgatcatattttgtattatttattatccaatcatgtatcgcacgttctttctctggctgactcatgctatctggagcaatctgtgcgactatggatctcactttcgaatccaaatctgcttccattcctgcagtaattttataattgcatttaatctgtattccaatagtatctgatccatcacttgtcatggttacatcgtaatcagatacattaaacatttcataagagttagttatttttagcttgcttatatcatctttaataatattttctaggttgctaatatccacaccactacttggacactctatataaaatgatggattttgaatactgacattctttaatatttcttgtcctattaatgtatttacagagtcaatccacactcctctggaattcaagtaatatccatcaatagtagtgttctgtgccatatatccattttggtagaaataataccaaaagccatctatctttctccatccagtggcatacgaattaccttctgtataccaccagcctttataattagacttccactctgccgaaactcctattggagttagcactgtaatcgaagctgcaaccaatgtacaaataataatatttcttaatcttagacttttcattttattcctcccttcaatacttataacataattgtatattacttcatctttttttcaaatatgctacaaaacagttttacacaaaaaatctagtcattgtatctatattttactatacatgtttaaatgtttatttttcaatattctaaaattgcaattaaataatgttaattagaaaatagagccagtattctaacatctatgatactagctctatttttatgtttatttatttttagatatatcccgagtgtttaaataaaccacgcatagttaaaaattatgcatttcaaattcccaatatataatttctataacattcatatgcacattaagaatatgtacatagttatatgattattttagtaccccaaaattaatctttgcctgcactctgatctttgatatgatgacatctttaatatattttcttccatccattttcgctgttcataagaaaatctttttccaaagaataacataaattgattgtcataattatctcctactaatccataggtagattgagtaaatttaataaacccaagagtctctagcaatgctgtatcatgaagataaattgatttctcttcatcaaacatttctaatcccaattctttttctaacctggatgctaaaagattatgtttagattcaccacattcataaaagtttccatctcttgataaccaaccacatatacctgtttcactcattcacttaataggatagatacttatgatttagcttgtatcttcctattttacacctcactctcttgtataataatctgaatatattattgctaatttttatgtttaagcagcgttttcattctgtaaaccaagaaaattcagcatattagtataaaaaactttttctttaaatttaatatatttcataaattctatatttccacaaaaatattcaaattcctctatttcaaatggtgtaataattcataaaattaatggattaatatattaagtttaccaatcaatcatataaatggcatgcaataaaatgatcaccttcaatttctttaaaaacaggaatttcatttttgcatcgctcatatgcatataggcagcgattacaaaatttacacccattttctctatctttcaatgtcatctctgattcttttatactaagcctctgcttcctcaattttggatgactaaccggcatagattcaagtaacatttttgtatatggatgcattggattatcaaataaatcttttttttcagccagctcaacaatgttccctaaatacataactgcaattctatcacagaaatattttacaacgcctaagtcatgagatataaacagaaaagttagtagatatcgtgtttttaattcattcagtaaatttataatctgtgcttgaatagaaacatctaatgaagctactggttcgtctgcaaccacaaatttaggctgaacagccaaagctctagcaattcctattcgttgacgttgaccaccactaaattcatgaggatatcgatttatagcttctttatccataccgcaaatccttaagtattcttctgctatattaaatgcatctttcccatgtatcaatctatgtttcttaattccttctgctataatttgtccaactttcattcttttatctaaactagcaaatggatcttgaaaaataatctgcatatcttttcttaatctacacatttccttgttactaattgatttcttattttcgacatcaaataaagtcttatcttcaaatattacttttccaccatcagcatctattaatttcaatatagttctggctgttgtagactttccacatcctgattctcctaccaaagcaaaacattctcccttttttattgagaatgaaatatcatttaccgcatctaaaacaatcttttctcttcccaaaaagcttttttcaattacatatttctttctaatccgatctacttctaaaatagtgtcaatcaaaatcctttccctcctcatataaccaacatgctactttatgattatctctaatattaaataatggtggaatatcgctttcgcattttatgcaaaactttttagagcatctattactaaatcggcaccctgagggcatatctgataaagatggcactattccttcaatactttttagaggttttccactttcacatctatgtggttgcgaatccaataatccaagagtataaggatgtttagcattatcgaacaactcatatacattacattgctcaaccacctttcctccgtacaataccataacttcatcacagacttcagcaactaccgataaatcatgggtaataaacaaaatagatgttttaactttattatttaattcttttaatagaaatagaatttgagcctgaatagttacatctagcgctgttgtaggttcatctgcgattaatatttctggttcacagcttagagccattgcaatcattactctctgacgcatccctccactcaagttgtgtggataagaattataaactttttctggatttggaatatggactgctctaagaatctcaattaccttctccttaagcgctctcccatacaaacttttatgtatctttagcggctctgctatttgccttcctattttaaatactggatttagtgaagtcattggttcctgaaatatcatagaaatttcatttccacgaatatattcaaattgtttttctgtaaacttacttaaatcatttccattaaataatatttctccattttcaatattacttatcttatctggtaacaatcccatgatagataaagctaaagtactcttaccacaaccagattcccctataattcctagtattctgccattttcaaaagcaaagcttacatcatctacagctattactttatcttttccttccccgaaactaacagatagattattaatacagagaatttgtttatccatatttgccccccctcctatatattcattttgggatcaagagcatccctaagtccatcccctacaaaattaattgatagaactgataagaataccaatactcctgcgggaatccaaagccaccattcatattgcaatacacgcatactttgagctgctgataatatattcccccagcttggctcgggctgttttactcctaatcctaggaagcttaaaccagcttccattaaaatcccttgtgcaacagccaacgtagcattcactataactggtgataatgtatttggtaacaaatgattaataataatctcaaaactgttaagccccatagctcgtgcagcttcaataaattcactttgtttaatagaaagaatttcagctcttacaattctagcaactcccgtccattgtaaaagacctataatcaaaattacgttccaaacactaggtccagctagcgcagcaactgtaattgctatcacaaagaaaggaaaacacataattgtatcgactatacgcatgattgcattatcaatccagcctccataaaatccgctaatgcatcctaacgtaactcctattagcagctgcaaaacagttgcacttactgcaatccccaatgaaatacgtccaccatataataatctagtaaatacatctcttccaagttcatctgttccaaataaatgccttaaacttggttgactttctatattcaataaatctatcgagtctctcccataacttgacaaaaagggtgcaaaaatcgctgctaatacaaatatacttaaaagacaaaagccaattgcggccagcttattctttagaaacctcgttaaaattacatgttttagcacactttccctcctttaatcaaattctatacgtttatctacagctgcataaagtatatctgccaataaattcgtaaataaacttattattgcaaccatcataactatgcccataataagtggataatccctgctaataacagcattgtaattcagccttccaatccctggccaaacaaaaattgtctctgtaagaagagcgcctgataataatgatggtatctgcatagttactactgtaattaaagtcagtagttcattttttaaggcatgctggtatataacattcctcttcctaactccttttgaacgtgctgtacgtatataatctgtttttagaatttcaatcatatcagaacgtgtataacgcattaaactagccgtattcattagtgcaagaactatcatcggcaataacatatgctttgcaacatctattacgaatgccaagccagttaaattaacgcctgtagtcaccatacccgatataggaagccatcctagatttacagaaaacactttaatcaaaatcataccaaagaaaaaggatggaatagataatcctataaatgcaaatactgtaacaatgtagtcagttttagtaaactgttttgtggcgcttataactccacatggaatcgctatcaaaatactaagaatcattgaacatatagataagataactgtattgcccagcctgctgcctataacatttagaactggctgtttaaattgaatagaatatccaagatttccttgtaaagcttgcattagccacttaaaatactgaattaatatgggatcattgtatcccaattgttccaacattttttctttcatttcttgtgaaagattaggatccatcatagatgaaaatggatctcctggttgtagctttacaagcataaaaacaattatagaaattccaattaatacaggtattgtttgtattaaacgcctaaatacatattttttcagaacgatcacctccccctataaaattatatcggttaggacttttaccctaaccaatacatcaaatttttaatttttatctttcacttctatatcgctcttctcttgcgcagtaacttcctattttgaaatcgtccagttttgtatgtctggaaatacagaatatgctgagtacttatatccttgcaatttaggattatgagcacgaatagcattttgtgaatataaaaatacatatggtgcttcatcattcaataattgtccccattttgcataaacttctttacgttcattacgatcaatagtagttgcagccttttctataaattcatcacttttagcatttataaaattagaaaaattaaattgagaattatttgcaatgcttgaagaccaataacgatcggcatcacctggatcaacttctaaggtgaatcctaataatcccatgtcataatctccttgtcctttagtttttgccatagcagaagcaacatccatagtgctgatatttactatgatacctacatcctttaaattttgctgaataattggagcactttgttcacgaaccttatttcctgtcggaaccattaaatccacttcaaatttcttaccatccttttcaagaactccattattttcaatccatccagcttcttttagtaattctttagccttatccgcattataatcataggtattaagtcctgacttaggataagcccatccagctagagatataggtgcatttattacttgtccatgttcacctagtaaactatcaactatgccttttctgtttatcgcataagtgattgcttgacgtactcttttatctttaaagaaatctctattgccattcatagtcataaattgataattagcacttggtttctcctctatttttatacctgcatcttttaacatctttaaatcttcttcttttgtgcttgaaagttcaacaatatcaagatccccctttgctaactctgaaagctctgtttctgtattagcaaccttaaaaataaatttatctattttaggagcccctccaaaataactatcgtttttagctaattcaacatattggtctggtttaaaatctataagcttatatggtccggttcctacaggcttgttaagtaaatcactttgtttgtcccaatcagcaacatttactttactccaaatatgcttcggaattattccacgctgtgaaaaatttgataatgctggtgcataaactttagaatatgtaaagcttatggtatatttatcaataaccttaattccacttatagaatctgctttaccatcgtgataatcctgcgcaccaactattttggaaatttcattgaatcttgatcctgtatactttggatcagccatactagtaaatgtaaatgcaacatcatctgctgtaaaatcttctccatcatgccatttcacatcttttcttaaattgaatgtcacagtaagattatcacctgaaaattcatatttatctgcaagtccagacttaaaatcattattctcatccaataaaatcaatggtgaatataccaagctatttacattattatcatacgttgtatttgataataatgggctaaacaaacctttaggtgaagattctacagcatatcttaatacagattcaccacttgatgattgattatctgctgatgaattagttggtatttctgcagatgtacttccacaaccgtttaatagcaatatagatagtaacatcgagagcataccagctaatattttattttttctcagaaacataaatattcctctctttcataacttcattttgattcgtataacttaaggtattgattttattaaaatactttccaacgcaaattctaggaatatatttttcaaatttcaattcatagtattttaatatgattactttttttaaattataaccttagcacattaaaatttttatcaaatatatattgcaattcacaatgcacatttcaaaattcacaattgcggctaaaatccttgtaatctttttagaattatgatgaagaattgtttttgcaacgtatatataaaatatatttatgaattttaatgtgaataagcactacaattagaccatcctatttatacaaatattaatcagtacaaaaaaatcaatcactacaagattgtagtgattgatttttactttttatttataaatattagtccaataatgcataatattattcctagtaatttatttatattaaaaccttccttataaaaaattatacctactggaattagtatgagtgcaagaagaatattagatactagagatcctatacttatatcccagccggacctatataccattatatatccaaattcaagaccaacaatagcgaaccctagtaatatacttgcccaattcagatcatcaaaggattcgaaaaatcctttatctgatttataaaatctaaatgctatagcggctacaattactccagttaaataagtaatgaataaagaagagaaagggttagccttctccggaactgattttgagcaaatatgataaatcatatttgatacaacaacaattataatagaaaatgcatacataaacataaaaatctcctccattaattttactgcaattcttttatgatcatagataaatatcagagaattccaccctagttgattctaaaatgtgattataaaaaaactcctttgatgatctgtactcatatgtttcggtaaccttttcatttggtagcattactataaaagcgctccctttgctaactttactatttacaaaaattctcccacctagatcctcaacaaatttcttaactaatgataatcctaatcctgttccctccacttgacgagatagagaactatctacctgcccaaactgctcaaaaattgtatctattttatcacttggaatacctataccttcatcacttacttctataaatatattttcttttaaagtattaaagcgtacagttattttcttattattagaagtaaatttaatggcattagagagaagatttaaaagtatcctttcgaatttttcactatcaatagcgaccacaaattctttatatgatgtttctaatatcaaatcaatttcttttttattagcatatgatcttacagactcaacaatcgcatctataaaaaaaacaatatctatattctttttatttatcttagtactcttcaaatttgaactagttatatcaagaatattgtttactagccttaattgtctaaatgtattaagttttatcatccccaaatattttttagtattatttgataactcattaaaacaaatatactccatagcttgtactgctgaattaattacatttagtggtgttctgaattcatgagatattatggaaagaaattcatccttcatagctattgttttttctaatgcttcattcctttcaaattccgcctgcaaaactgaatcatgttgagattttatgatcctttcctgcttaactttttccgttatatctttcatacacatcattccaaataagaaattaccactatcatcatatacaggactaccacttatacacatatatatattttcgctatatctctttataattattctatactcagtaattatttctcctcttaaaattctatctgacggaagactcccctccctcaattccttcatattaacatcaaaatattctatttcactatcatttttatttcttccttcaattatttttataacattaaaatgtttctctgctgctttattaagcataaccagattgccgcattttcctatagctacaactccatcagacatgttatcaataattgcttttaattgctctctattatttctaatttttttctcattacttacaagttctgtaatatcatcaaaggcggtaactgacattaacacagtattttctttatcataaataggtgaagaactcatatctaaaacactttctttaccgttatctacaactgtaatacgttgatttttaattttctcaccttttaaagcgcgaaacgatggcatgtcttcaatatcaatttcttttcctgattcattaaagtatttagcttcactattttttccatatgaagtctttgactcattagagtgttcaatcaattttctcgatatctcattttgctgaagtatatctccttcttttgatctaacgaatactccatttggaatactttcaaatacagcctccatttctttgttttgaaggttaatggcatcaatttgttcttcaactttctttctattaagtaccttttctgtaacttcatatgtattacttaccacatattttatactttcaccttctgtaactggaataattattgaatcccaatatgtaattcctctttcatatccaatatgttcatattcttttacttgaactgcttttcctgtaagtatagcttccttccaaaacttttctaccttacttccgctccatcctaatataatcttatctatattttttcctatactataatatgatttattaaacggaggttctaagaaatctaaatattgctgattcgccttgataagtatcatatcaggaacactataaacagctactcccacgaagtttgatttacataattccgataaatatgtatgtttagcttcaagtcttgaatttggtttttctctaataataaataattgactaccttcttccttaattatttctattgaaattgatctaaattcaagagatttagtaaataaaaaatagtcggccttttcagcgatgttttttatatcaacgcttgggccgactcttagaattttaaatatctctgcgatactttttccaagcaagtcagcagttgtatattccgtaatttctgcaaactgttgactcaccttaaaaaccttatgattttttaataatatataagaaatctcttctatgcactcaaggtaccttctatcttccataatagtatcctcctaagctatccattatcattagcatatgcaacaaaataagtaatattttaccacagtattttgtatatttctactcctaaattttcttaatttaaattattttgaatttttctgcattattctttcgttatatttcattctaagaataagtttaaattcccaataaagtaaatcttcttaattcatttatatttttgcaaatgtcttattataggaaatttataaaggatatcatatatggattattaatataaaccataaaaatatttttcttctgttaactaatctaagtaattacagttgttcttctaattgcaccattaatatgatctcagtattttaaacttaatccttcctacctctgtccattatttaaacttcttcgccattagatgaaattactttcttataccaatcaaatgatttcttcttcgatctctctaacgttccatttccttcattatctttatccacatatataaatccataacgtttcttcatttctcctgtagtaaatgaaatacaatcaatacatccccacggagtgtatccaagcaaatcaacaccatctaattcaatggcttttttcatttcttttatatgttctcttaaataatctattctataattatcattacatgaaccatctgccgccttaacatcaatagcaccaaatccattttccactataaataatggaagttcatatctttcatataataaatttaaagaatatcttaaaccaacaggatcaatttgccatccccaatctgaggcttttacatgtggattcctaacacttgcacttgatcctccatttaccgaatccttattaacttcattaactcctgatttaactacatcagacatataataactaaatcctaaataatctacagtcccctcagctaaaattttagcatcttctagttccatcttgatatcatacccttttctactccattcttttaatgcataagaaggataatgacctctgcaatgtacatcagcaaacaaataacgatcatgcatcgattcaacttgaagcatcatatcatctggattgcaggagaaaggatatataggaacaaatgaacacatacatccaatttgaaagtcaggatttatttcgtgccctttcttaactactaatgcactagcaactaattcatgatgaacagcctgatacattacctcttctctattttcaccttctttaaactggatccctgaacaagtccatgcaaatatagaatttatagtatttttctgattattaatttcattaaaagtcatccaatacttaactttgttcttatagcgctccattacagtagttgcataacgtacaaaaaatccaataacttctcgattactccaccctccatacttcttgaccaaatgataaggcatttcaaagtgacttaacgtaataacgggttggattccatacttcaataattcatcaaacatattgtcataaaatttcaaaccttcttcattaggctcaaattcatcacctttagggaaaatcctcgtccacgcaatacttgttctaaagcatttaaaaccgatttctgcaaagagtgcaatatcttctttataatgtccataaaaatcaatagcttcatggttaggataattttctcccttaatcactccatctgttatccttcttggtactccatgagctcctgcggtcattacatctgcaacactgggacctttccctcctttattccaaccaccttcaacttgatgagctgcaacagcaccaccccataaaaaatctttaccaaaagccataaaacttcctccttacattttatttttttatataaccatagcgtaatcaaatttctacactctaattttattttaatatttaatttacttcaattctaaatatagatttattattacaatacttatacgagaaataaaattaatgattataaaaagcttaaaaatacttcttatataatacatattttaatttctcgaaaaatcccaaataaattccctatttaattacaaaaattcattaaaatattatgctaaaattctttcgaaattagccataaacatcgcactttttactagatattataatcacattatataataaggataacctaaaattatatacatatgtactaattaagataaaaaatataccctaaacggcacagtcttttagacattaccttttagggtatattctcctcatttcaattccattgattatgtataattaaattaagctctatgattaaaccaaatatcaaaaactagaaataaaggactttcataaaaataattgtcctttatttcgataagccacatgtaattattatggcttactagtttgagaattcttgtgttcccatgtatttaccatttccataaagaactcctacaccaactttagtatatgaagaattcatcatgtttgctctatgacctggtgagttccaccattgagtaaataattcaacagcatcatatgtgttgtatgctatattttcacctgttgtagtgtatctatagcctactgcttgcaaccaatttgtccactttgttccatctggatttgtatggtcgaagaaattattttggatcatatcattactcttatatctagctacttgtaataaagtattatctaatgttaacggttttaaacccgcttctgttctttttgcattcattaattcaagaatcttttgttcagcagcagcttgtacagttacagaataattagctggtaacttaggtaacccctgaacatctagcgagcttgtacttgtagaagtatttgttgtacttcctgaatttgttgtatttccagttgttgttgtgccagtactatttgtatttcctgttgtaggttttgtagttacagtaccagtcgtacttcctgttgcgggtttagttgttgttacagttccagttgtacctcctgttgtacttgtcgtatttgaaggttttactgtagatgttttattattatcttgtactacgttatttccagaatcgaataccttatcacttgatggagctttagtccctataacttgtccactttgagaagttgtatatattctattgtttattaaaacctttccaatctccattataccattctgatttaggcaataagtctcaccattaactttaataacaccagtttgcattgctccactattatcaaagtatgaccattgaccattgttattaacccaaccagtttgtaatcctccattagagaatacattgtaataattgttaaacattgaattagtagtcgctgcagatactcctaatggtgcaatactagtcattgttgtagcagcaataacagccgtcactatctttcttaaaaaagctttcttcattagtttttctcctttgtttttttatttgtcttctgaatttttaaagtaaacattttctttattaattgcttcacttgtttactctttcaacgaagtccatgccttaatactatcatcttttcgacattattcaacatgttttcccttagagattctctttaaaaagaaaatagctgtaacttcctctgttttacttatttttactctaccgtccgcccttatatgctctaaaccttgactctacaaaggactaccccctatatattttttcgaaatatcataatattattaaaaacattgttaatcaaaagccttgttttttacattttattcataattattataataattttaacattatttatctatatttaaattttatagttttacaaaaaaatataggtggataatccacctataaaatattaatataagaaagttaagtattagttaatggggtatctacacagtatacatttttttccctaaatatattccatgtcatcaaaaataaataatatttatttttaaataattttcattattttatctacagtttccaatacagaaatgttgcttgtatcaatctttttagttgacatttctttatataaatcaagacgttcaacacttctacttacgcactcttcatcccttaactttaactttacatctcctaaaattctcttctttagagcatcttcatcacaaattaaagttatcttgataatctcaaaattcaaatcatttaacggttctaatatatcatcaaaaatttcttccatatgtataacccaattaaaaataatatattctaatgatgaattagtaagaaagcttctcagtaaataatttatattatttataaccattttcttattttcctcattaactacgaaaggatttatcatccagcaccaatccccatcaagccatactgaattttttaactttttatttaactctctacaggttgcactttttccaacccccatagttccatttattattatcacttttttcttcatagctctctcctttttataatgtccaattcacacggactaatatggtacatctttagaatgacttcttttatgatcccatatttataataacactatccacttaattgttaaatataccctttttatcatatatattcaataaccattagtgcattgactataaaaaatttttgcttcttaataataaaactcaaaaaatatagtttctaatgcaacatttcatgtttttcatataatattccaacattgccacataatattctaaactatatgatataataattaatcaaagttatttattttacgaaacaaaatataattatatcgaagaactaaaacaattatgtttttaaaaggagcttaaaaatgaaatacgaaaaaatattcctatcaatcacttttttattaacttattttataagtataatacttttaccgaaaggttttattggagccttaactattataatggttattccagctttcgctgctataatttcgatattaatggaatcaaggtcattaaaagtattactaaatccctttacttacaaaatcacattgaagggcttaattttcgctattgcatttccattaattgtgatctttctatgcgggtcatctgcatatttaactaaacaaggtgtattatcagaaaatatatcgtacatatttctcgattctataaagattactttgatctctttaacactttttatagctggattatttgaagagtatggttggagaggttaccttttacctcgtcttttaaaaagatatagtattaaaagaacaaattttataatgggtatcatttggtcattatactatgttccagcattctttattctaaatatgcattttggtttacctaacgcagttacatatgtagttttgcaatgtgcagctatttttgcgttgaactattgctttacttatctttatacaatgtcaccaaatgtaattttaccaagtataatgcacatattatggaataatataaacatagccacacttggctactcttataataatgtttcttatggatttattattggtaatgtaaaaattattaatggggaaggattattagggttaatttttttaagcatatttgcaatttacgctcacagaaaattttccaatcatccgagtttaaatatatagctatctaaaattagcttaatcatagcatgtcactcaaaaagcagtataactccatactctataatatcattatagactatagcatatatggttgtgttctttaaaactctgacctaatatctctagtcttaaatctagttttcttaaagaattaaagataggtcgagcaacgctctacctatctttaattctgtttttcagattattatgtttgaattgttttgcttatgtctacattatcatattataacaaaataatccatattttcttatgcatttgtaaaatctcacaaaaataatgaactatcaacaattttaatgtaaaagtcgctactagagcttctttaaataagacaagctaactcaacccgttatatcacttaaactaattaaatgcctttaaaactaaagttgcattgtgtcccccaaaaccgaaggaattactcaaagcataagtaaattccagattctttccttcattaggtacatagtttaaatcacaatcaggatcttgatttttgtaatttattgttggagggataaatccttctcttagagcacatgctgttataatcgcctctatagcacctgaagctcctaacagatgacccgtcattgattttgttgagcttatagcaagttcatacgcatgtttcccaaaaacagattttacagccatagtttcatttttgtcatttgcttttgttgatgttccatgagcgtttatatatcctatatcggaaggtgtaatctttgcgtctccaagcgcaattttcatacatcttgcagccccctcccctccttcagccggagcagttatatggaacgcatcattagtgcacccatatccaactatttcggcaattatattagctcctctatttaaagcatgctcatattcttcaagtataagaacacccgaaccttctccaagtacaaatccatttctttctgaatcaaacggcctagatgcagtagccggatcatgatttgttgtcatagctttaattgcacaaaaacccgctaaagttagtttcgttacacaagcctctgctccaccagcaatcattatatctgcatcatttctttgaattactttaaatgcgttcccaactgcatttgttgaagttgcacacgctgtaacagtacattcattataacctttagctccaaattttatagcaacaagtcctgaagccatattagctatcatcattggtactaaaaacggacttactcttctaggacctctttctttcaattcatcatactgactttctaaagtcccaattcctcctatgccgctaccaattattactcccatacgttctttatttattttttccaaattaagtgccgaatcttccatagccatttgagctgatgctagagcaaattgtgcaaatctatccattcttttaacttcttttttatcaataaagctacttggatcaaaatcttttacttgagatgcaactttggtaggtaaatcagaaacatctattccctcaatcatactaattccagactttccatcctttattgagtcccaaagcttatctgctccaattccaagtgatgtaactgctccaatccctgtaataactactcttctactcatactaaacctcctactttccgtaaccaatacagtataattctttctaatttacaaagtatttactttataacttttaatcgatataataaatctaaacaatttaaaatcatctttcaatatgattttatatgtaaattgttaattaaaatgaacagatattgcttttttaatgtccgatatatttccaaaatgaataaattgatatatttaattttgttcagcatcaaatatattacataaaattattgccttattatttttcatttatctcaataactattttttagaaaaggtgtttaaaatatgaaagacttaaaagaaactattattgaaactgtagattatattgaagataacctctataataagatttctttggctgacatctcactacatacaggaatatcaaaatattatctacacagaatctttaaatctttaaccggcgaatctattatggaatatgttcaaggtcgaaaattaacatctagccttaacgaattaattaatacaactatgcgaattatagatattgctcttgagtacggttttgattatgaacaatcatatattagagcatttaaaaaatgttttggacatacgcctcttaaaattagatccgataagatttctttgagtttaatacttaaagaaaaaattaattgcaatgatatcttatccataggtaattctattacatataatcctcaatttgtctttaaacaaaaattcaatttgattgggataaagcataagatattaagcaaatctggtgataaaagcgcaaattcatatggtcgagatttcttctataatcataagcataaaattaataatttgataaacccacatgaatactttggttttacagattggggtagtgatgacttcatatattacattccaagtgtccaagtttctgatatagatactatacctgaaggaatgattagtatttctataccagctcataaatatgtagtgttccgttttgttggtttctttcgccctgacgatcttaacggaagacatttaggccgtttattagtccagttatatagaaaatggatttttaagtccggctataaatttgctgccaccttcaggttcgaatatatagacaattcaaggtccaaagacaattactgtgagctatatgtatatcagccaatagaagatctaaaaagagaaaactagactcgtatttactaatttaaattaataaatacgagtctagttttcttagcttctgaatatcatatattaacaatgtaattaacttttataattataggggagcaattttatggtattatttttgttattagtttgtggattttgttggtcgattgtttatgtaaaattaattcatttaggttttagatataaagcttgcggaattccatttattgcattagctcttaattttgcttgggaaagtgtcaattcttatttcgatttaaaagataatatattaaatattacaacttatatcactttaatttggctatgcttagacattttagtcatcttaacttacctattatatgggaagcgctatttcccaaaacatacaaataaagaatacttctggccatggactttgattatatttataatgtcttttgttatccaatatttctttatcatagaatttggtgatttagctaaattctattccgcttttatccaaaacctcataatgtctatatcattcataataatgcttgtcggtagacccgatataaagggacaaagtttaactatagctattaataaatgtattggtaccttagcagctacaatctcatctagcattattttgcatagtggattaatcattactttaggaattttctgttttatatttgatactgcatatatatactttttaagtcatataaaacgattgcattctgattttcttaaatcatccacaaaaatataattcaataaaagataaagcaccattagcggtgtctttatctttcattcaatatatccaaacgattcgaacacattatatttatccaatttatttcttgaaactctttcacaaatttaaccatttcctattcactgctgaataaaaatcatcttgaattcttaatttaaccttaaataaatttatagctttaattctttgaaaacaagatgatatgcagctctggttacgaatatttttatacctattccttattgaacgtatgtaagaaaaatttagcaaacaaataaaaaaacagcactcagatatgtagaaatatctaaaagcactgttttaaattattcacttaaatttttaattaatacttgatttattctttttctatcgcattttaaaattataaattcatacttgtcataatttatcttttctttaggttttggatatgacttcaattgagagtaaatccatccaccaatagtatcaatattttcagcttcaatattagtatctaaaagttcgttgatatctccgattaaaactttaccatcaactacatagctaccattatcagtctctcttatttcctcttctccgtcatcatcaaattcatcttgaatttcaccaacaatttcttctaagatatcttcggtagtcacaagccctgctgtaccaccaaactcatctataattattgccatttgagctttttcctttttgaaagttttaaacaattcactaattgataatgattcgggaacaaatttaatttctctaataattccttctatgttatcattgccttcaaatttaagtttatataagtccttaatatgtatgaatccaattacattatctttactatctctacatacaggatatctagtcagctgttcctctaaagcataatttataatttcatcaaaagtatcttcaataaaaatacatgccatatcagtacgcggtatcataatatcccttactgttttttccgaaaagtcaaatatgttatctacaaaagttaattccgtttggtctattaatccatgtttatagctatcttcaactaaaagctttatttcctcatccgtatgagctgcttcttgctcattaatttgtgaaattccaaatatctttaaaaccaaattagtactatggttaaaagtccacattatcggataagtcaatctataaaaagctataagcggcaaagctgtatacattgcaatattttccgtgtttataattgccaatgatttaggtgccaattctccaagtacaatatgaagaccagttataattgaaaatcctaaaaccactgaaattgaatgcaatgttatttccggcaaattaaatagatttattaaaggtcttaacatctctgcaaatgctggttctccaacccaaccaagtcctaatgacgctaaagttattcctaattgacatgcagataaatacgaattcaaatctttaacaacttttaatgtatgttttgcatttctgttcccttccattgccaatgtttctatccttgattttcttacctttaccattgcaaattctgttgctacaaaaaaaccattcataaatacaagcaaaattacaataataacatttaatattataatcatatattgatagtttccctcccaatttattgtatgtatactactatataatactattttaaatactaattaacattataacatatattgtttaataagttagagtataaacaattaataattcattttattttatattctccattctccaattaattaaaccctactatttttctcactaaaacaaaatctgtatacacttatgaggaatgactttttatctagtttgtccatttaagttcatttttatctactctttatctataccttcaacatctgttttcatagcttcaactatataaatatccaacttctgacttaactttaaaattttattatagtccagcctttcactaattattttatttaattcatcccttaattcttcaatttctttctttttgtccataccgtacctccaataaaatactttttagctatatattgtatttaaagccattaataattacattatataacaaatattgtttactaccaggaaactttcgacttttttcggaagctataaaatgaggtgataagtatgttaaagagaaaaagaagagaattaaatttaactcagtcgaaattggcaaaaaaattaggaatcagcaaaagttatttatctaagttagaaaaacatccctccctttgcaatcctaatattaattttattttaaaattatcgaaagaattaaacctagatcctacagaaatttttttatattttatagaaagcaaaaattcttttattaaataaaaattatataactattatcatatacacttcttacagatcatatctaataaattgcattaacaaaatagagtatattttttttactaaaacacaacataaaactattaattatattaagaacccggaggcttcaaatgaaggtattaaaaaaaataataatttttactactatattaacattatttatcgttacatcattaaatatagtaaaaaataatatatatgcaaacgcacaaattaaatcagaaaaaactataaaaatagtagtacttctctcttcatttaatgatgcttatatttctttgattaaagataacttagaaagaatccaaaaagaaaacgctaacaatctagaatttatatttcttgatgggaagaataatacagacatacaaaacgaacttataacttcaacactttcaacagattttgatcttttattagctaacttagttaatttagatgcaaataatatagactcatttattaacaaagtaaagtcaaaaaatattcctgtacttttattcaatatagttccatttgtaacaacttcaataaaatcctatcccaaagctcttgtaatagctacatcagctgaacaatccggaattctacaaggagatttaatcgttaatgcatggaaaagcaataaagcagctatggataaaaacaaagacaatattcttcaatatattatgttgacagataaaaacaataacacactaactactgcaagaacaatgtattctatatcaacaattaataaatctggaataaaaacagaggaactttccagaatatcttcagaaggaactaaagaagctgctcaaatgattatggagtcgacgtttctaaagtatggtgataaaattgaagctataattgcaaataatgatactttagctataggagccattaatgctttgcaaaaatatggttataatataggtaataaatcaataccagttgttggtgctgatgcaataccagaggctagagaattaattaaaaaaggttctatgctcggtactgttatccaagatccatctgagatggcagaagctctttataaagttggaatgaatttaatttataatagcccacctcttagtaatacgaactataagttcaatgaaaccggctttgtagtagaaatgccttacagagaatataaagaatgaataaatttgaaattattaatacactcattcatatgatattaagagtagccaaatggctactcttaattaagttataaacttattatttttcatctttattgtcagctgtttctgcttcatttaaattcgaattactacttgaagtaagtagtgattcaaatttccttaattcactttttagtttctcattttcctcttgtaacttagaattaatatcattcaattccttaattacttttgcattaccaaatgtaaaatctttgcctagatttaaattctcaagtatattttgttttaattcctcaatatcctctttttttaattctggaaatttagatattaaagtattatcaaacttgtctatttttaatttcagaacattctcaattgtacttgaaattccaaaatcctcatcaatcatatcccaaatttctcgtgcttttgaaatataatctggatgttttgataattcccccttcgatccaggtttattaaatttgttagtaagaatcttctccactggctttaaaattgcttttaacattatatacttccttcaatattattttataacacatattatgaaataccgaccttaaaatccacttttcttatgataatataatataaataatttttagtgagtgttaaattaaaatttcttataaactataccatgacattagtatttattaagaaggtaccaaaaaagatgcggcccaacttagccgcatctatatttatatgagattatgagattattaaggttttatataatttgagacatactcttttgtacacttatatattaacataatccgacaaaatattctattgtttttattatatttttataaatttaatatttaagtataataaataacgattttgcaaaatatatttaatgcattaatctctattcctctaattaacttaattaaagacgcagtcagtattttattggctgcgtttaaaaaattataactgcattaaagcgaggtataaataatgaaaataaaaaacttcttagcaactctcttaatattttttatctttactataagcaatgctaatgcaacgattacaatagcaaatacttacaagcaaggtatatataaaatttctgaaagcagcaaggaaaattatactgcaaaacttataactcctaataacattacaagtttaattgttatagatcctgatggagatataaaattttttaagagattcgatacagtcaatgaaacgattaacttaggtcctatggttaaaggtgatatagtatcaataatcggtaatggagaaatagctgctaattttataagtataagttaaaaccactctctcgagtggttttcttaaattattttagcattccaaaatctttaaaaggataaaatataaactgagcctttccttctattttagagctgtctatatagtgttctttccaataccttgcatctaatgatacaggtctgttatctcctaagaaaaaatactttccttgtggtacttcgaacgatccattataatcatccttatttttcacataatcttcttccaatttttctccatttacaaatactatcccattttttatatctatcttatctcctggcaaacctattaatctctttactaaagtttctttaagttcatctgaataaaatacaattacgtttcctctttttagattatcaaagttatgtattcttgttactaaaattttatcatttaaatttatagttggaatcattgatcctgttggcacatatacattaaaaaatacaaactgtcttagtaaaaacgctattactaaagcacaaaatattggtattatccaatctttaataaaattacttttcttcttacctttttcttctattttagtactttcttccaaagcatatcatccttcctagattataattaatatttctgcttttactatatatatacagattaatttagtaaccatttatttaacttaccaataaaataagaattagtcaagtttacttacgttatattaatcatcataaaagaaaatataaggtactattctaaacaatatatattctttagaatttgtaaccttataaaaaatataatttctatatcatattcctatcttcaacttaaaatcaaaatatcacttaattacagtcacttacctctcatgaatattactgttcaatgaattttgttagctcttcattaaatttttctttttcatcgtagaataatccatgtccactatcagtgaatggtataattctggaattcttaatgatttgcttttgagctttagccaaagcaaataaacaaacttggtcatgaataccatgaagaatcaatgtctgaacattaatttttccaagatccgaaaacaaactttcttcacctaaccaagtattagcaacttctgctgtagcccaacctgctgcctgcaatccaagctgaaagaaccaatttgaaaaactctctgtaatatgcttatagaaaaaaatatctccaaaatcttgaagcattttaggccgatcattatatgttcctttaattatatcaataacagcttgtttctgtaacccatgaggaaaataagatctttgaacaaggcttggtgctgctgctgcacaaagaactaacttagaaactttgtcattatcatatcttgacatatatctaatagcgattgctccacctgtagaatgacctaacaatgtaaagttttttaaattaagcacttccacaactcttctaacatcatctgctaatctatcgtagtcataccccctgcatggtttatctgattcgccaaaccctctttgatctatcccaatacacctatatcccattttaggaaggatattaaactggtattcaaataatttatgacttcctggccaaccatgtaaaaatacaattgtatttcttccttcttcattaagatcttctacataaactttaacatctggttctactttaatatagtaacccatgaaaattgcctccatcaataaactttctttctaaaaacagcttattcttttacaacaaataggtgaattactactattaagtttctaaaactaatattaacatgcaatttgattaaaatagatatttatgatttatttatatgtgtatttctcctatatcgcttacgccttctataaaagcctctccatcattctttctcactatttcaatgaaagctgccgaaatctcaggatcaaattgtgtcccgctgcatttttcaagttcctctgcagcttcctcataagtttttctagtattatatggtctatttgatgtcattgcatcaaaactatccacaactgtcagaattcttgctagataaggtatttctttgccctttagtttattaggatatccgtttccatcatacctttcatgatggcttatgattaaaggtatgatatctttaagtgaatctacagattttataatttcaactccattagcaggatgttgctttaataattcccattcttcatctgttaatctcatttttttcattaacacttctttattgatgttaatcttgccaatatcatgcatgtaagcgccataaattaaaatttctttttctcttttgcttaatttgagtttatcagcaatcattctactatacactacaactctttctacatgaccataagtatatctatctttagcattaataacactaatcaaggtttttatcgaagcgacaagttcaatatctttttcatctatattttttttgatttcatctagaattgatgtatatgcttcgaccctattcttattgaaaaattttgctctgtatagtgcatcatctgcgctttttattaattctatatcatttctcgctttatatggataaactgatacacctattgaaactgtaactttccccttaggctgactttcttccccataaaaacgtgtacactctattttttttcttaaattttctgccacttgaattgcttcttcctcatttacaccaggcagtattattgagaattcttcacccccatatcttgctgcaatatcttcttctcctatgttacttttaataatttcaccaatttttctaaggacgtaatcacctttttgatggccatgagtatcattatattgcttaaaataatctatatctataaaaatcatggatacaggtttgctattcctatctccattcttaactttctctgctaacgagtcacagaaatatctatgattataaagttcagtaagtccatcaatatttattaactcttctaactttttaatatgttctgcttctatctttacatagaatcccaatggccatgcagtcaaaataaatacccctgccaggattaaatcattttcaaaatatgtatttactattacattaggttccataaatatatccatagctaaaataattagagatgaaatacaggaaactataataccttgtttcattccatattgaattgttgttgttattattataaacaaatacaaaaatttatattggctttcatttactccacatataaatataattatcgaaaacactattataaaaactgctatttcgattttattgataatatctacatatcttttattaaatctatatttagtcgaaaaaatccatattaaataaatcaaaacagataccattaatggtatgaataaacatattactg

SEQ ID NO: 48 - DNA, 42650 bp, Clostridium beijerinckii
tattctatttagtttcgtcaacttaattataatggataatttatgtattgaggagatgcttttgcatctcctttattatttatatagtattctttattatctttgcctactaaaattatactctaacaccgatacgatttaaaaataatcataagattataaacataaaaatatcatgtaaaatttatatggtataataatacttatcgtgaattataatgcaattaatcatacttttgttataaacaatttagctttaattatagaaaaaagtagcttaataatgtactaaaataaagaacatagtagaaacatataaaatatattaaatctaataaatattttcaggaatatgagttcattaatctaaaaacattaatatggggtggcagtatgttaaaaaatatatcaataaaattaaaggaggtaaattttgtagctctaacgggcatcattattatttcaattatactattaataaattttgtaaaggttctaaaatatagttattttgaacttattgatgatgataaatatataaacttatcaaacaatgtagaatacttcatccctaaagataatcaatatgcagaaataaaccaagtagcagataatagttatattaaatttgaaaaaaacaattctaaaaatatctactttcctgaagatgttcaaaaagtctggcttaaactaagattacaaggtaaacaagctagcactgataatataatgtacattgattgtgaattcattgaaaatattcaattttatattccaactactgatggcaagtatgtaactaaaaagcctaatgaatactttatttttccatatattaatctacctgaaaatattgattttaatagagatatctatataaattcaacttgggattcaaatgtatttaatttacttctagcaaaagacagtaacttttatattattcaaaacttgttagcatgtttttatatcggtaatttgggtgtactcctaggaatgcttattatgaatatgattctattcttttcatcaaaagataagaagtatttatttcattcactttttacaggatcactgctttcactactatattgcttatctggaatgcaaaagttaattctaggatttaatagtaataacaggcttatagcattagctgcaatggccgcttcaacctgggttttatttatctattcatacttagatataaaaaataacatgcccatattaaataatttttttaaactttcaatactttttctcgtactttctctatatatatctgaaattattcctgacggatttacttatgatattttatatttgcagatgatcctagtagggttatatattcttatttcaatatattcttattttaaatttggtatgggatctatatattacttggttggcatatttatactatttactggctttatcatatatattttaggttcttacggtttactagaatggaatatttttgcttttagtacatgctatcctgctgcctccattgaaacattattatttaccatcggaattataaaacaaataaaacatgaaaaagaagttaatactaagcttcaattagaagttataacagataaacttacaaatatatataataggcgctattttgaagaaacagttgtaaataaaattcttcaactcgaaaaagaaaagagtcttgtatcaatgttggttcttgatattgatcactttaaaaaagttaatgatacctatggacatagtactggggacctagtcttatctgaaacagctatgattattaaacagtgccttagaaaagaagacattcttgttagatggggtggagaagaatttgttgcagtactccccttcacagattcaaaagaaagtactataattgctgaaacaataagattatccatagaaaatcataaattcaaatttgtaaataaaataactgttagcataggcatagccgaaaaagatgtagttgaggattttcatagctggtttaggcgtgctgacaatgccttatataatgcaaaagagaatggtagaaatactgtttgcatttgttatacaaatgaaataagaaataattcctaacatcaaaattactacgaaactataatcatatttagagtttaaacattcatcacgtctagactcttttattttgttttatttttagcttcatattctggccataccctttttccccattcattaatgattgctaatgcgggaagtaaatcattacagtcatcagtcaaagaatattctacatgcggtggaatcttattatattctgttctttttataagtccatgttcttctaatgcttgcagagatcgagtcagcataatattagttataccaggtatgcttcttttaagttcattatacctaatgctctttgaacctgatatctcccatataataggtagcctccacttacctcctataatttcaagtgcgtgaagaacaggacatgctttagaatacttgtttttcgttttttctgtttcacctttcataagtaatcccccttaaaactaaggcacaaaaatgtgcgtacttgttattatgtttcctattaaattataatattaacataccagacaaatggtaatatgtaaataagtcaaaatgggagtgtggatattttgaaaaagttattctcagaatttagtattaaaaatatagaaataaaaaaccgcatatgcgtacctccaatggttgtaggtttagccaaagatggatatgtaacagcagaaaatttagaccgttataaggaattagctaaaggcggtccaggacttataatacaagaagctacatgtattaataaagatggaagattatcagaaaagcaaattggaatttgggaagataaccaaattgaaggattaaaaaacatagttaatgcagttcatgaagaaggatgtaaaatatttattcaaattcatcatgctggagttacaggaatctctaaatctcctctatgtccaagtccatatgaatataaaggttttgccggaacagttattggacgtgaaatgactaaagaagatatagaatcaatacaaaaagactatattgaagctgtaagaagatcttacgaagctggatatgatggcgttgagctacacggatgtcatggttatttaataagtcaatttttaaataagaatgttaataaaagaactgatgaatatggcactaacccagaaagatttgtactagaaatactagaaggaattagaaaagtaactccagaagaatttgttgtaggaattcgtctaggcggatttgaaccatcaatagaagatggagtaagttatgctaaaatattagataagagtggaatagattttcttgatatttcttatggattctttaatgaacaagaaattaatgtaaacaaagattataagtattccaatgctgtttatgctgctgagaagatcaagcaagaagtatcaattccagtatttgcagttaatggaattaactcagccgaaattgcagaagaaatattagatgaaacaaatgtagatatcgttgatattggtaaagggattcttataaatcctaattgggcaaaccatgctatggatggaaaagatactggaaaatgtttaaattgtgcaaagtgcatgtggtttggtcaatccgaagtgtgtcctggaaaagttatattcgataagaataataaataaaatgttttctaaactgtaaatttaattacagtaaaaaagatacaatgcttatgtattatatgcattgtatctttttcgctactttttgtttttaattattttaatgctgaaattacttcttcgcttgttctaatacttccaatcctaggaagtgaaagttctctatttacgattccattttacaaatctataagaactaatgcagttttttctatattaataaatttattttccactgacttgaagttttccatttcttatccccttttcatacttctccattctatgattattatttatattaagtttattatacactttaaaatatactagcactgcattaattaataacaatgcactcgttacaaaaaatacgcattttattcctaaatatcctgcgatttgtcctcctagaactgatcctgcaaatacacctagatatcctgctgccatactaaaaccaaatactctacctgtaagagcggatggtgtaattttcttaaccaatatattaacagaagggttaagaccaccaactgtgagtcctagtaaaaatctaagtcccataagttcccaagtgttcgttacaaatgcttgaggtatgaatattattccagctattactagacatattagcataactttatgtgctcctattttatcagagagccttccaagccttggagctgcaattatattagcaaaacctgatgcagaaaaagttattcccgctattaatgcaatatgactcgcttccttagatagttgagtaacataaactgttactattggctctaccgaatacattgctacagataatataaaaaaagttataaataaagtaatggttaatcctttttctggaactgtattccaaacttctttgaaacttaaaactttattatcttcacgactaaaagattcccttacaaataatactgtagtaataaatgcaatgagcataagcccgcctgttataaaaaatacattttgcaaaccaaaagtctctcctacaaatcctccaattgtaggtccaagtaaggaacctgcaatatttgctgttgaaatagttcctagagcatatcctgcatgttctttatctgtttgagttgcaattaaggtagtacaggctgtgctatatcctgtgatagctccttgtaataacctaagagctactaatacatatacattaggtgcaaatcccatgcagcttataactatagccataccaagacttgctctaagcaacattggttttcgcccaaatttgtcagcagcatgtccccaaatgggtgaaaaaatagctgagataataaacgtactaccaaaagcaattccagaaagcctctctatcgaagccgaatcctgaattcctaaatgctgtatatatagtggtaatactggtgctatctgactcatgcctattcctgtcacgaacattccgaaccaacaaacttttaaatttcttttccacatttccataataaatttattccttcttactaattagttttgttattccaatacaataacttgtatattgtcttctaaatataagaataaactataaaatataatttgtaaactacatcttatagtttaataattatttccaatttgataaaaataacctatcatgttaaactatctttattaatcagaattataagaggtgataaaatggttcagaaacgaaatttaactaaggaaaaaattattgaatcttcttttttactagctgatgaaattggacttaatcaaattactttccaaaagattgcagaaaaactggatataaaatatccgtctttatataatcattttgccaacattgaagagcttaaaataaaaatgaccatatactttttaaataacttaaattcaactttaatggagcgactaatcgggaaaagtggagagactgcaataagagaatttgcttatgtatatcgagattttgcatttgaaaacaagagtggctataagctttacgtgaatatcccaagtactgaaagtgatgaagttaagcgcttagctagtgaaagtaatgcaataatacgtaaaattttagacttttatagcagtgataaaatatttataattcataaaagcagggctttaagaagtctattacatggattcgtttccttaagctctcacggatattttcaaaatccagtcaatttagaagacagctttaaattaatgatagatgactttattttatcaatatcagaaaaataactaagaaacttttaaatcttaattcaaaatgttaactacatatctatgttccaaatagtgagttctatgttaaattattattttacaaaaactagcagcatatcaaaatgtaaattttgctgtgctgctagtttttatattatcgcatctaattatttcctctatacattaaactttccaactatttgttctaatttatctgcaatattcttaagctctattacagaatgtgatatcttttccatagaattagattgctctgaaacagttgctgaaacttcttcaattgaagctgctgactgctctgctacagctgaaatttcttgaatgctgcttattgctgaatctttattttcatctatagactttatattagaagttaactcttctatattttctatagtatcatcaaatgtactatttataagttggaatgtattaatagcttctttagtagttttgcttacttctgtcattatgtttttttcttcatccatgcttttcttagctgcatttatctctcttataatttcatttacaatgcattctatttccttagtggaatttgaagtctgttctgaaagttttcgtatctcatctgctacaaccgcaaatcccttacctgcttcccctgcttttgccgcctcaattgctgcatttaatgcaagaagattagtttgttctgaaatcgcttgaattgtatttattattttgcctgcagatcctgatttattagataataagtctatatttctaattactttttccaaagcttcattattagcattgatattatccataagatcccttgaagcactaataccatcttcgctaatatgctgcgatttttttgaaaactttgttactaaatctgcattatttgatgagacatctattttctctccaagatgcaataatttttcagaagtaagttctgtattccttgcttggtctaatgcgccaactgaaagctgatccaccgttgcagaaataccttgaattccctgaagcgtttcattagttgaaactgcaattccttctgaatgatcaagtaactcttttgatttttctttaagaacttcaatagtttcccttaactcttttcttagcgatgttacagctctagcaataattccaatttcatctttactttgaagtaatttctcgaattcatcttctttcttcatttctaaatctaggctagtagttttatttattaaattagttaccaatgaaatcggtcttgatattttacttgcaaaatataaagcaaccatagaaaaaataaccattaaaaatacaaacatggcaataaaactgataattaaaccggttagcggttttaaaaattcagcatttggaactgcaatacccattgtccattttgaagaagtaataggagctgttgcaaaatatttatttattccatcataatcttttagctttacaatattagattcagaactatcctttccaaccatgctacttaaacttccacctaatacatctctaatattctttagcttatctgcacttgattgaaaatctttatttggatgaatcacaaattcatctttttcatctaataagaatccataactgttatttataggttgtgccttctgaacctcgttagagatactttccatatttatgtcagtacctaaaacgcctatgactgctccatcttttttaactgattttgcaactgtaacgactaacttcttagtttcaaaatctatgtatggatcagaataaattactgagtcactttttaaagcatctttataccaatctctctctgtacaattaaagtcattatcaggtatccatccatcttcatcaacaaaacttttatcttcaaaaccaaaatatatatccataatatcggtatttgactctgctttaactttcatatatttcaaaaggtttatcccatcataattattgttaaattcgatgttctccgctgtttgattaacaaagtttccttgagtagccatccaattgtctatagtttctgcatatttttcagatagtgcccctagtttatcctttgattcaaccacagtagttttataaaaaagataataacttatcgtcgaagaacataataaactaaaaaaacaaactgctacgaccaatagaataacttttgtcttaatgtttttcattttaattcacttcctgtttgattttaaaatttgtataacaatgttaaatataaatattccttataaccaatatattatatgtattgatttcttcatccttagtaacatgcaaaaatgccattaacttaagttacgcttcttatatagttaatatatttcatataattcgccttctttctacaaaactgttttaattctaatatatattctagagtatactcaaagtcaatgtatagcttttacatatttggattttacaataatttttcttttataaaataatcctttatttattgttttataaaatcacaaaaccaagagtaaaaatctccatgttcacagagatctatactcttggttcttattaggtttataattagaaatattcattttacttaggtttaatagttgtttgaataataaataatttcttattatttagctaactactttgattaattaaataaaatgggtaattctataacaactttagcccctccaagtttttctgattttccaagtgaaatattcccgttgtgtttttccataaatttttttgcaatatataaacccataccataatgatttttggaatttctactcttgtcgccttggaaaaactgctctgtagctaactgtaattcctcttctgtaaatcctcttcctgaatcttcaatggtgaatcttatattatcattatctgaatcaaccccaaatgctattttcccattttcggagcaatattcaaccgcgttcgaaataacattgcttaaagctcgctttaaagccagttcatctcctataataacttctggaatatgtttaatttcatttctaaactctacttttttatttatacctatggaaattccttgttcaattatatcctgtataaattcttctaactttattttctttttttctaatattgattctttctcagttttcataatttctattaatgatttaatataatcttctatatttttaacctcgtttattatactatcgttaaattcggcttgatctgcttttaaattaagttcacttaaaagctcagagtttcccttaataattgttaatggtgtctttatatcatgagccaatgctgctatttgctctttacgtgcttcttccatcttccattgtttacttagagaatcattcaactctgtcttcattttaccgagcgcagaaatgacttcattgatttctaatatatttgaatacttcacctcaaattctaagttttccatctgtatattttctgtagtctcttttaaaacatgtagttctttcgatattcttcttctaaaacacctagatagaattataatttcaatgctaaacaaaataaaatatataaaaacaaaactaagctcagcattttgaacatactttttcaaaacagggctaacaaaacttgcccctatggtgtattcaactacacagattccattctccctagaaataaatttataataatattttcctttacttctcttatcactttgtacaagattccaaatatctgttgctttagcttctgatacattgctataaaatacatttccaatagaatcataaactatataattacactcatccggtataaagtcttttactttaacaccctctgcttttgctatttcttctctttgtttttcaattttctgctcatagtagtttgctggtaaaataaacccactattcaaaccaatttgaaatagaataaaatcaaatatagctaaaagaattgtaactatacaaaagaacattatatatattgcgaaaatcttagaaatgcttttttgcttcttcactctttccatttatatcctatcccccaaacagtttctatagggtttattcctaccttcttaaacttatttcttatatttttaatatgctccacaatcgctgtagtatcgctatttccatcaaaaccaaatacactttcatatattctctccttggaaaatacctgcccatgatttagagcaagatactcgcatatattatactcactttttgtaaaaggtactaattcttcattataataagcctcttttgcagttatattaaattttatatcagaaatagaaaaagcattttgtttttccctatgttcacgtcttaaatgtgcagctacccttgcccgaagctcacctataccaaaaggctttgatatataatcatctccaccaatacttaatcccattacaatatcttgttccatagtttttgctgtcaaaaatataattggacaatcaaccagactacgtatctctttgcacagagaaaatccatctatttctggcatcattacgtcaagtaaaattaaatcgtattttacatactgatcctttgatatatccgtaggattagaaactatagttacattatgtccttctctttctaaggcaccttttataacctttaatatgccttgctcatcatctatcgctagaatatatgccatttccatccctcctacatctattatacccaatattaccagctgatctttattattctataaattattactacttctctcctctaccttcaaaaaagttaaaccaaactccaagataaatcccaaagacaattgtaaataaaacacaatctctaaatccaatggcgctattactaaatacagtattaatatcagccagtttattaaaattatctgcagaattagaggcttttataaagaaattatcacaaaacttaactgaccatccacaaggtatccattgccatattccatctccaagtcctgtaatcagcaaagccgctaataagctttcaagtatgcccattcctatcgatgctccacttcctattttaatactcaaccataggtgaaataaataaaagaagatttgagctccaaatataataaaaattatatttaagtaaaaatttactggtagagtattttgccttaaaataaattgaaatccagcaaaaaaaatgccaaccgctaaactaagcgaaaataaacctgtaagaagtagaattaatattttactcacaagacacattccttttccatattctatagatagcatttctttaaattttccggccataacctcctgttctataaccatagaacatacaattccgattaccacaggaaatgttaatgatactacttctaaatatccatttattttgtttacagaattccaagttgaaaatgaataatattccaaaaatattattgctcctataattggtaaataaatatgaatccaataaaagtgtgtgtgcttcatttttataaagtctgccttcaataagcgaagaattttcattatattactttgcctcctgtctatcataccatttagctgttaaataagttatcaatataaataaaactattgaaattccgataccaagaggtatcccccaactcttaagtaattctggtgtaaaagtttgactttcgggtttagctattaagccatttggtagtaatttcaaaattggacacattagtctagatgtatacgaaaaaggatttatccaccaaaaatcctttactgccataactatagaaaacatattaacagctaggcttaatacaatagttggaaataatcctattttatttcccagaaaaaaatataacggaacctgccacattgaagttataatgatcactaaagttccgactaaaccacttaacatcgaaatatgtgatatgctatccattttaataaagaacacacttaactctccagctataaaaataactatacaagaaatagctatattctttactcccaccaatattttagcaatccatattttatctaaatctactggaagtgatataaccgctttatttttcatagagccatcagtttttgataaaaggcaactgcctagtgatatagctccaggaagtattaatgtataccaccaattataaatatcaacctgaaaataatttgatgctaaaaatcccgaaagaagaattaccataattggtgctatccatactaatttctttacaaacgtatgatttatcttcatattttctgaaataaaatatttaagcatcattatttctccctcctatatttttttgcaatatctatgaataatttttctaaatcttcacctttttttaattctccttgatatcctaaaatacctccagatataattccaatatgatcagcgatctgttctacttcacttaacatatgacttgataatattactgtaatgcctttctttggaaaagatcgtattaactctcttaattcttgtattccaaatggatcaagtccattagttggctcatctaaaattaaaagcttaggattattaagtagtgcaatagcaatccccaatctctgcttcatccccatagaaaattgtcctgctctctttttacctgtaccttcaagctctactacatgaagaacttcttcaattcttgaatctggcaatccaagtactgtagtacgaacctttaaattctcttttgccgtcaaattctcatataaaggcgctgattctattaatgacccaatttcgcgtaaatcctttctactccatttatgtccatcaaataagatttctcctgaatttgctctaagcattcccgtaaccatctttaatagtgttgactttcctgctccatttggaccaagcaacccatatattgaattctttttaactaatactgaaatatctttaactgcttcttgctttttaaagtttttacataagttttttgtttctaaaataaattcgttcatcttcactcctcctcttataattaaataataagccttaattataaggaatttataaggaactgaaatttaagaaacttacttgtatttaaaaataaaaaatccctcagtaacgctttcgtacggcattactgaaggtataatttctttagtcttcaatttaacatatataatattttataaatatatatgtcgcaattcacaatgcacaattcacaattacagctaaaattcttacaatatttttagaattatgataaagaattatttttgcaatatatatatttttttctgaataataaattattgttctttatgctattttatcattattattataactatctctaagttttaagtaataggtagccactgtgacgttcatataaggaaccacccataatagccctatacatagtggaatcattccaagtattatccaccctaaaaaacttaaagtaaggacgaagtactcaaatttatgacctttcataatagctgaactctcttttaaacattgaattattgacttattattatcagcagctaaaataaaaaatgattgtgaaaacatatatataaatataatgcctggaactatcaataaaaataatcctatagtaacaattatagtcaataaaatatataggcctacagctttatgaattattgaaaatcctgaaaatatatctgtaaatttagggttactatctctttcagcatagtttagagaaaatctgcatatgccaactcctattgctacactaacaaatattgttactaaaaatactattaaactcaaaccaaaactttctctaacaactcttaaaattaaattaaaaataattggaattagaaatccagcaacaaaaattcctccaatagccagtccccacctcccttttagttgatctttggcaaatctcttcaggtctgctctagtattcataaaaattcctccttaaattgaaatacctttgatatttatgcagggagatttaacattatgctatatttatattttaatttacagtaatcgcatgaatttataaatatacattaatcttttgtatattttatatactttttgtaaaagttttcattcgagtaatccataatttcaacataattatatatcttgcaattaacttctatattaatatttcataattaaggatatatcacacaatttgtattagatattagttataaaactgcaaataaaaaggctattataaaataaattcttagaacaacataaatagtctttaataaaaaaacagtacttatattgttctatcttttattctaaaacagccacttttattttatattacagccttataatacagctaaaatttcatcatctttctgaatataaagctttatcttactaattcttttttcctttacttcttctattttaaagatcaagttttcatattctatctcttgttcatctgtattactaggaatacgttcaagaatttcaataataaaaccactcatagtatcataattctcacttttaatatctgtatcgaagtaattattaaaatcattaattgaaagcatacctgatatcataaaagtatcattatctatttcttctattgatggctcatcctcatcatattcatcatctatatttcccatgacttcttctattaaatcctcaatagaaactatacctgaaaatcccccatactcatctactaatacagcaatatgctttttagtactttgaagctccttaaataacctatcaatatttctattttctggaacaaaataaggtggatgcaatatgcttcttatatccacattttcaaatccatattttcttgcttcactaaagaaatccttcatataaagaataccaattatattatcagtatcatcttcgtaaacaggaactcttgaatatctttcatcaatcaattcatccaaatattccattaatggatcttctatattaatcatatatacttctgttctcggtgtcattacttcacatgctaatttatcatcaaactcaaatatgctatttatcatttctgtttcagtcttatttatgactccatgttctagtccagcttctacataagatttgatttcctcttttgatactttttcacctaaatcctctttatcgagcccaatcagtttaactaatatattagttgatgctgaaagcaaccttacaaatggaactgcaattttagctataatcactaatggttttatacagaacattgcaatagcttctgattttttaagcgctattctttttggaaaaagttctccaaataccaatgtgatataagataatacaattgttactaatgccaatgcaacttgtccactataaggaacattaagtccctttaaataaagagctacatcctttgatagtcctgttgctgctgaagcactactaaaaaatcctgcaagagttattcctacctgtacagtcgataaaaaattagtaggctcttccataagtttcaataaaagcttggccttcttatttccttcttcctcaagaagctttattttatttttatttaatgatactatagacatttctgctgatgcgaaaaatgcattgatcaaagtcaatatgactattaaaattaattgtgacgtgatactcgtctgttccgggtctaaatccataaaaatatttcctccaacataaatttttttttaatataatcatatcacaagaaatatttaaagtaaaatttcaattaattcaaatattccttatttacatataatattaagtgttatagcaatttgattcactaatatttaaattttataaaatattatattaatactgggagttgcatatgcattaattaacttatttccttatataaatcttttactatattctctttcattaatactgaactcaagtcctgttacttcttagtatttatacgatacatttatattcttatttgttggtgaaataaattttactgactattaccataaagatgacaagttaggataattgactttttaattgttctttatccattgtatactttaatcttttaatttcattaccatgatctaacacaattatttcaggcacatttctaacattatattttcctataagatttttctttgtggctatatttacttctttaatcctataacaatcaactaattccctatttacctcttctatcagtgttctaaatcttaagttttcattaactaaagcatctaaaaatagtaataatactcttttttcactttttagaatactttcattaaagtcatttaattcttcaatgtaacgctcagctgccacagccgcagttgctccatcaccagcagcagaaacaacctgtcttaaatatttaactctattatctcctattgcataaactccttcaaagctagtttccataagttcatttgcagatatataccctcttgaatcaacttcaagaccgctattttttagaaaattagttgatggtaccatacctacaaagaaaaatacaccttggcagtttacctcttctatatttccagtctttaagttcttaatttttacgccttctacattttcattcccaaggacttcctctatggttgaattccagataaactccattttttcattattgaaggccctttcgctacttactttattacaatcgagaatcccttcatcatgaagcactatgacagtcactttacttgcaaactttgtgatgtacattccttcctcaatggcctgatcaccacttccaactactacaacatgttctccttcaaaaaactctgcatcacaagttgcgcagtatgctactccattgccttggagtctcttttccccagggatgtttaataatctaggctcactgccacaagctataatcacagctttagctaagaattgctttccttttttagtggtaacaagtttttctcttaaggacaaatcagcatctactacttcatctcttagaaactcaactccaaagctctctgcatgtttcttaaagtttttcataagttctggtccgctgatttgttcataaccaggataattaactatttcccttgttgtatttacgagacctccaactactcctttattaattaccagagttttaagtttagctcttccaccataaattgctgctgaaagtcctgcaggtccgccacctatgataatcaaatcgtagaaattagtcatatcgtccatacttttaatcactcctcaaaaacttcaacaattttttcttcaactgcatcttcttccacatgaccggctaattttccttggtactcaccatctttaaaaaacagaatttgaggaacaccttttaaagaaaatctctgaaataaattcttttgttcttcaacgtcaacataataaaaattatacttaccatcgtattttgattttaaatcttctaaaattggtactacaccttgacatacactacagctttctctagaaaaaatcactaggctggattcagcgttgtcatatataatttcatcaaattcattagaatctaaatgttgtaaagacatactattcactcctctataattattttaaaaccgcaattttaagagactataatgccagacaccttataatcaatttattaaataaattcattataataataagcaaaacttctatgcgcttattatttagttttccttataaattttctgcctattttaaaaagcagctatcagaattcttactttccgatagcactaattttttattaaaacagatgaacttgttattttttcggatattcctaaatatcttctgagaatatttgataaattggggctccttcacactgtgccgggtaacgtaaacctaataatacagaaactgaaggcgcaacatccacttgccttataatacgttcagttgtaaatccattctttatcccagaacctgctgctacaaagattggtgatactgatgtatcaaaatatccttcggaagttgaaaggctgtctccatgaagtctattatatttttcttcaatagaaaagaatatatctccacattctggtccatgagtaccaattaaaacagcatctttatttctaaggcatatgcccacaactcttttaccagttttatcatctctgtaattatacaagtcagagattatttgttcttctaaatcatatttatctttaggatctacaataccatatttatcacggccttttagattaatataaatataattactacgaatctgaacagctcttgttttatcccaatctacttctcttgttgaattaccatctttatcttttttcaaaactgtatacccaagctcttccatgacttttgtatttaatccgccatattcacctaaaattggaggtacattttctccaaccataagcccatgatcacttacaagtaatacagtccatccttcatctaatagatgcaggaattcaccaatataatcgtctgtttgtatatagaatttttcaataaattcctgatatactttttcatcagtgtaatcccatggctcaagcgtcttagcaagatgccataattgatgtcctgcacaatcaatattatgaagatgagagaatactacatcatattttttctccttaatgcaataattaagacaatccgcctgccacttatcgtaaattgcccaggatggttcaaagatttctcttactagttcatcatcttctccaccgattaagctaacaggcggaacatgtccaacattctcggtaatatctttatataaagatttttgatgccataattgatcatttgagatatcaagagcattactaatccagactctaactttattgccttgtggatgaagttctaaaatcttcattgaacggcatgcaggctttgtcacttctttttttgtaacatcgtctattatacctgttaccatcttatctttctctaaaatgacgattggttcatctgctttcttatttttataaattgctactttatcatattcaccagcttcatttttaagaattaaggctggacgcctagttacaccgcttgaagttattatagtgaattcttttgctccttctggcgcgtttttccaaccttttgcatctttaagtggagaatttacaatatcataagctactttacttccaataacaatttctgtatcattatcatccataacataggtacgaatttcaccaccttgacgagctgtatctccccaccaaagttccatcatttcgtcatcaacttcatcgtctaaagtgccttctaaatctgtaattatgcaaccaacacctgctggcttttcaactcttggtgcataacgaacctcttcgatttcaggcgaagcaacaataactttttcccaatcaagttgtgcaactcccatattaacagatcctggctgagttccatctacaacactcaagttttcactgtgagaagttggcggccaagaactgcctggccaatgccaaactaatgtttttaaatcagcttctgatgtaatattccaaatctgttcagcagtgcagttacgcgaatccatattataaacaactgcatcaagactttcaatagattgtctccaataacaagtaattccatgtgttcctggataagcacctgtagcaagtgttgtccaacaaggcggtgtaattgttgggattgcaccaatttgtcttaaatcatttctagctgaaccacgttcaatcagcttttttaaatttggcatttttccttcttttataaatttttgactcactcttggatccatgccatctacgcccaaaaccaataatttttgagtaagtgctgctcttttcataatatttatctcccttcaacaattctgtcgttaatgtacctccaccaagaaaacaatcaacaaaaaaatttctattactcttaatattgatacttatttttgtgaatagatcgtctgctttctttgatatagcgtataatctcttaaacttcattttctaagtcatttccttgaatcaattctattaacgagtctctaagctctccaaattcttctgaagatctgatttttttaaagctattgtcatcatattgttgaagtggatttttaaaatcactcacaattcttcccggattagcattcattacaataatccgggttgataaaagaatcgcctcttccacatcatgagtaataaataaaaagcatttattagtttctttccatatcttctttagatgtttttgcatagcttctctcgttaaagcatctaatgcactaaaaggttcatcaagcagaactacttttgaatctgctgctaatgttcttgcaattgctgcacgctgcttcatacctccagacaattgatgaggaagcagctttctagctttatctaaaccaactaagttaacataatgatttacaatttctgctctctcttttttaggaatcttcttcatcttaagtccaaattcaatattcttttcaacacttaaccaaggaaagatgttaggctgctgaaaaacaactcctacatctggatttggcttagtgtgcggtgctccatttataagtacttgccctgatatatctgcattatatccagcaatagcatttagtaatgaagttttcccgcatccagatgggccaagaacacaaacaaaatcatcatcaaataatttaagttcaatgtcatttaagacattcgaatactcttttccatttttatatattaaattaacattctttaattcaacagaacaatttgcttttctctcttctggtctatttatttcaactaacgattccatattatatctcctctattaattatataaatcgtttcttaccgccttcttgaaagtttcaatatctggtgaagtagtaactgctttttgagttaacaagaaatcacttgtatcctttaaaatttgtggtagtgtcccttgattgtctgctgttcctatatattttgcctgctcagacttatctaaaacagaaatttgattcatggcttgctttgtatcctcagcgcttaatccaagttctgctgataatgtttttactacatcatctgattgagtcttatatgacttagtagcttcatctaatatatcaatatatgccttaactacatctggatacttagctgcaaaatcattatttacaataccaaattcaccagtaacagctccgcctttagcaacatcttcagatgaaagtattacttttccaccatctgaaactagctttgattgtgctggctgccaaatataagctccatcaatttcccctctactccatgccgctataatgtcttgtgcactcatatctaaaatagttacatcattttctgaaatattattttgtttcaatgcagcaagtaagctatagtgtgaagttgaaccaaatggagttgcaatctttttaccctttacatctgctattgaattgattccagatgtattttttgcaacaagtgcctcacttgaaccgattatatcatgtaaataataaattttataaggaaggtcattaacaattccagttgttcctggaggtgtaccaatggttgcaatatctatagatccactagccattgcagcatttacatcacgcccaacatcaaattgaacatacttaattgaaattcccgggaattttttttcaagtaacttttcaccttttgcaagaagttctccatttggagactgaaaatatcccaaacgtatttcttttggcagtgctgaatctgaagcttgagtattccctgttgtactagctgtttttgctcctgagcagcctgttattaaaataccaacggataaaatagctgacagaagtactgtatattttttaattttcataaataacactcctttaaatatctctatgtacctgcttgtacattgattgattttattaataatctactattactcaatataaagaattttctatttttttatttttctagccatggtgaagccttcctgatcaaaaatctcacaaaagaatctaatataattgctataattcccataattataactccagcatagacaatatcgtttctaagatatttacttgcatccaataccatccagcctattcctgatacagctgcaaccatttctgccgcaactaaagttgcataagcaacaccgatagctgttctaaggctagttaatatatctggtaaacatgatctaaaaataacactgataaaaagatttactccgctggcacctaatgatttagcgccattaattctatctagtggtaccttttgaacactaaatatgactccgattaataaaggtgcaaatgcatttaaaaataataagataatttttgattcatctccaattccaaaccaaagcacaattaatgtataatatgctagtggtggaagcggacgataaaattcaataaatgggtctagaattgctcttacaatccttgagctacctgcaataagtcctaaaggaacaccaattattattgcaaaaaatatagcaataaaaagtctctccatacttattgaaatatgagataacaagctttctcctttataaccttgctgaactaattcaataaatgcctgccatactttttgaggcgatggaagaaatacttgattaatcaagcctttacttgtggcaatttcccatacaaaaaagaacatgattacagaagtaaaagaaatgccaatataaaaaatttcacctctttttcttttcactattttcgtagctgtgtcttgattattcatataggttaatttccctcccccatttctttttacatctattttttaaattcttatttttcatacacatcccccttctttacttttcctatagaattactatgatttaattttaaatatatcttactagaccatccaagtattgtcaacaaaaaatactataaaacatatcgaaaaagtaagatttatttttctaaggaatatatggtaacttacaatatgtttatatattaatataaatccttataatattacgccgttcaacaagttcaattattgaacaatgtaatactatcactgttcaatgttcaacgcaataagttcatgtatttttttcactattggattccaaattacgttttatcataaaaacaaaaaatgcttaaagcctctattttgctttaagcattttataacttacttttttcacggtattaatatataaaaatcttaaatttaagtactacctagttacttttccaataactcattggtttttatttcttgatgacgatatcgacctcttttaatgttgattttttatattatataaccttttgcgggcactactgaatacaagcaaggtaaaattcacacttatattcccactttggcttttcattaactatgataaaaattacataaaaacaataacaatatcaaatagagacagcactgtacaactaccttgctctctctatttcttaatttttattataaaaaatctattactctaattacatctaatactatttatgcaccttacagcagcttcttttgcatcttggcacccttcttgtgcaccttcttggtatccttgacaatatccttcttcacgccctgcttctactcctgcacaatatccatccttatatccttggttataagcatcttctaatgcaccagctgaaggataatttcttctacaacggcattgaacattttccccaagagttccattacaattacatcgtacattttctccaagagttccgttacaattattattattacttacagctccaagagtattagaatttctatatcttcttctatgacatctgtatcccatttcttttcctccgtaaattatcaaatttataatcttttgattaaacttctaattatatactatgctaatttactatatttgttattgcttttacaatatatgctctaataattgctcataaaatagaaattccgcattttcataaatattaataaaagttcaacaataatttagtataaaaatttcaactttacgcatactaaaaatgggtttattcttaagcctaggcattcattctttgcccctttatcggggtttttttaatatatacaaataatattaatactataaatttaatctatatataaatagtatgtacttctatgaagaaaatttttcactatactaatcatatcgtttttatgttaaaagataacgttgaccataaagccactcgtgccagtaaattaatatcctatgttacctttatataatttgtacaatctttaaataagcaatatagcatattaacacatttctcaatgcacaaatctatgtctttaatttcatcatcaaatttaatcttatggcatacatcatctgttataaaaaatgaataatggtagaataatctttcttcctcttcgctgttaaaaggtatagataaagctttgaaaatttctttgattttatcttttctctgctcatcatattctttcctcaaagcagctacatctttatctaagagtgttaatgcttccatttcatcatgaaaagttttagaacagtcgtgataatctaacatcatctttataaatactttaaatagtggttttactacttcagcattatcaaattccttatcagcattttctaaccaataatcatgacttggataatcaaaacttttgttaattctttcaattaccttaagataaatttccttcttatcttcaaaataggcatatacagaacctgtcgctacattggcttcattagatatatctgctgtcgtagtattataataacctttttcattaaatagtttataagctgcttctaaaattctatcatatttttctaaagctcttttttgtgttggtattcttgtctttctttccatctttatcacctatttaaataataaaatataaaaaaataaaagtcaataaaatatgaaattcatttcatgtattgacttttaattttttccagtatattatataaatgtgaatttaatttcatattcatataataaagattttggaggtcatcatgaataaaaaacaaaaagtattagcatttatttcactggcaatagcttgcttcttaacagtattagattcaaccatagttaatgtatctttgccttctatggctgattacttcaacacagatataacaggaatatcatgggtaagtaccgcttacttgattccattctcagctcttttaataaacttctctaaaatcgcagatatttttggaagaaagaaactatttataattggtcttatagtatttggtatttcatcaatactttgtggtctttccacttccctttccatgattataatttttagaataatgcaagggataggtgctgcaattctcgctccattagccattcctttaggtatcgaattatttggtaaagatgctatgtcaaaacttgccattgtaattggtatgacaatttctatagctgcagcttctggtcctgttgttggaggaatattaaatgaagcctttggttttaaagcaatattctatgtaaatgttccttttataatcatctctttaatctttggagctcaatgtcttacagaatgttatgatagaacaattgaaaagcgaatagattttattggctctatattattagcttacggaatcggagcactaacctttttccttgttaaaggaagctcatatggctggggcagtacaaaaattgttactttaataataacctcagcaatttcaattattgctttcctaatatatgaattaagatcaaaaaatccaatgatagaatttaaattatttaaaataagaagctttacttcttcaatcataatagtcggagtaatattctttgcttatatgcctatatcttatttaatgaatttctatctagaaaaccaattaggttattctgtcttaaaatctggacttattttaggtatagtaagcggtgtctcatttctcacctctccaatattcggcattatatctaaaaagtatggtgctagagttatttcattattagcaataatttttgtatctttaggtgatcttatgtttgtatttatgaatagttcaaacaatatgaagataatttatggctcattcattgtagtaggacttggtgttgcttcaacctctccattatataaaagtgcatttgacgaggtttcaaaagataagaatggtatggcttcaggaatattgaacagttttaggcaactaactgcatgtttagctatagccttagtttcaacattaagcagctattacactactcaagctatagataattcaaaaagcagaataatagaacttgttaataacaatacaattcttgaagatcaagtaaaatctactgtagttgataaaataaagactgctaactcaagcaaaaatacttccttttcgaaagatatggttgataaattgatcaaggacaaggagaatattgtgttagcttctgttcccgataaaatgaagccatctatagaagagaactttaatactcaaacaaaagagatccataaggtcttagatgacatggctgtcataaaaaatgatgaaagcaataaagtttataataaatgcttcctactcacagcagttattgcaattttaggattagcagcagtaccttttaataaaatgaaagaaactgaacttggaaaaaacaaaccagaatttgtagtatgaatatttcaaaatactcattgaaatgatattaacattttcactaaaataattcttatcctattataatatagaagttctatttctcaatataatatttatttttcagcattctgttgataattatgatgcttaatttcaattacagtaaataagcccaagacagttcgatatgtcttgggcttattttttaccatagctattgactatagatgcattactatctatagtcaattcttcattctagctaaaatgatatgtactcatttaaattatttttacataataaatttattattcactttttatctattaaccattaaatcataataaatataactttaatttataaatcgaaatatttactccataaatttcggttaaattgttactccaaactgtggcgaatgagtaactataaattccgctcctcccattcccatagcaaagaacactaaaataataactaatattattgcactaaaatcatattgcattttttcttgattatttattatataagctgcgataatctctattccaacacttactaaaataagtggccacattgatacaattaaaagaacattgagattagttataaacaatcttagtaaaaacattatcccaaatataactaaagcaagtcctgaggttaatgtgcctaccttacgccccttaatcatctatctcactctccatttttttccctttgataagttttataccaagtgtaactattgctactcctatgattactttaggaatgtccctcattaaatcataaataataaagcggcgtagttcgtatggaatatatggttctaaaatactcattatattttctataactaaatatacacctaaaaataagcatataacacctactgcaagcctgcgtttctcaaatatatctttgtctaattttgctagcttatcaatagaaaacaagtacttatcctctaaaagtaaaagttcgtcgtcatttaaattcattctattagtacaatcaaagaaagaataaaaccaaataagtggtgctatatataatagcggtcctatgttaagccaagaagaaagaaatattaaaaagaagaatacagacataaaagatactcctattttcataaatcccatatacatatgtcctgcacctggcaacattgaaaaaacaaaagtcaaaaatctactttttctcttgatcattattaaaaacctccagtttaattattttttcagaaaagttattaagatttacattaaccgaatctacaatcctagaatccaatggtctaacatgatttgtcgctgtattaaccaaagaatttaatccatttgaaaaaaccaatactaatgccacactagctgcaactgcaactttaacacaataaaaacggaactgaatcttgctttgcttcttactttttattttaatttgtactttttcttgaaaacctaaaggagcttctgcaagttcatcttctttaaaactatcggcaaattcaccagcacacatttgacaatcactaatatgttctaatatatctatcatttcttcgtcgcccaaaatatcaaactttagcatggttaatgtttcttcagttaaatgaccttctttatcaaataatccattattcacatgaactcctccttccataaatcctttaacattttttttgacctgtaaagttgcgtttccaaagttttaatattctgcccagtttcctttgctaaatgtgatagtttgacatctttgcaaaaataatttatagctacagttctatatggctcttttagcttgttgcataaaatttgtattctctctgtagtattctttttaactactgtttcctctggtgaatctcctctatactcaagatcttgatattcatcttctgacaagctaactgtttttcttgccttactcttaagataatccttacatttatttgcagcaattttagcaagccaagccttaaggttatcaccatcaaagccttcccaattttgatatgctgataaaaatgtttgctgagccaaatcttcagcatcaaaataattttttgtgaaggataaacaaatagtgataattaaccgttcatattgttttatgcaatttggaaattgttctttttcaatatctatcaccaccttaattaatccttacattaaatataacgatcaataaataaaaaacacttcaacttttttaaaaattataaagaatttattgatttatcagctgcataaaatttatcaaataataagattatactgccatttgaaaaaagcatatgacgtattgcgagttccacatgaatattctttgattcaaaaaataataaatttctatttttataaactttattctataaataatttcttataagtcatataaatgtttatactctcataaaatttattattaacattttcctaaatgcaaataggagaacttcctcccattcaggtttagttctcctatttgctcataatatgtcatcatctaaatttctacctgtttgtttctctaattgttttatggcgtttttgcccccattttttgcaatctctaatagctctgaaagacttgatgaaatatctctacttgcaaaaacttctaataacattggcatattaactccagttatgacctccatatcttccttttctaatgcaatcatactagcagcattaaatggacttccaccaaagagatcaaccataactaaaattccttctgtacaatttaattcttgtataagtttattgtatttatctaataaattttcaattccctctcctggcttaaacgtaacacatccaatattcttttgttctccataaatcatttctgccgatttaactaactctttagataaatctccatgagttcctacaattattcctatcatttaaattaccccttttaaagttttttcggttaagctttctatattaatgatataatatgacattatgttgtcaagttatatattatatatttatatgtgaggtgatgttatgcaaattagcagattgtttcaaattatatatattctactcaaaaaaaaatcaataacagcaagagagctatcagagcattttgaagtatctgtcagaacaatttatagagatattgatgctctatgccaggctggaattcctatatattcaagtcaaggtaaaggaggcggtatttcattagtagataaattcatttttgataaatcactattttctgaagttgaacaggataaaattctacttgctctacagagtctttccgctgtaggatatgatgatattaatgacgtattatcaaaattgagcaatctttttcagaaaagtgatattaattggattgaagttgatttttctaattggggtagtgaaagaaaacaaaaagagatcttcaatctaataaaagaatcaatactaaagcaaaaagtaatcaatttctcatattttagtgctgacggtatgaaaagtaataggtatgttgaaccttttaaattgttatttaaagataaagcctggtatctacaaggatattgtcttgaaagaacagcgtttagaacctttaagataactcgaatgaatgatattaatattacagatgaaagttgtatacatcaatatttacaagatcttatggatgattcaccatcagaaaaattcagtgaactaattcatcttaaactaaaaatatcttcagaaggtgcctatagagtatacgatgattttgatgaagaaaatataactatcgataaagatggctcttactccatagacatttcgatgcctgagggtgaatggatttataattatcttctttccttcgggacaatgttagaaattatagagcctatagatgtccgaaacgaaattatcaaccgcttaggtaacatgataaataaatatacttctaaaacttgacataatgtagtcaagtttagtttattacaataataataaataaaatttaactgtataaggattacgttattaaaatattttagtatattttaaattcagattataataaaatatcaagttttttgatataatagttacaaggagattatgaaatacttatgagtgaaccactaaaaaatatttatacgttagaatttttaaatgatttttcaaataagatacacaatgtttatgcagaatttaataagagcgattttgtcgcttcagttttagcttatccgtgggatgaattgcctttaaaggctcgtattcatagaatagctgaaatattaggcgactaccttcctaatgattttgaaaatgccctaaatatcttattctccattaataagagttgcgtaggttttccatatctattctttccagattttgttgctacctatgggaagcaagagaagtactttgagctctctatggatgccttagaacgtttcactcaacagtcatcttcagagtttgcgattcgaccatttttattgaatgcccctcgaggtgtaatggaatatatgatgaagtggtcattatctcctaatgaacatgtacgacgtctttcaagtgaaggctgtcgaccacgtcttccttggggaatagctcttccgatgtttaaagccgatccatcgcctgtttttaaagtgttagaaaatttgaaaaaagacgactctctttatgttcgtaagagtgttgctaacaaccttaatgacatttcaaaagataatcctgacgctgttttagcgatagcggagaattggatatgtcataatcaaaatactgattggattttaaaacgcggctgccgtacccttattaaaagagctaatcccaaggcaatgtcactctttggttacactaactcttcagctgaaaatcccatatttagaaatgcctcaatctctgttcaacctaaccaacttaaaattggaggcagttgtgagttaaattattcactggatatagactggggttctccagtacatatccgcttggaatatggcattgattttataaaatcaaatggtaaatcatcacgtaaattattctttttatctgacaaaacatcgttacctaatgcacatttacaaggtacgcgtatacatagctttgaagatcttactgttcgtaagcactatcctggcattcataaaattgttcttatagttaacggcatagaatctgcgcagactacattaaatattcttggatgcaaatatgattataaataatctactattgaaattaaaaagcagggatatcaataatattaaacaaacactgtaaatgtattatcgcaatatatattgcattcaaataatatccatattacatgaatatttttacgaagatttcatataatatagatgttttcatgatttaaactatccacttttagccccattattggggcttttttatttatcctgaaaatcatttttaacttatagatatacttagattaagtataaactttttcttaaaacgtataatacatttataagtacacaggattggaggatttaaatgaaaatattaaaaaagatattagctataactgcaattaccataatatttagtacggtacttagaagcatctttctcaataatacagctattgcagaagattctaaacaaagaactactattagagttggcctgttttcggcagatcttaatgatgattaccttatatttctccgtaaaaattttgaagatatacaaaatcaacatccgaacgaagtcatctttacattttatgatgcgaaattcaatcaatcaactcaaaatgccgaacttgataccaaacttaatgaaggaattgatttaatattgctagatatggttaatgttaacgatataggagacttaattaataaaatatcaaaatatgaaattccagtaatagtttttaatagagaaccacttacaatggatgctataaaatcatataaaaaagccctatatgtaggtactgattcaaaacaagctggtactttacaaggtaaaattattactgatgcttggaataatcataaagatttaattgataaaaataaagataatgtattacaatacattatgcttattggtgaaagacttaataaaacatctatagatagatctgcatattctatttcaactatacagcaggctggaattaaaacagaggaacttgcgtcacctgttttaaattgggatagagaaacagcgcaaaatactgttgatgcattattcctaagacttggaagtaaggtggaagcaataatttcaaatgatgattctatggcaattggtgcaactaaagcattacaaaaatatggctataacactggaaataaatctaaagtaattcctattgttggagtggatggcgttcctgaagctaaagaattaatttcaaaaggctttatgttaggctctcctgttcaagatactagcgttatggctaacgctatttatacaataggttctaacttagttcatggaataaatcctattgaaggaacagcatacaaattagatgaatcggaagctgctattcgtataccatacgaagaatatactggcccaatgttccaataaacaattagataataaaagcatataatttttataaatttattttattaattaataattattattgactaatataattattatgtatataatagtcttaaagataacactctcatttttttctaattatgtcagctaaattttaaacacattgatgattttaatcttaaaatatacataaataataattttaagattcttagtcattaaaaagacattttagaaataaatttaaagagtacaagactgttgtaatgacaattaaacttggttatttagcagaaagtaaaactttatatccaaggtcttgcaaaaaaaatcatgaagaaatagtcaaataattataattaaatttaggaggtaataaaatgactgaattgaaacaagtgtataaatgtgaaatttgcggtaatattgtggaggttgttcataatgctggaggtacactagtatgttgtaatcagccaatgaagcttaaagctgaaaatactactgatggagcaacagaaaagcacgttcctgtaattgaaaaagttgaaggtggagttttagtaaaggtaggctctgtagaacatcctatgcttgataaccactatatagaatggattgaaattcatactgaaagtaacgtatataaaaaattcttaaaacctggtgaaaagcctgaggctttctttaaggtagatgaacctgttctttttgctagagaatattgcaacttacatggtttatgggctgaaaaaaattcttaataaaaaactttttatttaaatgaatagaagtctgtagtcatttgattattacttacatatcttaatcaaatgactacagacttaatgttttacttagaaaacttcaacattaatacataaatccttctaagaaaataatatactttcatataatacaaagcagatccattcattattttttatatttttagttaatgtataaaaacaatgtgaacttcaaattaatgaaattcacattgtttttgagcttgtctttatttaggaggcattattgttgctatgcctttaagcacttgaacaccatcttgatttgtacatatagtacttaattttattctatttttatcttcaattctttctatcacttctacttcagccttaattgtatctcctatttttactggagccgtaaattttagttcttgtccaagataaattgaacctggacctggcaattgcattcctaatactgcagatactaagccagcagttaacattccatgagcaattctaccttgaaacattgttttttctgattcaacttgatttatatgagccggatttaaatctcctgttattccggcatataaatatacatcagtttctgtaatagtcttttgaaaagatgccttatctccaatctttaattcctttatagttaatcctttcactagtactcccccttctttgctatataattttcagaatattatttgtaagtattttcaattctaattaaacaaaatgtaataagctttgtaatgctattaatgcaaatacagttcctgtctttatgcaagtgattacaaatatatctttatatgattgtttatgagttaaccctgcaattccaagtaaagttataactgcaccattatgaggtaatgtatccattccacctgaagccatagcagcaacacggtgaagtaattgtggatctattccaacactatttgcccaagttaaatattgttttccaaaagtatcaagtgctatactcattcctcctgaagcagaacctgtaactcctgaaagaacatttactgtaactgcctctgaaagtaatgggcttccatctgggttaatattagttaaagcatgagctatagattgaaatcctggtaaagttttgataacattaccgaatcctacttctgatgctgtgttcataactgctaaaagtgatccaattgcaccagcattaattgctgcagcaaagtttcctttcatacgttttgggttaattgacactgcaagagtaataccaattacaagtgcaatcataagagcccagttattcattgaacctacaacaccagcttccggtatgttgtatggagctttagttacccaagaaacgatatcccatttaggaaatacaactttttgaagaactagagtcactataagtaccgatgctaatggtaatgctgatataaatggattcggcaagctgctgtcttcaacaattacaggctcttgcttatggtttgttccatatccttctccttttgcctgagctttgcgtttgcaccattctaagtaggatacaccacaaactaaaaccataattgcacctagagttccaaatataggagctgcatataaatctgtattaaagaatttcattggtatagaattttgaatttgaggtgttcctggaagcgcgtccattgtgaatgtgaaagcaccaacagcaatagttgcaggcacaagtctctttggtatatctgcttctttaaatatagaagctgcaaatggataaacagcaaatgctacaacgaaaagacttactccaccataagttagtatagctgctgctagtattacagatagcatagctcgtttttttcctaatttatctactataaattttgctattgattttgctgcaccagattgctccataaccttaccaaatactgcacctagtaagaagaatggaaagtaaacttttacatagttacccaagttaggtaagaatatttccgtataagttggcataatcgccattcctgaaaatatagctgccataatcgcaaatataggtgcgaaaacaataactgaaaaccccttataggccataaacattaaaagtgctaagcttaataaaattcctataactgccatatacaaaacctccgttattttattatttttcttttcaaatattttatccgtatcctattcacttatattagttgttacttcaacttcataggcttatctttaaaaattctttcatccattgtttttaaattatttgatattattggcttaaagtccatttgatcaataatatccttttgtaaatctacccctggagctatttcttctaatgttactccatcttttgtcaatctgaaaactgctctttcagttatatataataccggttgatttacatctctagcataatctccactgaatgtaatttgttcaacatttttaatgaacttctttgaccttccctcattttcgattactagcttgccatcagtaacattaattttaagtcctcctgctgtaaatgtgccacagaatataaccttttttgaattttgagttatatttataaatcctccacatccagctatcttaggaccaaatttacttacatttatattgcctttttcatcgcattgagctagtcccaaaaatgctacatctaaccctccgccatcataaaaatcaaattgagatgattgatctataatgctatctggatttatagctgcaccaaaacttaaacctcctgctgggattccaccaattgggccagattcaatagttaatctcattgtatctcctattccttcttcattggcaaccattgaaattccctccggcatacctataccaagattagttactgcatttggtataagttccattgcacaacgccttgctattatttttctctcatccattgaaagacattcgatagaatctactggcattcttatttctccactataggctggattaaatgcttcagcaaatgtctgcatatggtcttcactgttagctacaactatagcatctacaagtattccagggatttttacaagctttggatctaaagttcccttagagactattttctcaacctgaagaattacttttccaccagaattttttgctgcctgtgccatagctaaaccatctagtgttgctgcttccttctgaagagttgcatttccatcttcatctgcatatgttgctcttaatatagctacatctataggaaaagctttgtagtagagatattctttattatcaatttcgataacctttacaatatcctctgttgtacattcatttaattttcctccctcaactcttggatctacgaaagtctttaaaccaacatgagtaattgtacctggtttacctgccgcaatatctctataaagactagatattactccttgtggaagattataagcctttattttattttcaattgcgagtttttggatcttaggagctaatccccaatgtccacctattacctttgaaagaaggccttcttgtcctaaatgattcaaacctttttctttaccatctccttgtcccgctgcataaacaagagttaaattattaggggcaccttgttctaagtatatttccttaagtttcttagaaaccccttctgcatgcccagcacctataaatccaccaaatgcaactgtgtctccacttttgattaaggcgattgcttgttctaccgacattatcttgttcatctttactcctccttttcacacttttatatactccataaagcaagagtgtaatattttatttataattccttttacacttatttatataagcaatatccgtgccaagatttcgagcatgtattcaacgtaaaactgcgcttttctataagcaatttcataaaaaattcttaataatagaaagtttttgttcgttattccgtacaatttcttaagtaaacatttacattgtgtgcgattttccgtacaattatttttcataaaaaacatagttgttcgtaagaacgaacaactatgtctgtattttatatttttctattttctcatataaactagtacgccctatatcaagaatttttgccgccttacttttattaccatccgcagccctaagggcaagaataatagcatttttttcactttccgcgagaatatcttgaagcttcttagtaaccattgaaacctttttccctgtgatctctttcggtaaatctttcacttgaataatctcactattctccataatgtttatagcccgctctaatatattttctaattcccttacattacccttccattcataggttttaagatattgttcagcctccttagagattcctctaaccttcttatctaaatcaactgaaagcttttttattaaatgattagaaataagtattatatcatttcctctttctcttaaaggtggaatttcaattgttacgacattaagtctataatataaatcttcacgaaacttaccttcttcaactaatctttcaagatttctatttgttgcagcaattattctaatattaatctttttactagctacgccaccaaccttttcaacttctctttcttgaataactcttaatagctttacctgcatatggagaggcatatctccaatctcatctagaaatatagtaccttcatttgcaatctcgaattttcctatcttaccttcttttttggcacctgtaaaagctcctgcttcgtagccaaataattctgattcaagtaaatcacttggaattgctgcacaattaactttaacaaatggcccttcatgtctattactttccgaatgtattgcatgtgcaaagatttctttacctgtcccgctttcccctaaaattagaacatttgaatttgtatgagctgctttttcaactatggctttagccataacaataggttcactctcacctataatattttcaagcgaataatttgctttattgaattctctaaaccttgatttataagtagctaattccttttctataacgcttattcgtttataaaggctatttaattcttttacatttctaaataagaccttacccactaccccaataatttctccattttttactattggtattcttgaggctatcatatagcttccttttatcttatgaagttgtgctacttcttcttttccagtttctaatactattggcattctagtattttctatcacttcatttacatgcctgccgatagcatcctccctcttaatccctaaaaattctgtataggcattactgatcatagtaactatcccctgcttatcaatgataatcattccatcataagcggtttcaattacagtatttagtatttctttgctatccctctcttcctcaagcttatgaattaactgactataatttgttacattactaaaaatcagcattgatccttgtgtattagtattttctccaaaaggtatgatactcaaaattaaattcaattcattaactactattggccttttaatttcctcttttttagttgacagaaagtattctatatctggatctggcattatttcattaatattcttgcctaaaccacctttactatctatatcaaaaagaatactagctgcttcattaataaaaaatattttgctgttactatcaactgcaattattgcattaaacatattatctaatattacttcaaggttactaatataatttttgaataatggtttgttgttcatgtaacaccttctctcttaaatcttatttttaagtattttactaaagattccaagtaaatacaaggattaagtaattattttagaatataattaaatataaatattttataagcatttagaagggactgattgaaataaaaagggtaacttcatcttattattcccctaatatagctaaatatagaatagtaggatatatacatggtattaccactaatgtaaatccaaacaaattgacccatattaattatgcttttggaagtattatgaacagttcaattttcattcctgatgctcaaaatttaatgaatttggtatcattaaaatctcaaaatcctaaattagcagttatcctttcaataggtggctggggagctgaaggtttttccgatgcagcctattcagagtcatcacggaatagttttgcaaatagctgtctggatatcgtaaataactatggtatagatggaatagaccttgattgggaatatcctgttagcggctcttgtaacctaattaaatgtactcctaaagataaaggaaatttcacgcttttacttaaatctatacgtaacaaaattggaacgaataaaatactcagtattgcagctggagcagataaattttacattaataatgttgaaattaatgaaatagtaaatatctgcgattatataaatttaatgacttatgactttggttataatgctcataatgcaaatctttatccaacttcttccccctatggatcaggttttagctgtgatgagtcagtaaacatatttttgcgggcaggtgttccagctatgaaaattaatttaggcattcctttttatgggtattatggtcatgaatatctttcatatggaaatctacttgaaaattatataaataaaaatggttggactagatactgggattatgaagcaaaagctgcttatttaaaaaattatgattcatttattacttatgaggatgaagaatcaattgactataaagttaaatatataaaatcaaaaggcctcggtggcgcaatgttttgggaatataatcaagattacaatgatattcttctaaataaattatggacaggtttaaacgaataatattacatgcataaaaaataaaaataggatgttacttaattcatcctattcttataaatatatatatttttttaataccattttattgaatttaatttttgaaatactaatttaattaatttagtcattatcattttaaacactatctaataaagttagtaaatattttctcttcacctttactttcttctacattagctttcccagaatcagcaagttttaataaccatgccatgttctttcctaaaactctcattatctgcattccttcttcatcctgaactgcttctcctggtgctgtaccgtgaactacgttccaatagtttgatgttggcattaacatctcagaataattaagataattatttaactgagtaaatgttggaactccaccagaccttctaactgcgacaacacttgcacctactttgtgtctaagcatgccattatttacagatgtaacataaaacgcacgatctaaaaatgatttcatagttcctgctatggcagaataatgcactggagagcctagaatgattccatcagcttctttcatcttttgaatccaatcgttaacttcatcattctgcataacacacttttcgttcatatttctggcacatccgccacaagccatacatccacgtataaccttatttccaacatgaactatttctacatctatattctctttctttaattcttctgctacagcttttattgcctcgtaagtatttccattctttttaggactcccattaaaagcaactactttcataatacatacctccataatattaagatcatgatgtgattatataactcagtaatgtaagtaacaagtacgcactttttagttagacaacttactttttggtaagaattattgaataacctacatgtaaggtcataataaatttttcataaaacaatgatatccttattataattcgcaatatataacttattctaatagtcatgggaaaatagccattatcccatacaatcttccaagattattaataacatacattttacttaattgatttgatattataagataggttgtttatactaatatctagtaacatttataaatattaaaaaatgaaagcgggtaactaaatggtaaattataacggaagaagttatgtgtgcttattagattttgcaatggattttataagaggaaaatggaaggcagttttattatgtcatttatataatgaaccaaaaagattcctagaacttcaacgaatgactgaaggaataagtcaaaaagtgttaaatgaaaaacttaaagaattagaaaatgatgaacttgtatgtaaaaaggtttatgcagaaattccaccaaaagttgaatactccctcactaataaaggaaaagagcttactagtattattaagcaaattgagtcttggtcggttaaacactaccctgaattagataataaatgtgtttaattctattacttttctataattaaaataaagaagaaccttctcctttatagctgattcttctttattctttaaatgcatcagtcttgtctttttactaattattttattgcataatttatttcaatgcccttcctctgtctcatctactattatacttttttatgtctttaaatatgttactacttgttagtattataactatagcatttctaaatatttattattgatttcatggctaccatcactcataataatttaaccatattaatattattataaaaaattatttaacccaccttaaatttcaagatatcttataac

SEQ ID NO: 49 - DNA, 42328 bp, Clostridium beijerinckii
gctcataaccggtaggtctagggttcgagtccctgaaggtccaccatgggggtatagctcagttgggagagcacctgccttgcacgcagggggtcaagagttcgaatctctttatctccaccattaagaagttatgaattaattcataacttcttttattatacaattatttaattatttaattatgttcagtatgaataagcataggagataagaatgttttcatatagaataaaacaattttattgggcaatagaatctatattcgttaaggaagatatggaaatactaaagatgtatcttagtatttctgagttgaatttatttatgaaacttactaaatcagagcggcaacattcaataagagtctgtagaacggctataaaatatatagaggataataatatagttgatatcgataaaaaaaggatggctaggtgtgcattattgcatgacataggaaaattagaatctaaattaaatatattttataaaggcattattgtttttttaaatagtattactcgcgggaaatttttgaagtataataaaaataagaaaataataagttattataatcatccggaagttggagcaagactgattgagagtattaataatgatgaatgcttagacgtaataaattctatcaagtatcatcataataaaagtgatattgactcgaaaaatatatatttaaaagtattaagtatatctgatgattgcaattaaaataggagggaaatatgaattctattgagagaagagaggatataattaaattacttctagaaagtaatgagcctttgaaaggcagctttatagcaaaaagatattctgtaactagacaggttatagtaaaagatatagcaattcttagagctaaaggtaaaaatataatagcaactccagatggatatataattaatgcaaataataataaagctaaagcaattattgcagtaattcatactgaagatgagatgattgaggaattaagtatagtaatcaaatatggtggaatgattgaagatgtagtagtggagcatccattgtatggagaaataaaaggcatgcttatgattaagaattataatgagttaaataaatttattgaaaaatataaggaacaaaaagcaaaattactatctgcattaactaatggagttcatcttcacacaatagcagctgaaactcaagatgatattgatttaattatattggaattgaaaaagaacaactttatagtttcagatttggaggactagtaatggattatgatgtattaattttaggcggtgggataattggatgtgcagttgcctatgaactttcaaaatataatataaatatagcgttaattgaaaagggatatgatgttgcaaacgatatttcatttgcaaatacagctgtagtttatgatggttcagaatcaagtagtagtaaaatggctctcttggagaaaagaggtattgatataataaggaagcattgtaaaaaggtcaatgttagatataataagattggttcattaaggcttttcttagatgagagtggtgaactattaaataaagtgtacagtgattctatggagcgaggaatagatggagttcgcataatagatagtgatgaactttataatgtggaaccaagtttaaatttaaaggcaaataaagctatctattctgagaatacttcaataatatcaccatataacctagctgtttcatatgcagaaatagctgtagataatggagtgaattttagattagaagaagaggttatagatattaagactatttctaagggattcagagtaactacgaataaaaataagtttacttgtaaactagttattaatacaattccaaatgaatcctttaatgatatgtgtggtaatgtaacaagcgaaatgaaaaataaaaaagttaagtgtataatagttaagaaaagtataggcgataacttaaagaaaattattattgaagatatagatgaagaaaattccatgataaaggtgccaatatccgaaaatgaaaatttaattggaattaagatcagtgataattttagcgctaaattagaattgccagaaagaatattgaaaaatataaaaaaagagtcaatagttaatatatttacagaagtatacagcgaaaatgatatgttaatagatgatagtaatttggaggccggttatataaaggttgtaggaaatcattatgctaaaatatcagttgcaccagcaattgctcaggatattgaaaagaaagttaaagtaagtatgaatataacgaagaaaaaggattatattgataaaaagagagagacatatatatttagagagatgactaaagatcaaataaatagaataatttctcttgataagcgttatggcaatattatttgtaattgcaataatatttctgagggagagattattgattcaataagaagacctttaggtgcaagaacagtagagggagtgaaaaggcgtacagggataggtcttggaaactgcaatggttcaagttgcaatataaagataataaagatattggcaagagagatggataaaagtgttttagatatagtagatgattctatggattcacaaattttagttggaagaattaaggagtttaatgaaatttagattggagtaattagtaatgcctaataaagatgtttttaccagtttagttagagtaaaaggtaatatcaattacaaagttgtatcagtaaaaagtaataaaagcgttgagaagcacttatggaaagaattttcaaaggttcttagtaggatttatgttagtactcctactaatattggcgataatatttgtaagaatatacttaatactggcgtagatataatatgtacacggaagataaaataatagctaaacattaaatctataagctaatattttattataataatttattttaataaaatattataaaatagttgacataagtataagtaattgatataatgatatatgtcactagatgtggaaagatggtcgagttggtttaaggcaccggtcttgaaaaccggcgtgcgtgtaagcgtacctagggttcgaatccctatctttccgccatttttttgtctaaaaatataaaatttatttggaggattactcaagtggctgaagaggcgcccctgctaagggcgtaggtcgggtaactggcgcccgggttcaaatcccggatcctccgccaagcatctaacatttgttaggtgttttttaatataattaattagtcttagtaaaacatatatttttatttgttgaaaatttatataaatgctcaataaatataatttactattctaaattatttgatattctgtaactcgtagctaaaattaattttagctaaatgaaaaaattaaatttattgaaataaatatgttgacataaataaaattagttgatataatcatatttgttgtgagacatggaaagatggtcgagttggtttaaggcaccggtcttgaaaaccggcgtgcgtgtaagcgtacctagggttcgaatccctatctttccgccattaaaatagaaggcacatggaggattactcaagtggctgaagaggcgcccctgctaagggcgtaggtcgggtaactggcgcccgggttcaaatcccggatcctccgccaaacatctaacaaattgttagatgttttttttgttttgaattaattttatggagaaaataaacttgaaatattataattaatatgtctgattataaaataaattaattattataagaaggtgaattatgctaagcggcagcaaagtacatttaagattactaaaaaaggaagatgtaagtatattattcaagttacatagtgaagagaaagttaaaaagtataatataataattgatagcatggataataaagtagatttaagaaaagctttaagtatagtgaatgaggatgataatttaattggttttgtaacgtacaaggagaaagaatattatagtaggacatactgcattggtataacgataggtagcgagtattggggaagaagttatggggcagattctataaaaactcttctaagatatttatttaagaagctgaatgctatgaaagtagaattatacgttgctagttataatataagagctataaagtgttataaaaaatgtgggtttatagaggagtatattaaaagatattctagttatatagatagagaatatatagatattataattatggggataattagagaaagatataattcatatttaaaatgtgaggatggaaaatacgtatgagtataagatttgtttatggaagatctggaacaggcaagagtaaattttgcattgacgagataaaaaataatattgataagaaattagatttaaataagttaattctattagttccagaacaatatacatttacgaccgaaaataaaatattacatgaaataggagaacatgctttttttaggacagaggtgctgagttttaagaaaatggctcataatatttttgaagaatatggtggaagagttaaagagattattaaggaatctggaaggaatatgctaattcatagagttataaatgaaaatattgagtctttggattattttaataggatgtctagagaacaaggatttaatgaaattatatcagaagtgatttcggaatttaaaaagtataatattagcattgatagtataagagcaatagatgagaaaataaatgataatgaattatatcaaaaaattaaagagttgatgataatttatgaagcatttaacttaaaaatgcatgaaaattacattgatggagatgatcagttaacattactaaataaaaagttattagaaagtagcgcgtatgtagattctgaagtctggatagatgaatttactagctttacacctcaacaactagatattataaaggtattagccaagagatgcagaagagttaatataactttttgtattgataacaaatctctaaacaacaactctgaagatataactgatgtattcaatattataaagagtactgaaaataaaatattaaagataatgaaagaaaacaatatagcctatgataagccagttaacttaaataatgcaattccttataggtttaaagataatctggaacttgatcatatagaaaagtattttttttcttacccatttaatgaatatgataagacccctgagagaataacactttacaaagcaagtaatatttatgacgagatagaaagagtatcaaaaagtattacaagtttggtgagagaaaagggttatagatatagagatatatctgtagtttgtagaaatatagacgattatgaaaaaataatatcagtaatatttaaagattataatattccatactttttagataaaaagattcaattactaagtaatccattgattgtacttataagttctgcttttgaaattttgcttaagaattggtcttatgaaagtgtatttaaatatttaaagagtggtttaactggcatagataattcatatatagataggctagagaactttatattagagtatggggtaaagggttataaatggacatcaagagaaacagtaaatgagaaatggtttataggaaatagtgaattgacggatgataaagttttaatagctgaaattatggaagagataagatatccattgatgatttttcataataaaataaatggaaaacataaagttaaagatatatgttcagctatttatgagtttttagtggatgtaaaagtttttgacagaattaatgaatggattaaaaattttgaagaattaggattagaagataaagttaaggaatatagtcaggttgaaagtatagttatagacattctagatcaagcggtcgatgttataggcgaagagagattagagtattctgagttttttagaatattgagttctggtttcgccaatgaagagataggaattatacctgtagcattagatcaggttaatattggagatatagcaagaataaagggcagagatgttaaagttctttacatagtaggaattaatgatggagttctaccggcatccaagaaagaggaaggtctattatctgatagagatagaacaacattaggtgaggttggaataaatttatcatcaacaactagaaataaagtttttgaagaacagtatctactatatatagcattaacaattagtagtgaatatttaatgctttcatatccgatggctgattttgagggtaaatcattaagaccatctatagtaatatctagaattaaaaagatatttcctaatttaattgaagaaagtgcaatttatgatttaaaaattcttgaaaataaatttggcaaaattattgcaccaattccaacatttaatgaacttataatttctatgagaaaagattttgataaagaatatgtagagccttactggtctgagatatatgaatggtttaaaaataatggtgagtttagagataaagttaagaatatattcaaggggcttagttactcaaacattggagataaagtttcaaaaaacaaacttagaaaactttatcagaatgacttagaaaagttagtatttagtgtttcaaagttagaaaagtatgcagaatgccctttttcttattttgttcaatatggactaaaagctaaaaatagaaaggtatatgaatttacaccaccagacttaggatcatttgtacacgaaatgcttgattcattcactaataaagttagagaagatggaatactatggtccgatttaagcaatgaaaaatgtaaggagataatatctaaccttattgataagaaattaatggatgaaagtaattctatattaaatagtactaagaaatttaaatatttagcgcaaagatttaaaagagtaatatctaaatctgtttcagttattgcaagtcaaataggaaaaggtgaatttgaagtatttaaaactgaatttgattttggaagttatagctcgggagaagctataacattaaatttgaatgataatgaaaaagtgtatcttcaaggaagaattgatagaatagataaattagatttagatggtgaaacttatataagaattatagattataaaactggagcgaaaaaatttgatttaaatgaactatattatggattacaaatgcaattattagtttatttagatgcacttataaagaattcgaaatatatacttgataaacaagtaaagccaggagcaatattatactttaaaatagatgatcctataataaaaagcaagaaagaaatgacttatgaagaagtagaagaagaagtattaagtgctttaaagatgaaaggattagtcttaaaagatgcgagggttgtaaaagctatggataaggatatagaaggatattcattggttataccagcatcatttaaggctgatggaagttttaaggcaactagtgatgttgtaacagaagaggagtttagaatacttagagaatatgtaaataggaagatgatagagatatgtgaagaaatgctaagtggagatattaaaattcagccgactaagaattctaacattgctcattgtgaatactgtgatttttcatcaatatgccaatttgatacagaaataaaagacaataaatacaaaattataataaacaaatctacaaatgatatatggaataatataaaaaaagaaattgataattctaataaattaattaaagttgagaatgaggaagtatagtactataaaagaatctaatatatttttgattaaaattaattaggttttcttacagctaaagcgattttaattagtacaggagagatttatatatgggtaatacaaaatggactgatgaacagttaagtgcaattgaaacgagaaattgtaatttactagttgcggcggcggcgggttcaggtaaaactgctgttttagtagagaggatcataagaataattactaatgaagagaatccagttgatatagataagttattggttgtaacttttactaatgcagcagctgctgagatgagggaaaggatagcagatgcgatatcaaaggaattagagaataatcctaggtctaaaaatctacagaggcaattaacgctgttaaatagagctaatatcactacaatgcattcgttttgcttagatgtaattaaaaataattaccataggattgatctagatccatcatttagaataggtgatcagactgagggaatactaattaaatcggaagttattgaagaacttttcgaagataaatacgaggaagaagatactgagtttactaatttggttgagatatttagtagctataaaaatgataataatttaaaaaatttagtattagatttatatagctttacaatgtcaggtccatggcctgaaaaatggcttgctaatagtgctgagtcttttaatattaaacaattagatgaattggatagaactaattgggtgagagttttagctcaaagcgtaaaaattgagttagatgggtatgttaaaatgttagaaaaggccattgaggttactagcaaaactgatggattagaaccttatatggataacttattaatggaattaagttatataaggaatgcttatgaatctactgataatggacttgaggaaatgtttaattcattatcatcaatacaattcagtagattaaaatctataaaaaaagataaggtttcagatgagttgtctcaaaatactgtaaaaaagattagagatgatgttaaaaagggaatatctgaattattaaataatgcatattcagtaaatccacagcaaatgttaaggaatattcaaggggcacatcattacataaaaaaattgatagaattagttttagaatttagtgctaggtttagtaaacgaaaacgagaaagaaatatattagattttaatgatttagagcatttatgtttaaaaatattaagtgattatgatgatgagaataatataattccatcaagtattgcaatgaattttaaagaatatttcgatgaagtacttgttgatgagtatcaagattcaaataacgttcaagaaacaataataaacctagtatccagaaagaatgatgataatccaaatgtatttatggttggggacgttaagcaaagtatatatagatttagacaagcaaaacctgaattattcattgaaaaatataatacatatgattcaagtaatggaacgaatagaaaaattcaattatataaaaattttagaagtcgaagagaaattatagatggagtaaattacatctttaaagaagtaatgtctgaagttgttggagagttagaatatacagatgaggaagctttaaatttaggcgcagactttaaggaaaataaattcaaagatacaattgttggaggccctattgaagttaatataattgataagagccataatgaaacggttgtagaagataatgaggaacaggaagaaataaataatgttattttagaaggtaggatcgttgcgaaaagaattaaagaactaatgtcaaaaagtgaagatgaacaaatttttaaagttttagataaggaatctggtgaatataggccattaaaatatagggatatagttattctacttagagccactaaaaactggtcagagccattattagatgagttaagtgcagaaggaattccagtgtatgcagatacaggatctggttattttgaatcaattgagattagaacaataatttctcttttaaaggttgttgataatccaatgcaggacattccagtaatatcagtaatgagatctccaattatgggattttcggcagaagaaataagtgatattagacttgtaaataaagataattatttttatgaaaatataaaatatataagtgaagaagcttataattcaattaatgaatcttattctgatgtattgatagctaaatgcaagtattttattaattccgttgacaagtggagagataaatcaatttatatggcaattgatgaatttatatggtatttatatatggatactgcttattatggatatgttggagctatgccaaatggagtgcttaggcaagcaaacttaaaaatactttttcaaagagcaagacaatttgagaaaacgagttttaagggattatttaattttataaattttataaataaacttataaaatcttcaggtgacatgggaagtgctcaagtattaggtgaaaatgaggatgtagtaagaattatgagtatccataaaagtaaggggctagagtttccagtggtattcttatgcgggttaggaaagaattttaaccttatggatttaaataaaagcatattgtatcacgatgaactaggacttgggccagactttatagatataggaaaaaggtttagcacaggaactttagctaaagaatcaataaagaaaaagatgaaatttgaaacattatcggaggaaatgagaatactgtacgtagcatgtactagggcaaaggaaaagttgattatgacgggtgcagtaggaaatcttgaaaaatcagctgaaaaatggttaggatcagcatctttagattataatcgtatatccccttcggaagttttaaaaggaaagtcatatttagattggatttgtatgtcactatgccaacatagagatggtagtgtcttatcagaaagttttggaactgaaaatttaatattaaaggatgatgattctaggtggaaagttagtttttggaataagggcgacttaattgataagacaaagacagaagtgttagaacaaggtgaaggatatgagttaacaatactaaataataaaccatatgataattctttatatgaagaagtagataaaatattatcatataaatatccatttaaagcttcaacaacaattaaaagtaatatttcagtttcagatttaaagagaaggaatgcagaagaagatgatgatactgaacaattatatagagaaaaggtaaaagttgtccctaagtttcttcaagagaagaaaggtcttactccttcagaaaagggtactgcagttcattttgtaatgaaaaaaatagattttaatagagtatcatctacggaggaaattaaagaacaattgcacgaattatttgaaaaggagcttttgcttagcgaagaattaaaggtaattaatcctactaagatactgagcttttttaggtcggatttagggaaaaaaattcttgatttaaattgtagtggagaaaagatttatagagaaatacctttttatacagagataagcagtttagaagtagataaaacacttgataatatatataaggatgaaaagataagattacaaggaataattgattgtttctttgaatataagggagatattatacttatagattacaaaaccgattatattatagaaggtcatgaagatgaatttaaagagaagtataggaaacaattagattattatagtgatgcaatatttaagttaacaggtaaaaaggttaaatataagtacttatattcattttatttagaaaaagaaattagaataatataaatatgtttaagtaaaataataagaaaagcaagaagacaaaaataaatttatcttcttgcttttttaatagttattttattataactttactttctctaggtatgttagtaaaaatccatttggcatcatctatagagagtctaatacagccatgagaagaaggtttattcatggtataatctagaaccgtagttttgtctttagcaaatggaactgaatgaaataaaatgtctccagtaatttgagtccaatatttgccgccttccttatattcttctgaaaagaaccaatcacctctctctttaatagtaaatgatccagaaggggtatcttctccacttattccagtggaacaagggaatgctttaaccaattgccacttatcagcttttcctttataaacataagtcttttgatcttgaatgtttacatttataagataaggtgttgtactctctatatttaatgtattaatattttttgatgtaatattggttgtcaaggcacgcgatgaagcttcagcaatagctgaatttttatctaagtattcttgttgtttttcttttatatctgctatcttttcttttacatctatgtcatcacccaaaagatcattattgtctgaaattttagacatagcttcgctatagtaatcattgctaattaaattatcgcagtaagcaaataaattctcctttagtttactttttgattcatctaggtatataagtgaatctgtatagttaagatctaaagcagaaacttttttaaagaatgaaatggcctctgaatattgttcattattaaaagaattaataccagagttataatttttaatagaatcttgaattaagtctatcgaatcagaagcattatgtagatcatcatcattcactagattataacgttttatttccttaaactgaattaaggcatcttcagaagaaattttcttatcttggatttcatctgataaagtattaattttagttctaagatatttggatacatcatgactaatcatagataatttaaatggattaaagttttgtttagttatcaataaattattagcttcagaaaatttataattatcaaaatttgatttgaagttatttaaaagtttattataacggtataactcataaaagcagctagaagataatgctattaataaagctagcacatatataattcttttaggtaattttttagtttttaactttttataataaaatgtatttatgctcaaataaatgcctcctaatgaagtaactaatatatttagagtgaatttgaataagatattgccgattaatcttttatttaattacaaagtcctcttttatttatataatattgacaataaaagtaaataataaaccttgaagtttaaactaattttaatatgtgttaatatacttaataggccttatgaaagtagacaatatttatctggaggggaaaatgactaataaaactaatttttttataaagcttataacttctatatatgacataaaggttttttctaaatatgcgaaagaaggaatattaagatcaatctcatatgcaatattccttagtttcttattgggaggcttaaagagtgcatttgttcaatataagaattataatttagatataatatctttagtagatcaaacggtagcatatttttcaataatactttttaatttattattgaattccttaattgtatcaattgttgcagcgcttttcacagtatttttaagaatggtagtcaaatatatagctttatattctttaaccttatatgcggctacattgccattaataatacaaataatactagaaatagctaatcctaatataagctttgatactatgtttattgttggaacattaacctatgtaatattgatattaaagtatataaaggatgaaataataagaaactatacttagtaatataagcatatatatataaatttctcaaattattatctaaatttgtaatattcaattattaaacttaaacgaacaattatataatcttttggaattagaaatatcatatcaaatttatttaatatggttgttagccgggaagttatgtgatattatatattaagggtatatggtaaaaaaagtaaaaaaaattacaaaaggggatttaaaaatggttgaggttaatattttgaaagataatcagattgatagggaaaatatattgaatagaaatgaccttattaagttatcgaaagatgaattagttagcaaacttattaatttatcagaatctaagaaaaatcaagaagattttattttgaatatttcacatgatttgagatcaccattaaatataattttaagtgttttacaatgttacaaggatgattataaagatattaaaaggtatggtaaatgccaggatcacatggatgttataaaaagaaattcatataaaatattaaaacttgtaaacaatctaatagatacaacaaaattagaaaaaaatcattatagtattaaaagagagaatttagatgtaattaacttaatagagtggaatatatcttcaatagataaatatgctaagcagaaggagatctctttagtttttgatacaaatgttgaagagtgcataatggcagtagacccagaagcaatagatagaataataatgaatttaatttctaatgcaataaagttctcgccaaagggaagtaatatatatataaatgcgtggaaaagtataaatcaattaactatttcggtaagggatgaaggaattgggataccaaaggaagagcaaaatacaatttttaatagatttgttcaatcttcaagaaataaaaaatctgagaattcgggaagtgggataggtcttgatctagttagatatttaactcaagctcataatggtagtatcgaattgaaaagtgaagagaattctggttgtgaatttataattaagttaccaatagaaagattacaggatgatgaaaataatagagataaatgtttaaatattaaaagtaaagtggaagtacttgaggtagagttttctgatatatatttgtaaaaatcatcatgaacaaggatagttatctaaaaattaaacctaatttttagataacttattccaaattgtatatgggactaagttgaataatagtattaaatttataaaattatgagaataatcaaattataaacttgattattataaccgcttgtgataagataaacttgttgcaaaaattgaatatggagcgttagttaaacggatataacataccgctacggacggtacattgagggttcgattccttcacgctctgccaaaataaaaagaatgggtaacccattctttttattttataaaactttagtaccaatattttcaccaaatataactttacattcaaagcctaatttagattgttctataatatcagcatctatttctatagatccttgttcaaagaataatatagttgtagatcctccaaatttaaaatagcctttttcgtcacctttatttactctaactctaggggaataagtttgaattattgaacctacacatgtagcaccaacctctatatgaagtacatctttaaagttatctgatttaaataaagaccattctcttttattttcacaaaaaagtttaggaacagattttaaagctattggatttacagaataatagtgcccttttataggatgattttcatatggaataccagaatcgataaagtgaaatctatgatagtcagtagggcataagcgtaatacaacgcatattccatttttatatttactagctacattatcatcattaattaactcttttaaactataagttaatcccttaatttgaattatattatctaagtcaatgtcttcataggcagttattcttccatctcctggagaaattaatatattattatctgaatttattggtctagcatcaaaatttaattctcgtgtaaagaaatcattaaaagatttaaattcattaattttcttcttcgacatagccatatcaatattaaagctatctacaaatggtgaaattttggatttgcttagctttgtatcacaatacttcccatataacttagaaaataattttttctttgcaataagttcagtaattgttttaccaactggtgattcataggtccattctatatatttctttccagcgataagttcttcttcataagattttgtagttctattatatacttgaatcataaatacaaatgtcaaaactttattaaataatttagagataacagctctaaagatttataatgttacagttatgacaagtatcctccatttcttattttaattagatatatctagttaaatctatagaataatcatttagtaaataatatagaaaaactgatatattgaataaattatgtgtaacatacatagtttattttttaccttaatattaattttatcacagataatcaaaatttcaaaagtaagattatatgtagtgaaagtttcatttttgatataaatagtaatatgtagaattgtggtttaataatgaactaaatgatataatatattgataatattggcataagtaattattgaaaaatgaggagaaatgttatgaacaaaacaaagaacttgatttttaaatctgcaataaaaatattttctgaatctggatatagaggtgctactatggatgatatagctgccaatgctggacttgtaaaggggacattatactatcatttcaagagtaaagaggaaatatttaatttcattgttgaggagggattgcaaatattacaaaatcaagttattgaagttcagaatatcaatataggtcctattgaaaaattaataaaaatatgtagaatacaattaacatttttatatggatatacagatttttttaaaatagtaatgagccagttgtgggggactgagcatagacaaaatgaattgcgtcataagatacgaaagtacataaatgaaattgaaattaatataagaactgcaatggaaattggggaaattaaaaaaggagatgtagaacttattgcattccaattttttggatcactatgttcatctgcaatatatgaatctatacatatagagaagataaatttagaagatattatagagagtactattaagtttacattgaatggattaggaatagatataaatagatatatttaaaatatgaagtttatattttagattctagataaatgtaattagttctagtttacacttataattaaatataaatagggagtgtatagagagaaattttttatgagcagtatatataatcattaccaaattgaataaaataacgagggaactgggggatactaatgaaatttttagcgagtgatttagatggaacgctatttagagataacaaaatttcagaaaaggatttagatgcattgaggcgactaaaagcgtttggaaataagataataatttcaacaggaagaagtttaaaaggagtaaatagtattttaaaggaatatccatttgagtatgattacttggttatgtgtaatggtggagtgataatggataacagaaataatattatacatgagaaatcaataccgaataaaatacaaaatagaataatagccgatttttatgatataggagattccttaatatattatgatgatggaaatgatacttatatgatagaaaataaattagttgatgtttcagctgtagatgctgatttttttaatcatttttctaatagggtaacattagaagaagcattgagtagcgtatcagattcacaaattatgagtgtgtttaatgtatctcaatctatagaaaaatcagaattggtaagagaaaagttgataaatgaatatgatgagtatatagaagcttttagaaatcaagtatttgtagatatagttgcaaagaattgttcaaagggaaatgcaattatgatgattttggaagatgaaaataaaggcgttgatagcttatatacggtcggcgattcaatgaatgatatttccatgtttaagattaccaataatagttatacatttaattcagtagaagaactaattaaaccatatgctgataatcttgtagatcatgtttttgaagtaatagaagatatgctaagataaaagattaatttagagattataacttattcagcaaattaaatggaaaataatttattaaagaaatataaaagttcagcaatttatagaaatgctgaactttttattataagtatattacatataatcttaatttatatggttaaattattatttattagaattagaaaattctaagtattcatcaaatgtcatagttctatcaactatagaaccatcatccttaatatctatgattctatttgctatagtttgaacgaactgatggtcatgagaagcaaataatatattactattataatctttcaaaccattatttacagctgtaattgattcaaggtcaaggtgattcgtaggttgatctaacattaatacattagcattagaaagcatcattttagacaacatacatctaactttttctcctcctgataatacattggcttcttttaatgcttcctcaccagagaataacattctgcctaggaatcctctgatatagctttcagatttttcctctgaatattgtctaagccaatctactaaagaaagattgcaatcgtcaaagtattttgagttatcagctgggaagtaagcattagttatagttattccccatttatattcaccgctatctggttccatttctccagataatattttgaataatgtagttacggctatttcattaccaataagagcaattttatcacctttatttactatgaaattcacgttatctaatactttaacaccatctactgtttttgataaatctttaaccattaagatatcattaccaacttctctttcaggtttaaaacctacaaatggatattttctacttgatggttgaatatcatctaaagtaattttatccaaaagttttttacgagaagtagcctgcttagatttagaagcattagcactaaatcttgcaataaagtcctgtaattccttaatcttttcttcctttttcttgttttgatcttttgacatttgaagagctaattgacttgattcataccagaagtcatagttacctacataaatttttatctttccaaagtcaacgtcagccatttgagtacaaactgaatttaagaagtgtctatcatgcgatacaactataacagttccatcaaagttacctaaaaagtcttctaaccagtttacagcctttaaatcaagaccgttagtaggttcgtctagaattagtattccaggattaccaaataaggcttgagctaaaagaactttaattttttctccaccagtcaattctgatacatttttaaagtgaagatcagttcctatacctagtccttgtaaaagcgaagatgcttcagattctgcttcccaaccattaagttcagcaaattcaccttctaattcagatgctttaattccatcttcatcagaaaagtcaggtttagcataaatttcatctttttccttcattatttggtatagtctttcattccccattattacagtttctaggacttgaaaattatcatacttataatgatcttgcttcaagacagacattcttgtgttaggagcaattataacttcaccagtattaggttctacctcacctgataatatttttaagaatgtactctttccagcgccattagcaccaataactccataacaatttcctggagtgaatttaaggttgacatcttcaaaaagcttacgtccaccaaatctcaaactaacatttgatacgtttatcaatatatttcgacctcatttcttcttaattataataatgcacaattagggaaaaaatcctttttatcgttaaaatatgttatcataaattaatttggaatttcatccttaattgtgcatcgtataaatagtttaactacatgttgcttattatatcatataattaatgatttttgcatttttaagtatttctataattttaaatttttgtattattacttaattaaaattaatgttatttataatttttggtactcccaaaacattcatctattattttttcactcatacgtctataaagattactcatgctaacatatgcgcatataagcagaaatttttcttcatagtctcctaaagaattatcttcattacttattagatttgtaatattatcataaattttagttgaggaagattttaaatcatctaagtttgaatcatatatatcaagaaaggattggtatatatcatgtaatggatattcttcttctttttcaaaagcaataattatggggctcaagatagtttttatatctgtaagggacagtgcaccttttaaattgtaaattaaccccattaaaataagatgacttttagtatacttcttatttttaattttcattaaaagattacctttggcgtagttattaatcatagttttagtaagaactttgtcatcatcatttcttttagtgtagcttaatttactttcaaatagctgcattacttgatccatatataaatcaatttcaggaaaatcatttaagttaatgttattagatgatttttgtgaatttatatatgcatcaatattaaagttattcatataatttcactcctcacatagtaatagaaactatgtcattattataaatttaatattatcgaaaagaagtagataattcaagcatttatgggtaaaatactatttaataaatagaaaataaacaaaaatggggttgcaatataaaaaaaaatatgaaataattctaatatagcaacatgtagttattaaaactacgtgggaataaatgggagggtaaaagaatggagaaatatttaagagaacctattaatggattaactcattttattggagcagttctatcattatttgcattaatagcaatgctagtaaaggtatatacaaggggaagttctacaataacatttgtatcagttttatttttcgggataagtatgattttattatatagcgcatcagcaacatatcattcagtaatagcaaatgataaagtaataaaaattctaaaacgattggatcattctatgatatttatattaatagcagggtcatatgcaccattttgcctagtggcgttaaatggaaaggtaggaataaatctatttctagcagtaacaatatgtgcagtaatcggaattgcatttaaattatgttgggtaacttgtcctagatggctcagcagtagcatgtatataggaattgggtggtttgcagtatttgccatatatccaatgtctcaagttttatcttcatttggactatcatggttagttcttggaggaataatgtatacaataggtggaataatatacgcattaaaatcagataaaataaaagtatggctctttggaagacatgaaatatttcatatatttattatgttgggaaccctttgtcattttatttgtgtatttgtatatataatttaaatcagaattttaagttgcattaatctagtagattatataggggataaaagaaatacttattttaaataaatttagtattccttttatccttatttttttataaaaacataattacatttatatggaactagattgttttattataaaacatcttttaaaacttgataagatatattaggtatagtaagataaattataaagaataaatagactttaaggggatggaaaaatgggctttcgtcaaaggttaaaagatgctagtagaatagtagtaaaggttggatcatcaacattaacttatgataatggaaatattaatttaagtagaattgaaaagctaacgcgcgtattatctgatgtagttaattcaggtaagcaggttacgcttgttacatcaggtgcagttgctgttggtgttaataaattaaaattgaaagaaaagcccgaaagtataagagaaaagcaagcagtagcagcagttggacaatgcgaactaatgcatatatatagtaaattttttggagaatatagccatgtggttgggcaagtgttactcacaagagatgtagtagaagatgatcatattagggaaaatgtatgcaatacatttgaaactttattagataataagataattcctatagtaaatgagaatgatacagtttcaatagatgagattgagaatatagttagatttggtgataatgataatctatcggcaatagttgcatcattaattaacgcagatttgttaataattttatctgatatagatgggttctatgattcagacccaaggaataatgagagtgcaaaattactaaatgaagttagagaaataactcctgagttagaagagtgcgctggaggtgcaggatcaaatctaggaactggtggaatgatcacaaaattatcagcagctaagacatccacaaaagcaggagtagatatgattttagcgaatggaagtgaaccagatataataatagatattttgaatggtgaagaaataggaactttatttgtatcgtaggtaaaataagaaatgggggctaaaaatgagtgagttaataattaaaggacaaaatgctaaaaatgcttcttatgatcttggtattgcatcaacaaagcaaaaagatgatgcacttatgattatggcagaggaattgataaaggcaaaaggagacataatatcagctaatcaagtggatttagatatagcagtatcaaaaggtacttcaaaagctatgttagatagattagctcttacagatgaaagaatagaaagcatggcagcagggcttaaagatgtcataaaacttcaagatccaataggtgaggtaatatctatgtggcaaagacctaatggattacaaataggtaagaagagagtaccgttaggagttattggaataatttatgaagcaaggcctaatgtaacttgtgatgcagcagggctttgtataaagactggaaatgctgttattctaagaggcggaagtgaagctattaattctaataaagctatagttaaggcattaacaaaaggaattgaaagatctggtttgcctaaggattcagtacagctagtagaagatacaagtagagaagttgcaactgaaatgatgaggttaaatgagtttatagatgttcttattccaagaggtggagcaggattaattcaagctgttcttaaaaatgctactgttccagttatagaaacaggaacaggcaattgtcatatatatgtagatagagactgcgattttgaaatggcaaaaaacattgttattaatgcaaaagcatcaagaccttctgtttgtaatgcagctgaaaagttacttataaatgaaaagatagtggaggactttttgccgatagtggttaatgccttaagagaaaacggcgttgctgttaaaggtgatgaagtatcacaatctataattaacgacattgagaaagctgctgaagaggattggggaaaagaatatttagattatataattgccgtaaaagtagttaaagatgtagatgaagcaatttcgcatataaataaatatggaacagggcattcggaagcaattattacagagagctataaaaattcacaaaagtttttacaaagagttgatgcagcagctgtatatgttaacgcgtcaacaagatttacagatggttcagagtttggttttggtgcagaaataggaataagcactcaaaagttacatgccagaggtccaatgggacttaaagaattaacaacaatcaaatatatcatttatggaaatggccaaataagataatacagagaatataaaggatattattgcatgatattctttatattcttatatattataataattaaagatactaaattaatattttcatgaataaatcaacataattaagtattgccaaggaaataatcttaaaatatataaagtgtgttgtaataatatgtaaatatttatatgataaaataataatattaaatagactttataactataaaaaagtatagtataatccaatgtgaaaacgtatcaaatggatctaaaaagggggatgacaattgtgaaaatagcattaatagcacatgacaaaaagaaggaagatattattgaattttcaaagaagtataaggatgtactagctaaatatgagctagttgctacaggaacaactggaacgaagatatcagaagcaacaggtcttgaagttaagagatatttatctggtccatatggaggagatcaacaattaggtggtcgtattgcagaaggaaagattgatctagtaatattttttacagatccattgacagcgcaacctcatgaaccagatgtatcagcattgcttagagtttgtaatgtacataatgtagctgttgttactaatataaaaacagcagaacttataattaaacaattttaaattatggacaaaccagttaaaatcatatatacaaaaacaaaatgtacttatcaaatgataagtacatttttagaaaaagtagtgttaaatttgagataggtcaattcagaattaactgtaactgcctaaattttctgaatattttattaattatatgataacataaattatataaatttgcaattagcaatcatttgtgtataaatggagtatgaacatgattataattctaaggtaatagcaaggaaatatagcttgtaaactaatagaatatcttaaaaggaaggattataatgactgatttaaacagatatacattaataactggtggtagtgacggaattggatttgagttagcaaaaatctatgccaaaaataaagataatttaattattatagcaaaagacgaaattaagctaaggaatactaaaagtaggcttgaagatcaatatggagtaattgtggaaataattcaatgtgacctatctgtggataaaggttataaaaagataatagaagttgtggaagaaaagaatttaattgtggataatttaataaataatgtaggcataggttgctttggtttttttcatgatttagaagagggacttgaagaaaagataataaatataaatattaccgcattgactatgcttacaaagtacttttctaaaaagatggttgagagaagacatggaggcattttaaatgtggcatcaacagcagcatttattggtggtcctaaaatgtctatatattattcaagcaaggcatatgttttatcattaacagaagcaatacatgatgagttgaaagatttgggaatcagggtaagttgcctttgccctgggcctgtaaggacatcatttcaagagaaggctggtataaaaaaatcacaaagatctaaaagatatttaatgaatgctagtgatatagcaaaatgtgcttacagagaattttcaatgggcaagacaataattattccaggatataaaaataagctgttgattttaggaaataaattaatccctagagcgttaggaagaaaaattatattaaagaataatagttagtatttatattagctattattcttttttttatataaatatgcatgcattatatcgatttaaatatagcattatcataataaatatttagttacttaattgggatacatattttaattcacatataattaaggattaacatacaaaagtaattatttgaattaatggtatatttatatctgaaataaaaagaatatgaataaaaattcaaataagtgtatttttatgctttatataatcttatttttatgataagatttatatattgaataaattaaagataaataagcaatagacaataagtaataaataaaaataattatattaaatattaaactatccttaaattatcttgacacaggattatctatcaactagaatagttagaaagagaaattttaaaagttaagatacactttaacttggtcctgtgaggccaaaaagggaagcatgactatgatatttgaaagctgaatgaaaaatttcatagcttattttttgaattcaaatatttgtatggtatatcacaggatagtgaagagatcaggttttctgaaatctctttattatccttttgttttatattaaacaaagattcataaggtgtagttttagcaaaaatatatttgtaggaggcttaagtatgaaagcaaagcttatattagaaaacggcatgatttttgaaggaaaagcttttggatatctaaaagaaagcgtcggagaagtagtatttacaactggaatgacaggttatcaagaagtacttactgatccatcttattacggacaaatagtaacgatgacttaccctttaatagggaattatgggataaaccttgaagatatggagtctgattcaataaaagtaaggggttttattgttagagaaaaatgtaatatgccaagtaactttagatgtgaattagaacttgaagattttttaaaacaaggaaaagttattggcttggaaggaatagatacaagagctttaactaaggttttaagaaatagtggtactatgagaggtcttatagcactagaagatgttgacgatgaatatgtgaaagaaaaaatagcaggattttctactaaggaagctgtaaagactgttacaacaaataagtcttatgtggttgaaggaacaggaaaacatattgcggttatggatttcggtataaagactaatataataaggaatttcaaaaagagaggctgcaaattaactatattcccagcaacagcaacagcagaagaagttttaaatattaacccggacttaatatttttatctaatggacctggggatccagaagatttagattttgccatagaaaatattaaaaaattagttggaaagaaaccaataacaggtatttgcttagggcatcaattattgggattagcgttaggtggtaaaactactaaattgaagtttggacatagaggatgcaaccatcctgttaaagatttagaagctaatattgtgcatataacttcgcaaaatcatgggtatgtagtagagaagttaccagatgacatggaagttactcacgttaatataaatgatggaactgtagaaggaatgaaacataagactttaccaatatactcagttcaatttcatccagaagcatcagcaggtccaaaagacagtgaatatatatttgataagttcttagaatatgcactataggaggttttagtaaaatgccattaaataaagatataaaaaaagttttagttataggatcaggtccgatagtcataggtcaagcagcagagttcgattactctggaactcaagcttgtgaagcattaaaatcagaaggtatagaagttgtacttgtaaattcaaaccctgcaacaataatgactgataaagaagttgcagataaagtttatttagagccattaacattagaatttgttgaaaaagtaatagctaaggaaagaccagacagcttacttgcaggaatgggtggtcaaacaggacttaaccttgcagtagaattacatgattctggtatattagaaaaatacaatgtaaaagtaatcggaacctctattgcatcaattaaagaaggtgaagatagagagttatttagagatatgatgaataggattggagaaccagttataaagagtgaaattgtaactgacttaactgcaggtttggagttcgctaataagattggttatccagttatagttagaccagcttatacattaggaggatctggcggtggtatcgctgatgacgaggaacaacttagaacaatattagaatcgggacttcaactaagcacaattggtcaagttctacttgaaaagagcgttaaggggtggaaagaagtagagtacgaagtaatgagagactcttatggaaactgtattactgtatgtaatatggaaaatatagatcctgttggtatacacactggagatagtatagttgtagctccatcacaaactctttcagataaagaatatcaaatgcttagaacagcatcaataaatataataaatgcagttggaattgaaggtggatgtaatgtacagttctcgctaaatccaaatagttttgaatatgcagttatagaaataaatccgagagtttcaagaagttcagcactagcatcaaaagcaacaggatatcctattgcaaaacttgctgctaaaatagctcttggatatggattagacgaaataaaaaatgctgttacacaaaaaacatatgcgtgttttgaaccaacacttgattatgttgtagtaaaaataccaaaatggcctttcgataaattctttggtgctgacagagaacttggaacaaaaatgatggcaactggagaaattatggctattggagccaattttgagcaggcgtttttaaaaggaattagaagcttagaaataggaaaatattcattagatcataataaatttaaagaatatagtatttcaaaattaaagagcatagtaatgaagcctgatgatgaaagaatctttgcattagctgagatgataagaagagattacatgatagatagaataaataaaattactggaatcgatatgtttttcttagaaaaaataaagtggatagttgaagaagaacaaagattaaaattaagtaaaatagaagatttagataaggaatggttacatcatttaaagaaaaaaggattttctgataaagctatagctgatatgctaaaggttagtccagacgatgtatatagattaagagacatatggagtataaagccttcatataaaatggttgatacttgtggaggagaatttgaagcattatctccatactattactcaacttatgagcaatatgatgaagtagaagtatcaaataataaaaaagttatagttataggttcaggtccaataagaatagggcaaggtattgaatttgactacgcgtcagtacattgcgtaaaagcactaaagaaacttggaattgaaactattatagttaataacaacccagaaacagtaagtactgattttgatgtatcagataagttatattttgagccattaacggaagaagatgttttaaatataatagaaaaagaaaaaccagatggtgtaatacttcaatttggtggtcaaacagctattaagcttgcaaacttcttaaaggaacaaaatattgtaacgcttggaactacagcagatcaaatagatatggctgaagatagagaaaagtttgatgaattactagaaagattaggaatatcaagaccaaaaggtaaaggaatatggtctttagaagaaggattagaagaagctaagagattaaagttcccagtacttgttagaccttcatatgtaattggtggtcaaggaatggaaataactcatgacgaagaagagttaacatactacttagaaaatgctttcgctaaagacagtaaaaatccaatacttatagataaatatctaatgggtagagaaatagaagtagatgccatatcagatggagagaatattttaataccgggtatcatggaacacttagaaagagctggagttcattcaggggatagtgtaactatgtatccaagccaaaatatatctgacaaaattaaagcagatgtattagagtatactaaaaaattagcattagcaattgggataaagggtatgataaatattcaattcatagaatttgaaggagaattatatgtaattgaagttaatccaagagcatcaagaacagtaccatatataagcaaggtaagtggagttccaatagtagatttagctacacaagtaatgcttggcgctaaattaaaggaattgggatatggaatagatgtatataaggaacctgaactagtttcagttaaagttccagtattctcaactcaaaagttacctaatgttgaagtaagcttaggacctgaaatgagatcaacaggagaagttttaggagttggtagaaacataaaggaagcactttacaaaggatttgttggagcgtatatgtatccttcaaaggaaaaaggaaaaatacttgctacaataaataagcatgataaggcagaattcctaccaatagcaaaagatctagcatcagtaggatacaaatttattgcaacatcaggaacttgcgctttattgaaggaagcaggtatagaagtagaagaaataagaaagatagatgaagaagaaccaaatattttagatatagttaaaaacagagaagtagacctagttgtaaatactccaacaaaaggaaatgattcgaaaagagatggtttcttaataagaagagcagcagttgagagaaacttaggagtaattacagcattagatacattaagagcaattgcagatgtggaacttgagaagtttgatgagaataaggatttggaagtattcaatatagcaaaataaaaattaatgagttaaagcggtattaaaaagactaatcaagttactgcacttatttaaaaattaaaactaggatatgacagatgatatcctagtttttttcatgaaatatattattaaaaggaaatattgacaagtgaacatatgttctgtataatacaattaatgaacatatgtttgctaaggagatgtgtattatgaacgaatcgggaaatttttttgttaagttaaactgtaaaagcattgataatattagaagcttaattatagataaacagggtaattacataaaacaacaagaaaaatacataatgtgtgctggaaagtatgataaaaatggttggacgttagtttttagagctaaaagttttaaagaagctgaagcattagcaaatttgaatccatttctaaatagaagaagcataaattaaagtacataaaatctagatgaattttcatactatatatctaaactttcattcattaactagtgaaaaattaaagaatatataaaaaataagctacaaaaattttataatttagtagcttattttatatttcatattttatatcagaaatgacaattgaaagattttctattaaattgactttagaaccaattttattaggataatcgcttttaagtatttttatagttggtcttaatggaaagttaggcatagtctcttcaactactcctacatcaccattgctaaggcttacaattgttccctgagggaatgggataacaattttacagaatacgttaagcatatcatgatcaaagagtgttccggcatttgacattaagtattcgagtgcatcactaggacacatagctcttttataaggcctgtcagaagttaatgcatcataaacatctgcaatacttacaattctagcgagatagctgattttattaccagatatactattagggtaacctagtccatcaaatctctcatgatgttgcagaactataagtttgatatgagagcttaagctaaaaaagttattcaaaaatttatatccatatagagaatgattttttattacttcaaattcttcaggtgttaatttacctggcttttgaagaatttcacttggaataaatgattttcctatatcatgaattagcgcaccaatgcagagataagttagattgcgcttagataaatttaagctgattccaagtataagtgatattacagcaacatttacacaatgagcataagtataattatccatgctctttatatcaactaaagaaatcagtatatttttatttgataaaacattatctaataactcttctgctatattagtaattgaattgaaatattgttgttcctgctttgtatactcactaatactcctcttttcaaatttatgaacagaagctattctttctatatcagagaatgtttctttaattacagatatagatttttgccttaattctggctttataacatcttcaatttcagcagaactatagtcatcaattatatataaagagaatattttatattccttaattttttgcaacataatatcgtttaacagaataccagctctaagtagacatctaccatcaggggtatatatgtctttgcctagcaatgaattttctcttacacattcaattggaattaatcgcatgattatacctcaccaaattaataataatcattatatcataaataacatgtaaatttatacaatgataatgcaaaaatcttaaaataatatctaaaattcgcatatattatgaaaatatttttatataaaaagacgtttattctgaatgatatagagttttttgataaaattatatttaataatgtaattaaaaaggttatgtaaataagttaatatttgataattcatttaattatcaaattgagtagatggaaagcagaaattatagacattggataaataaagtaataaaatatttgtagataaaatatattaaagaataataaatcagatttatgtttacttttttattattgtaattttaaatattagttaatacttaagattcaaccaaaattatttttagatttgaaatgtggtttcatatatctgattagttatttgtgcatacataaatatttgaaaaaatggagtgaggacgttttgaatataaaaactgaccccataggattttttgattcaggggtaggaggtttaagcgtgatgagagaagcaatatctatcatgcctaatgaaaactttatatatttcggagattcaaagaatgcaccctatggaactaagaaagtaagtgaggtaagagatcttacaattgatgctgttgagtttttactaagtaaaaatgttaaagcggttgtaatagcctgcaatactgcaactagtgcagcaatagaagagattagaagtaaatataaacagatatccataataggaatagagccagcattaaagccagctgttaagttaaatagaaaaggtcaaataataataatggcaacgcctatgacattgagggaaaagaaatttaaattattaatggataaatataaaaatgaggctaatataatatcattaccatgtgcagggttagtagaatttatagaacagggaatagtagagggcgaagatctagagtattacttaaaggaaaagttcaaaggttacttagataatgatataagctccatagttcttggatgtactcattatccatttataaaaaaggctttatcaaacgttattggaaaggaaatacctcttattgatggtggatttggtactgctcaagaattgaagaggaagttaattgaaagtggtttactaaatgattctaaagaaaaggggaatatagaaatttgtaattcaataaatgatgataaagtgatagatttttgttatagtttaattaattttaaaatataaatatgattcagatttattgagatatataatataaggatgaatttaaatttatgttttagataataatactaattaagattgatatcgagaggagaatatttaaagatgaagaatccaattattacaatgactatggaaaatggtggagttataaaagcagaattatatcctgaggcagcaccaaatacagtgaggaattttgtagacttaatcaatagaggattttatgatggtctaatatttcatagagttattccaaatttcatgattcaagggggatgcccagaaggaacaggcattggtggcccaggatattcaataaagggagagtttacaggcaatggttttaagaatactttaaaacatacaagaggagtattatcaatggctagagctatgcatccagattcagcaggaagccaatttttcattatggtagctgatgctccacatttagatggccagtatgcatcatttggtaaggttattgaaggaatggaagtagccgataagattgttgcacaaaaaactgatatgtcagataggccttatgaagatcaagtaataaaaagtgttacagtagatatgcaaggggaagaaataaaagagcctgaaataattgaagagtaaaaaataccattctacaagactatagtaagtaaaaagaagagaggtgtcatggatggctacaaataataaatgtatattagcgtatggattaaaagaggatgaaattaagaaaattgagagtcagaatattaaagttatagaaattaataagaatatgactttaatgacattagaagatataattaatggaaacaaaaatgaagattcttacgatgaaatgcagttgagtgaaaaggcactaattttcaatggatttaaggatgaacaattgaaagttactattagatatattagaagctttattcaaggtggagtacttgctgtatctacagcacagaattacaagtggacttttaaatatctattagagcacttaattgaagaaagagaatggtataaagaacaacaaaaggggagaaagtaaagtgagtcgtgtaggagaaaatataaaacaagctagagaaaagagcggacttacggttaaagctttagctaaaaaactaggtgtagcagaaaaatatttaaatgaagttgaaatgggaagaaaagttgcacctgaatcactaatagataaagcgggcaaggtattaaaagctgatttaaatgacataagcatggttgttaccgatgaagtattgatggaagaaagaaaaactttaaaggaagttcctaaaagaaatgtagaaagttcagaagtttggactgatgctttctcatcagtacttagaagtgttccaatatatgattattcactatctaataaaaagggttctaaagagatgcctattcattcaaataaaatcgagaattatcctcaagataaagtattttatttagaaattgaagatgatgaaatgaatggatttagaatgctaaagggtgatgttgcatttgcacatgctgtgaaggatataagtaatagcggatttttcttaatagattataagggaaaaaggaaagtaagacaaataaaggtattaggtaattctaaattacttttagtaagcaatgctggaagtcttcttactgaaaccatggaattaaaagaagtagatgtaattgctaaattagaaagactagaaattacattataaacaactaatgtaagaactcttatattgaagaattaaagcgtaggtagaaacagagaataattgaatttttcagttattctctgtttttgttacattaaaacatttaattgcatagtatatctatgaatatatttaattaaggtgtggtaattatgcctgaattggagacacaaatatcttcaaaggtagatgcatcaataggattattagctaatgttccaaaagctatattagatgaactaggttataagtatcagagtcagggtaacaatgtggagctcactattttatatagagatactcaagaacaaacaaaatcatttgttgaaggcttaggaggaacttttcaggatttaggatttaactttgctgttgttaatatacccagagataaattagaacagctatcaatgagtaattctattcaatatatagaattaccaaagaacttatatgagcaagaccaagaaagtaatagggcatcctgtatacttcaattggctccaaattttgatgtttcaggtgaagggatattagtcggctttgtagattctgggatagattatactcaccctgcttttatggattcgaccggaacatccactagaatagaatacatttatgatttaagtacagggggaaatgtatataataagcaaatgataaatgaagcaataaaatccaataatccattctcagtagttccatcaatagacaatagtggacatggaactcacgttgcaggaatcgcatgtggtgggggaagaataaatcctatgtatagaggtgtagctcctaattcgtctatagcaatggttaaagctgctaggggaactgcaatcttaagctctcagattatgcagggaatcaaatttcttatagatagaggtaaagaactgaatatgccgctagttattagtattagtcttagcactaatgatggagcacacgatggaagcagcttactagagcaatacattaggactatatctaacttggaaagagtatctattgttattgcggcaggaaatgaaggtgatgcaggtcatcatgttggcggacaattagttaaaacacaaaggcaaatttttaatatagcaagcgaagaaaaatcaatagtaatgaatttttataagacaatattacctaatatatcagttaatataataaatccaacaagccaaggaactggaaatattaatatacaagaaggttacattcaaggaacaatagggagtgatagatacgatatatatatatctggacctaaaccttttgaattgaatagtgaaatcagaataattctttctgctagatctggctttcttgttgaaggtgtatggacattagaaataaatgttacgaatgaatacttaggagcatattcaatatggcttccggttttagaaggattaaatcctgcaactaaatttttagaacctaatcaatataatacgcttggcataccagcaacagtagataatataatagctgtaggaagttataattatagaaccaataatttatcatcattcagtggaagaggtgcacaagatcagaatatagtaagacctgatttagtagccccaggagaggatattgcagggccggtaccaaatggtggatacgataataaaacaggtacatcaatggctactcctcaagtatctggaatatgtgcgttaatgatgcaatggggaatagttaaaggaaatgatccatatttgtttggtcaaaggttaaaatattatttattaagaggagccagaagaagacgtacagatgtaacatatccaaatccctcatggggatatggtgaagtatgtatattcaacagtttaagagcgttacaaaatgatttaaatgctattttgactagaggaaatataaattcaagagatatacaggtaacaaatagcgtacctaataaatataatattttgagaaaaaatataaagagggaagttatggagaatacgaatagtggaaatacctcaacaaatatcggtaggttaaagattcaatgtttcaggggggaggattatattccaattgatggagccagaataactgtaagaacaccacaaggcgctgaaagtgttaatagtattcagctagttacagattcagttggattgacacaaataattgaattgacagcgccacctttagaatattctttgaatcctaatagcaaccaagtgccttatagtttatatgatataacggttgaaagagatggatttaacccaatagtaataagaggatgtcaagtatttcctacacaggttgcctatcagatttgtaatttgacaagtaacttaggaaggggaatgatgagacaagaggttataaatatacaaccaaatacattgaatggaaattttccacctaaaataccagaggatccagaaaagcagttacccccaccaagttctggagttgtattgcctcaaccaatagttccagaatatattattgtacaccaaggtgggccaaatgatccatcagcaccaaattataaagtaccttttaaagattatattaaaaatgttgcttccagtgaaatatattcaacttggaatgaatctgctataagagcaaatgtattctgcattgtatcatttacgctaaatagaatttatactgaatggtacagaggaaaaggaaagaattttgatattaccagttcaacagcttatgatcacgcatttaattatggaagaaatatttacgatagtataagtgctattgtagatgaaatattttctacttatataaagagagttggagctaaacaaccacttttgacacaatattgtgatggaaagagtgttacctgccctcagtggttaagccaatggggaagtcagcaattagctcaacaaggaatggttccatatgatattttgaaaaattattatggaaatgatatcgaactaactacagctgaaaaagtttctggaagcccacagtcataccctggtgaaccgcttactataggatcttcaggtccagcagtaagaactatccagaatcaattgaatagaatagctagaaattatcctttgatacctaaggttgctgaggatggacagtttaatcaaaagacagcagatgcagtaaaaacatttcaacaaatatttacattaccacaaaccggaattgttgattatgcaacatggtatagaatatcggacatctatgttggagtatcaaggatagcagaacttagagattcttcaagtttaagaagtacgcttggaatgaatgaatttatgcctccgattataccaggtttagataataaaagaggaattcctaaattttattattagaattatattaagatggtttttagatgtagaagcagttcccattttctctgtcagctacattatatagctgtgattagaataggagctgctataattaatgaaattattagaagatatatgtatgataaaaatttatttttctattccttctagattaaattcaggaatgaaatcagatatgttagcaccttcatcttgtataaatccattaactacgccaatatctaaagcataattgattaggctatcgtagtgttttggattaagcttcttatttatttctggataatcgcaagcattaaacataggaatatattgattcattagacttatataaatatcggttttatatctattatatagaatatctattattttttttgaatcaaaaaggagtccaggaagcattaggtgccttacaacaactccttttagtatatttccttttgaatcaaaattgggagtgccaacttgtcttagcatttcatctattattttgatagtattggaagcataatcattaactttagagtattttagagaatatttattatcaaaatatttgaagtccggcaaataaacatcaatgtatccatccaataattttatagtttcaatagaatcataactattggtattataaagaactgggatagttaaattattttttttagctatttttaaggattcaattatttgaggaacataatgagtaggagtcactaagttaatgttgtttgcaccttttttctgaagttctagaaaaatttcagaaagtctttcaatagatatttctgcaccaacaattgatgtgtttttaatactatttttattaaaatcagaagaagatgaattaacactaatcccctgacttatattatagttttggcaaaatacgcattttagattacagtgagaaaaaaatacagtaccagaaccatttccttgtgaaataggtggctcttcccaaagatgaagggaagccttagccacttttaggatattgctagctttgcaatatcctatttcaccattatttctatttactttacaatctctattacataaagtacattcatttaataaatctagataattcatttatatcaaatcctttaagaataattattaatatattttataaaaagtatatcataattatttgatttgagtcgtgttagaaaaatcttttttatgcttaaaaaagaatagtatacattggaatataaaaatcaaacttaatagcccaaatataggatatagtttagttataagagttccaaatccaaattgggaaattaaaagagcaagacttattacgataaaaattgcttttttaaattttatattaaatgtttgctctagggttttacttatggaatatatgtcagaaacttcagtagaaaacatctccaaccagattatcacgagtaacaatgcttgaattaagttaccaaatctattagcgacaaaaagtaaaggtatctcatatttatatatataaggttgattaattgttaataataaatttatcattaaacaaagtatagttagtccaattgcgccggttactattccagtaatcattattttacttttcttcatttgagtgctaagtggtactaggactcctgaggctgaaagtgtattatatccagcataaagtactgttgaaataaagattccagttttttgttttggaaagctagcgatattatctaacgaaactgtatttctacaaaatgcaaaatataaaactgtaatcaaagtaagagtacaaattaaacctggaacaataaaggaattaacttcaattaatccttcagtatctctaagtagaaaaaatatggctattgcaatcattatcagtgagccaattatcttgggtattccaaaaaactgatgtatcaaagcaccacttccagcaagtattatagatgcgctggaaataagaaagagagttgttataaaaccagtgattttaccaaatatattaggacttattatattcataacatcactataagagctaagattataattaatgcttattctagaaattatagaacttattaagatatagaaaataccacaacctataattcctatgaaactagatataccgtattgagtaaaaaattctgtgatttcttttccagaagcaagaccagccccaactattgttccgataaacacagtggcaacttgaaatacttttactatttcctttttcaatatttatcccccttaaagaatgttccttttattaaatatataaggtttacttttaatttattctttaaatgttacaatatttaaagaaggtatattagacacataaagaggaggaaatatgaacagtttttgggatggaaaaagatatcatagtttaaactattttttaagaaataaatttggtgaaaaagtatttaaaatatctttagatggaggattttcttgtccgaatagagatggaaagataagtaatgggggctgtcttttttgtagtgaaagaggttcaggagattatgctggtgacagagaattgtctatttcaaagcaatttcatgatataaaggatatgatgtcacaaaagtggaaaagtggtaagtatatagcttattttcaggcttacacaaacacgtatgcacctattgatgagttgaaaagaaaatatgaagaggcattaaatcaggagggagttgtagctatcgcaatagcaacaagacctgattgcttagatgaggatgtattagaattattggagaacataaacaataagatttatctttggatagaacttggacttcaaaccagcaatgatgatactgctaaaagaattaatagaggatataaattagatgtatttgaaaatgcaatgagaaaattaaaagagagaaatattgatgtagtagttcatgatattttaggattaccgggtgaaactaaagaggatatgttagaaacaataaattatatagctcattcaggggctaaaggaattaaactgcatctactacatttaatgaagcaaacacctatggtaaagttatacgaggcaggagatcttaagtttctatcgcaagatgattatatagatcttgtgactcatggaataacactacttccaaaggacatggtagttcacaggttaacaggcgatgcaccaagagatctcttgatcggaccaatgtggagtttaaaaaaatgggaagttttaaattcaatagataggactctagaagataacaacttatggcaaggaaaaaatttcagagagtaactatatattaattctaatgattaggaatggagtaagtaaaatgaaaatagatattataatttcagcagatgatatagttgaaagcagagtaatgaataagattgcagttataattgatatatttagagctacatctgtaattataacagcactagataatggagcaagagaagttattccttatttgactattgaggaaacactggaatatgcaaagaaacttagtagagataattatattttaggaggagagagaaaagctgttaaaattgaaggttttgatctatcaaattctccattagaatatacaaaagaaaaagttgaaggcaaaacagtgcttatgactacaacaaatggaacaagagctttaacaaagtcaatggaggctaaaagagtttttataggtgctatgataaatggagaatcagtggcgaaaaaattgattaatataaatgatgatgtggttattattaatgcaggaacaaatggaaacttttcaatggatgattttatttgtagtggatatataattaaccaaatgctagatattaatagaaatatagagttaacagatatagcaaagactgcctgtatgatatataaagaaaatataaatatcttaagctatgtacgagaagcatctcactattcagtaatgaaatccttaggattaaataatgatattgaatattgcataaaaaaaagcatcatagatatagttccagaatataaagatggaaaaataacctgtgaatgaaaaactgtttaagattataattaaaaggggctgttgcaaaactaacatagttagttttgtagcggctcatttttttagatataaaaaatgtgaattccgaagaactcacattcattgtataatttacttatgctaaaaaccaaattaca

SEQ ID NO: 50 - DNA, 42273 bp, Clostridium beijerinckii
cttttgttgttagaaattattttaagtaatctattattttaaatttttgaaatgatttaagttatgaaagcgaggaatttttaaatgaaaacacgtatggaatcagactcaataggaaccatggaggtaccagctagtgcatattacggcattcaatcattaagagcaaaaaacaattttcctattactgaaagaaaattaaataaggaatttataattagtcttgctgaaataaaaaaagctgctgctattacaaatagagatgcaaatttcttaacttcaacgattgccaatgctataataaatgcttgcgatgagattatttgcgggaaattacatgaagaatttatagtagattcaattcaaggaggcgcaggaacttctgctaacatgaatgctaatgaagttatagctaatcgcgcaattgaactccttggagaaattaaaggcagttataatgttgtacacccaaacgatcacgtaaatatggcccaatctactaatgatgtattccctacagccggaaaacttacagttctaaaaatgcttccaaaaactattgcagagcttcaacgtttatataacactctcaaattaaaatcgttagaatttaataatataattaaaatgggacgtactcaacttcaagatgcagttccaattagacttggacaatcattcaatgcttttgcatcgatgataaaacgtgatatagaacgcttaaaaagggctgaaaaagatatgcttgttctaaatatagggggcacagctattggtacagcaataaatgtaagccctgaatattttcataatataactcctaatttaagaaaaatttgcggtcttaatttaactcaatcaaatgatttaattgatgcgactcaaaatcttgactgttttgtaagtgtatcaggacttctaaaaacatgtgcagttaatctatctaaaatggcaaatgatttaagactgctatctagtggtccaaaaacaggttttgcagaaattaacctgccttcaatgcaaaatggttcttctattatgcctggaaaagttaatcctgttattttagaagtagtctcacaagttgcatttaacattataggtaatgatttaacaataactatggcagcagaagcaggtcaattagagcttaatgcttttgaacccgttctattctataaattatttgaatcaatagaaacgcttcaaaatgctactgcaactttagttgataattgtattataggtattactgctaatgaagtaagatgcaaagaactcttagacaatagtgttggtattgtaacagcactttgcccatacattggataccaaaattctgctgacattgcaaaagaatcattaaaatcaggaatttctgtaaaggaacttgttctggcaaaaggtatattaacttctgaggaattagaacaaattctagatccaaatttaatgacacaattgaattcttcactaacaatagaatcaaaggaaaaaataaatcaagcaatataatttttaactcttggtataattttcaaaaatttggattatactattatatgaacatgattttatgaatcgtggtattaaccaaaaagagatagcacatcttatatgcgccatctcttttttatattattatacataaatatgactgattaaatcttacttaaacaatattcattgaatatataagtaattggatactttttaagtccattaaaagcatctctacttctaaaatcagaggattccaaacaaaaagattcgctagaaacactttcatcatcttcttcttcgaaatttctaaaacaataaaaatcttcttctttatttgcttcaatagaatatacacctagcatacatgaaaaatcagattccatagtatattctttaggcagttttttcttcattttatataataattcttgcaaattatatccttcaacagtataagattttccatctagatcaagtgaaagcatattattataagaatttctctgtctcttaatgcataatatagattctctcacacattcctcatcatcatatgtcattattaatggaattctcacatccataacatattctattaattcatcatcctttaaatagaaaagttgtttatgctcattaggtctcttagtataaaaatcgaaatcaaaatgatcatcataaaagacgcaatctcttatattaaattgaagtcccccttttagaaagtatagttctgcctgctcacagccaaaattatcagtatatatagcagaatattttactttgaccatataatatttaatatccctccccaatttatttttctcatatcccattataatttaaagtaaagaatttaaattataataaaaaaccacctttctatattaccacatttaaccacaaacagcaaagattattatctatgtacttttaattataaataaaatgtttattttgaggttcatagaaagatagttcatgtttttgagctaattcctttatcaaatcgcttacataatcagccttgctaaatacacaagacataataatgtgtccttctgatttatcaaaagttacactccatgggcataaatctaaatccccaatttcctcttcacttatatcatcaatttcaggatgcttagctgttaattcttcataaaaatcttgtattttttgtgtaggaccaattaacgaagtatctccttcacatagtcttttatatagaatttctgcatcctctttattttttacaatattgcagtgccataccgcacaatcccaactcacattcttccccctttgtaataagctaaagtatcattttcactaatttgcttttataataaccttcctcataattattataatgtatatctttaattttcaaaataataatttactaataataaaaaattattttcaaagttattaaatatggggttcggaatcaatagtaacttggtttaactcaaaataaaacttaatgatcttttattaaatgctgcaataactaaattacctatcaaaagcccaataaccatccctgcaaaaacatctgatggataatgtacatataagtataaccttgaaaagcctattaatgtgcttagagttaatgcaagtatcccagctcttttattcatataattaattatagttgctggtgcaaatgaacacatagtatggcctgacggaaaagaaaaatctgttggcagcttcatatgaatcatatttaatattggttcagcattaaaaggacgaattctggctactaaaggttttaagcctaaatttcctacaataaaacataatatcaaagagcatatgatcataataccatacttcctatattcttttcctattataagtattaaagcaataaacgtccatatagtaattttacttccaagaatagttattagcggcatgatcttatctaaagcgggagccctcatatggatttgtataaattctaaaatattattatctatgttctgaatcacttccataaattccaattccttttctcatttattttttcatagttttttgtattgcaatatagataaaccaactataatctatacttatgcatacatctcaacgaaatgaataatatacttttgttccagtttctaggtaattatgatgggtgattctaaggctataaagttgcatccaaagtgctagcctcaaagagcaagcgctcacagagaaagttctgcttaccaaatgtaaaatttggagcatcactttttgaactagcacatttggaacaacttatagccaagaatcacatccatcaaaattaccaatgaaacattccacaaaagtatatcactcatttctgtttggaaaatatttcatagtctgagcatagcttataattgtggtatctctagcaagtttacgtttaagatattaataaaaaagagctcaattaatcttaaaatgtaaaaacttaagtgcaatatatagtttatattgataattgctgtaaatttttctaatactactgtatcattaatttagcaggatttatatagtttcttattatatacaaatactatttactcttattgataggaattatctttatccctaatatagaaaattttacaaaggtaatatataattgttttatatgtaattatacaattataagaaagaaggtaacatttaatgtatgaatttaaagaagaatttaagactggaattgattttattgacgaacagcacaaagttctcttcgaaatagcagacaaagcttacaatctactaaaaaatgattttacaactgataaatatgataacatattagagttagtagatgagctacgcgactatacatcattccattttaaagcagaagaagaatatatgaagaaaattaactataaaagaatgttcactcaaaagatagaacatgacgcttttataaaaagaattaatgaagtagattttaggagtattgatgaaaatcagaatgaatcgatttctactctattacagcttttaaatgattggttaattgaacatatctttgaaaacgataagttgataggtcaataaagctccaatttagcattttctaggacaagctttttctttttagatataaaattattataaaaaaaaaatactatctctcaatgttttttactaatacattttgaaatagtattttttatttttccaagttttcacagattggtaatttcactttatatctataggataatttatttcaactatctatccttcttcccatgccccatctggtcctaaataataagttccaatatatatgtccttaaccattactccagaggaatttaaataatataaatttccattatatctaagccaccctgtcaccatttctccagaactatttaaataataccaattccctctattttgaatccatccactcagcatttttcctgtaactgtgtccagataataccacttgccttcacttttaagccatccggtttttgccataccgttttcatctaaataataccaattatctttgtatttataccaaccagtattctgttcgggaccactataatatcgccagctattgtttacatacacccattccccatttgccttcacatcataaattaattgaaatgcaaatacaatacttaataaagtgcctaacattaatatatatttaaaactaatagtttttatcattctcttatcctctccaaatcaaaaatctatatttactattatttttattaacataatttataaaatagacttaaaattctgaaataaaaaaaacgtaggcgactgtggagccgtagattttttttacgcatctgccttttcgaacgtatgtgagaaaaatttggcaggcgaatatattttcttttttattctctttacaaaccgtaaccttctgaattggtcttttctataacttatacacagatttaacttgaatataaattcctagagaataaaaaaattcaattacactgctgtatatatgatgaaattaagtttctacactctactcctaattaattatctggttcattagaatctaaaatctaagtctattattgcaatatagatttataaaattgtttatatatttacataactggtatattataatattatgtaaaaacaatgttaaggaggctttattatgtcaaatttatttaaacactctctcgaaattaaacctagacaatctatggttgatataacttcttatataagagaagatattaaaaacagtaatattagaaatggaatcatagtagtttattgccctcatactaccgctggaataactataaatgaaaatgcagatccagatgtagttagcgatttaatatatggttttgaaaaaatttacccaaccacagattcgaattataagcattttgaagggaattcacattctcacctaaaatcttcaacagtaggtgcttcacaaactcttattttaaataatggcaatctaattttaggacgatggcaaaacgtatatttctgcgagtttgatggtcctagggatagaatgttttatgtaaaaataatagaaggctaatcctggttaaattttatatttacataaaaattaaagaggaatgtaaacctaaatacattcctctttagcaacaaatctaaaaaaatattttcttttatctagcatcatgtcctgtattctctatacagcttttaatttcttctactgttgcaggagcattatatactacttcaacacttccacgtgcaagatctacacaaaccttatctacaccttggattttttccagtgcatttttaacttgtgttttcatattttcatttgctaatccatcaacattataatgtattctttccatatatactattctcctttttctacaaagtaacaagtatagtatgttcaaaatcacactattatatcaatattttttaaagaaaatcgactcacatttgctcgctgatactcgcaaagtaagcgaccataatcaaatcatagatacttacagagaaagttcttcacctataaattaaacagctattctgcaattaagaacccttcacctatagccaaatacaagattttgatcatcacttttgaaatgtctgcttaactgattcacatcaaataacagattcgagttcactacttataaaatcaaatcatccaatgttctttttggaacatgatgtacttgtttgtcatctctccaatactttacatctccagattcatttatattttctataactacttcttctttaggataaccaagagctactaccaaggaaatttcaaatttttcatctaaattgagttcttctcttagattctttctatctatatttcctataatgcatccgcccaaattattttcaacagctccaagtaacatactttgtactgctatgccatcatcttgcggcgcaccttggccaagactcgtatcctttagtactactatataagcacttggtttttcgccttctttaggaccatcccaatccttatagtaacctgcccaaaatatgcatttacttattttttcattttgttctttttcatttgataaaatataccttaatacttgtttattagctcctgatggtgatagcctcgctaaatccaccaagtctcttaaagtattcatatcaacgctcttatcctgataaaacctcctatatgacctatttttcaatacaagctcttttatcattttaacaaaccacctatcttagtttttctacctttctttgtatatcctgcatcctcatatctgtagatgctataagctccgcacattcctttaagtcttgcgtaatatgcagcggtccatctccagatgtcttataatataatttatgctcaagactagcccaaaagtccatagctatcgttctaatttgaacttcaactctgactggctccacatgatccgaaaaaaatattggaacctctataactaaatgaagacttctatagccatttggcttaggactgtttatataatctttttcttcaattagtgttatatcatcctgtcttattagcatattggcgatatcatatatatcacctacaaaagaacagataactctaattcccgcaatatcatttaaattctttttagcagattcaatgctcatttcgaaccctttacgtttaagtttatccataatactgcttggagtcttcactctagatttcatgtattcaatcggattcctcttcctctttatcttaagttcatcatctaaaatatctaatttagtcttaacttcctttattgctgatctataaacaagtaacgtttcattcatctcttctattctttcttcaactaattctggtgatataatgttttctctactgtcccaaaatatttgatcattttcttttgattgacccataagcctattgtcccccttagtctaaaaaaagactcttcttaacaaaatatatgtaatatatattgcaatgcacatttcacaattcacaattacaactaaaattcttgtaatattttttagaattatgataaaggactatttttgcaatatatattctatttttttcttgctttatttcctcatactaacataattttaattgaatattagaaaaacttcaagctactattattttattagataaactgtagtcttttttcttccaaattccttgacttgctcatgggttggaagccacacatctattatataggtgccatcgcttttaactttaactgcgccacctctatcttctgcatcaaaaataccgtcatctttataatcttttaaatccggaatatatattttacttcctaacggaatatttttaggtacagctatagttccaactctagtatgggtctgcattgcggtttctgagccccaagcttctgagcatatagcgcaattacagtaggctgttaattctgcttttatcggcactttaggtgcggcagttaatactttttctatgctctcattgttattagtagtattcacatttacatcagagggcttcttatcttttctagctattaagccgctgtaatttatttcaccaaatgttactttacaataagctgcaagcccacctaagacaattgctaaacatatgtatgttacgcatacacatttctctaatttcgacaataaatttattctcctttatattaataatatatttttttattttatttttaatttatttacaatatatactattatataatattttttcttcattttaaagttaattggttcatcatgtatttatatccagtataatcaacaaaatataatttcaacttgttaatttactaaaaatcccataacaacaaaatctccgccggctgtgtagcttgagattccactataatataaaattctagagaagtaaaaaaatcgcaggcgactgttattaagttccgtattgtgcatataagaacattttatgtaggcgaatatgatttattttcttaatcatatttttacaatccaacatcttcttaaccacttatataactagctttcaaaattcaaaatttttatacttttcgagacaataaaaaaaaacttggattcataatcttagaattccaagttttttactaatgctttatttaaatttttatacttttaatttattactatatctgccattaaaggataatgatcagagggatatttcccgttaacattatatttaattatttcagcattaactacatctatttcctccgatacaaatatataatctatatgaagcccttttcctgaccttttgaaatttcctattgtagattcattatataaacccatgtttacgtcttgtactggtaataattttttacttgatattttcccctctttaagacttttaatcaacttactattaggtctatcattaaaatctcccattagtataacaggaagtttttcattttctataaattctagaattttttttaaaccatacattcttgcctttggaagcagattatctaaatgagtattacaaaccctaactcttcttccattatccatttgtaaaatggctgttgtgcaaattcttggaagatatgagtaccatacgcggcttcctatcttatctggagtttcagatagccagaaagttttataatcttcaattaaataatttctagagattaataaactgttcctttcggaagaaacttttttccctcttggagctccaataatattatatccctcaatattttctttaatatcattaagcatattatctttaatttcctgagcccctattatatcgcatttatactcatttattacgttataaattaagctccttctagtattccatctatcattaaaatctataggaacatcgcgtcttaaattaaaggtcattactctcatttggatcctccttctaatttgctttttatatttcaaattagcctataaatataattatattatactcacttaaggaagaaatcatatatttttatttccaaatttcttctgaaatttctcttactaactttatcttattccattgttcttcttctgttagaatatttccctcctcagtagaggcaaaaccacattgtggacttaagcaaacttggttaatatctacgtattttgttgcttctctaattctttctttaacttcttctttattttctaatattcctgtcttagaacttattaagcccaaaactacttgttgatttttaataaaccttaatggtgcaaaatctcctgcacgatctgtatcatactctagataaaatccatctacatttacagttccaaaaagaatttttgctactggttcatatccaccagatcctgcccatgttgaattataatttccacggcaaacatgcattgtaataaccaaatcttcaggatgctcttcaattgctaagttgtttacctttgcgtatagtttagcaatatcatttgtatctacgccttcttgttgtctagcttcccaatattttttatcacaaagcataccccaagtacaatcgtcaagttgaagatttctgcaaccttcattatagaatgctttaatagcttttttataagcatttgcaatatctaaaattaactcatctatgtttttataaatagattctgtaatctccttattttcaccacgttgaagttctgcaagaaattgtgccggtgctggaatagtctgtctagcgactacatcatctcccgagatactctttaaaaatttataatgttcaaccatcggatgattactaaaatctatttttcctgttaatgcggctgtttctgctctagtttctagtccgttaaatttatagcctgtttctagtacacgtttttctaccccatccaatccccacataaaatcaagatgccaccatgagcgcctaaattctccatctgttactgctttaagcccaagttccttttgttttttcactaattttattatttcttcatcttctattctttttaattcattacttgaaatctcttgattttgaaatttagcacgcgcctctttaataacctctggtcgtaaaaaacttcctacaatatcagccctaaatggtgcaacacttctttgttttgcatttttaaattctatactcatttttttaatcccccttaattgcctcgctttattcttgaaatcagtatagcatgtttaaccccaagtaaggtaacttcaaaaaactattactggctataatattttcctataacaaacaaattcacttttaaaaagcaaacttctaaactagcccttatgacaatctataacttccaaatttcattagctgtttcaataacgagtttaattttctcccattgttcttcttcagtaattatatttccctcttctgttgatgcaaaaccgcactgtgggcttatgcaaagtttattaatatctacatattgagaagcttctgcaatacgattttttaattgctctttactttcaaggcctccatgctttgtcgttacaagtcccaatacaacaaactgatcatttataaatcttagcggcttaaaatctccgcatctttcactatcgtattcaagaaagaatccatccacattagcattagaaaataattcttctgcaataggttcatatccacctgatgcaaatcctattgaatgtagatttccacggcaaacatgcaaggttataatcatatcttctggtttttctttaatgctctcatttatcaatcttacataattctttgaaagagcttctgggtcaattccccgactcctaaaataacttctgtgtctttcactacatagggttccccatgcagtatcatcaaactgcaaataacgacagcctacatcgtaaaactcctttattgcagatttgtaaacactaataatatcttccatcagttcttcatcactgccatatacattatttttattgtgactttgaacaaaatgaaatagagatggtgatggaatagtaaatttggcaatattttgatctttaacaatgctatttaaatacttaaaatgctctaacattggatgcttattaaatcttatcttatcaacaatttgaaagctttcagcctttgttctagatccctgaacgctacctccttgatttaatattattttctttgtaccttctattccaacaaaaaaatcaagatgccaccaagatctcctaaactctccatcagtaacagctattaatcctatttctttttccttttctataagcttccttatttctatatcttcaatacttctcagctcttcagcatttatctctccaatattatattgtttccgtgcaatcttaatttcatcagttctaagaaaacttccaactatatcatatcgaaaaggtggactatttctctttgtacctataatctcattactcatattttcctccatttaaactgctataacagataatagtttaagtcgaaataatttgttgaaataatttcgttcaaaatctcaatgtagcgcgttgttattttattaagcttaatatccttatgggctatccatccgactgtgaaaatttcatcacattctattggtattgctttaagtttgctttcatcaaaatccgagtctataaatcctgttccaattgtataactatctgtactggttaataaagttgaaagtgttgctctatcaataactttaatacttttaggtacattagccatattcatcatttcttctgaaaaattaaatgaattattaattccctgttcaaatgttatataagtaaattctagcatttcattagtagtaacactttctttagtagaaagaggatgattgttactgataattatatgtgggtttgcattaaaaagtggagtgaatttcaaattactatcactaaaaattctattcataaccttagagtttacttcgttaatatataaaattccaacatcactacgaagagtttttacatcatctattatttcatatgtctttgtttctcttaaattaaactcatactgatttgtttcaatttcctttaagagttttgtaaatgcatttacaacaaaagcataatgctgagttgacacagagaaatgcataatcttttctcttcttccatgatagcgatcctcaataaattcagcttgttcacttatttggcgagcataccctaagaattcaatcccatctgaagaaatgctaattcctctattggtcctctcaaatattacaattcccagttcactttcaagttctcttattgaattagatagacttggctgggatataaataattttttagctgcctcgtttattgacccgtaccttgcaatttcaagagcatattttaattgttgcaaagtcaatgtttttccccctttcagctaaaatcctttatttgatattataatctagattttatcatttataaatatctatgattttctttacacaaaaaaagaccgcttagttttaagcagcctttctattaagtatattatttatttaattgttctaataattcttctaaatttattccatgaactttaactgcatcttcaattgtttcagcttgtgcagatgggcatccaacacatcccattccgaagctcattaaaatttgtggtgcattttcctttatacgaattatttctcctattgttaaatccttagttatcatgttgacattctcctctcatatatcttaataaattatcttttaagtttttattgtttatctttaatcttattataatgtttattccatattacttccgtaactgatgttacaataaaattaatttttatatttctttactgagtattgaagatatcaacataattatccttatataactgatttataattttttaaagaagaatattcaatagttcttctgtatccttaactatatattctgctctggcttgggttagttcaataacatctccaaaaccataaagaactcccactgattttatattattttcttttgcgccgataatatcatgttctctgtctcctaccatgataacctttgataagtctgtaatattagcctcttgtaaagcatattttattacatcccctttatttactcttgtttcttcaaaatctgctccagctgcaaaatcaaaatatttatcgattttaaagtattgtaaaatttgccttgcatacacttctggttttgatgtagcaagtacaatttttttattatttttcttaagcacctctagaagttctggtattccatcatacaacttattttcatagatacctttttcagcaaaatattctctgtattttaccaatccaagctgtgctttttcctcatcgaagttataatattctttaaacgaatcctttaaaggtggtccaataaatttgtttaattctttaaggtcatcaactaaaattccaaaagactttaaagcatattgaactgatttagttattccttcgccagaatcagtaagtgttccatctaaatcaaataatatatattcaaaattgttattcaagtaaaaattcctccttgtttatcactcttaaatcactccaataaattataacatatttagaaaattatacgacacctgaataatttaattaataaaaattatatattaatatttttgttttaattggtaatactatttttaaggttgtttaatacctaaaaaatacaataatagtttatggaggaattttaaatgaaaagatttgtttgtactatttgtggttatatccatgaaggtgacaccccaccagacgtttgtcctatctgtaaagcaggtgctgacaaattcaaagaaatgactgactcattaaattttgctgatgaacatagaatcggtgttgctggcggtcttaatgatgaattattagaaggtttaagagctaatttcataggtgaatgtactgaagtcggaatgtacttagcaatgtcccgtcaagctgaccgtgaaggttatcctgaagtaggtgaagcatataaaagaattgcttatgaagaagcggaacatgctgctaaattcgcagaacttttaggggaagttgttgttcctgatactaaatctaatttaagtgctagagttgaagctgaatatggtgcttgcgaaggtaaaaagaaacttgcaaccttagctaaggagcataatttagatgctatacatgatactgttcatgaaatgtgtaaagatgaagcaagacatggtaaagcatttaaaggcttacttgatagatactttagcaaataatattataactagattaagatttaacttaaaggagtgtgttttttatggaaaaaattaattgtgaagtaaataattgttcacacaaccatagtggagtttgctattcaaatagagttgatattggtggaatgtctgcaagtagtgaaagaggaacttgctgtggttcatttttacaagaatctcattatagtgacttaactaataatactaattctcaaggaaaatgcgatgctctaacttgcaacgttgaaacatgtaatcataacactaacaaactttgtagcctagattctatacaagtagcaggtaatggagcccaattatatactgaaactaaatgtgctagttacgattctagagaataattagaatatatgattaagtgttctatattctaatattcctaacaataggtattctgaagaatatttaaatatctattcttcagaatacccatatataattttagacagtttatttacatataaaaaccagttcgatgatattatatattttttagatttcctttcccatcattatcatattctcaaaagttttgaatccatgcttcttataaaaaccttctgtttcattagttttaagtgtcagcaaaatcactctatctatccccttagcttttaatcttgttataaattcactcagcaactttgaacctatacctgcacctttaattttaggttctacacaaagttctttaatttgaaaaagtactgcatcataataatattcaatgcttccaagtatcattcccactaatttttccccatcaaatgcaaccagtccattaaacccttcgcaatttatcatctgagatatgcgtttagatgcactttcaatagtccatttgtcattccacggttcacaattaaaagcatttacataaacttctgaaatttctctaataatttctctatctaaatttttatattctatcattttattaccccttattttgtattacaggtataagctatttaaaaattctgttcctgattttgttttaaagtatttattttttatactttcaatttgaggagtttttatttcatcttcataaatattaactaaaaaatcagcttctattaatatttgatagtcaatgccatcaattttgctatatgtatgatgatgcccaatcaaatagcatactctttcaataaattcttcactaaaattaaattttgaaagcatttcctttgcaacaggaggcccttcaagctcctgataatttccagcagaagaattatatttttcttcactaacttttattcctatatcatgcattactgcagctacttctaaaatttcctgcgtcttcttatctacattttcaatttcccctatagatttagcaaaagaaaatacctttaaaaagtgattaacccttcttggatcttttgcatagtattttatcatttcatttattatagtactaattttttcattcataattacattttagtctgcagcatactttaatagtatacccagagctaatccaccttccttcttaataatatatcttatttaattattatactaattcataagatatattaatatagcttttatattaattcttatacttataagacttatcttttgaaaccaccagcctcttcgttaaatattattataactagctttaacttcatattttctctacctatatataaactgcgcacataaaagattataaattcacgtattaacactggaagcctttataatttttttgtacaaaaaagtaacaaccacccattttctaggcagttgctactgtaatttctatatattatataattttaaagttcctaattttctattgataacacactcataaactatacttagactatgaaatatcttttaactagaaatgagtaatatacttttgtggaatgtttcattggtaattttgatagatgtgattctttggctataagttgttccaaatgtgctagttcaaagcttgttctttgaagctagcactttgggtgcaactttatagccttagaatcacctatcagaattacctagaaactggaacaaaagtatgttattcatttcggtgagttataagcataagtatatattatagttgggttatctatatatgatatacaattgattcaaatggtcttaaatttaactctttatttaatacactactatctttataatttgatattaatattttactcttagcacttttatttgcatattcatcaggaatctctacttttgtactttctccataaaaattatttatgacaagtactgtagtgtcgcctaaatttcttacatatgaaagtactttattattttcttcaagaataaactttatacttccatttgaaatcacttcataatcttttctcaaccttattagcttttgataatgatagaaaatcgaatcttcatcctttaatgcttgttcaacatttattcttttatattcactgctaacaggtatccatggttcacctttagtaaatccagcattttcactatcatcccattgtactggggttctagaattatcacgagattttgcttttaaaatctgtaatatctcttcttcagattttccttgctcttttaaaatattataataatttatagattctacatctctatacttctctatgctatcgaaataagggtttgtcattccaatctcttcaccttgatacacatatggagtccccctcatcatgtgtattgtagttgccagcattttagcactttcttttaaatattctttatcatttccaaaccgagaaactattctaggctgatcatgattacaccaaaacagagcattccacccattttgaatttcttcttgccaagttttaaataacgccttcaacttcataaagtcaaaatccataacagtccatttatcgcctttatagtaatcaacctttaaatgatggaaattaaataccattgataattctttttcttctggattagaatatcttatacaattctcaagagaagttgatgacatttctcctacagttacaatatcttcatattctccataggtattttcattaagttcgtggagatagtcatgaattttaggaccatctgtatagaatcttcttccatcaccttctgtatcactttcaaacttttctggttttgaaattaaatttataacatcaaatcttagccctttgacaccctttttaagccaaaagttaacaacaccataaatctcatttctaacttcttcattatcccaattcaaatctgcctgagttctatcaaaaagatgtaggtaatattcatcaaacttttctacatattcccatgcatttccaccaaatttagatttccaatttgtaggtggtgtatctttttctgattccttaaatatatagaaatctttatattttctatctccgcttatagcttttttgaaccattcatgttctgttgatgtatgattaagtaccatatcaagcattacatatatatctcttttttctgcttcttgtactaatttttcaaaatcttctaatgtaccaaagcttgggtcaatattatagtaatcagagatatcatatccgttatctacttgaggagaaggataaaaaggagtaagccatatataatctatacctaaattttttaaataatctaatttttctattactccgtttaaatctccaattccatcaccgtttgtatcataaaatgatttaggatatatttgataaatagtacttttcttaaaatccttcataatttcttccttcctatcctagcttattgctttctttttccctacaattactgtaagaacaaatggtactactactgctacaagcattgctaatgcaaatatcatcatgaacgctggttttattgataatatacctggaagtcctccaacaccgattgagtttgccattacgccacttccaactgaaattatagctgctattgctgatcctgccattccacagaagaatgggaatccatgttttaagttaacaccaaacattgctggttcagttacaccaagataagctgaaatgcaagctggtacattaacttcttgagcttcttgattctttctttgtaaatatatcatagctaaaactgctgaaccttgtgcaatattagataatgctatcattggccaaagtgatgttcctccaaattgtgccattaattgaagatctattgcatttgtcatgtggtgaagtcctgtaataacaagtggtgcataaaggaatccaaagattgctgcaaaaatcattccaaatgaagatgtaagtccaccatatactacttttgaaatcgctgcaccaattgcccagcctataggtcctataacaatatgagctatcaaaacagctggtactaaagcaaagaatggtacaactatcattgatattgatgctggacttatctttcttgcacctctttcaagaaatactaatgcaaaacctgcaagtatagctggtataacttgtgcttgatatccaatcatgtttacatgtgcaaatccaaaatcccagaaaggtattttatcagctggtgtacttgccactgcatatgcatttaaaagttgtggtgaaactaatgtaatacctaaaactataccgagaatttgggttgtccccattttctttgtaattgaccatgtaatacctactggtaggaaatggaatatagcttctccaattaaccataagaaactgtttgtcccagcccagaattgagatacttcaactaaagattttgttccgccttctaataatttcatatctccgataacatttctaaatcctaaaatcaaacctccaacgatgattgctggaataagtggtgaaaatatttctgctatatttgccataagcttttgtataaaagtcatattgtttttagcaacatcttttactgcgtctttacttactccatctattcctgaaactgctataaagtcattataaaatgttgatacttcatttccaattataacttggaactgtcctgcttgtgtaaatgtccctttaacactttttaatttttcaatttcacttacgccagctttactcggatcgtttaatacaaatctcattctagtaacacaatgtgtaactgctgagatgttttcttttccaccaactagctttaatagttcttttgcatcattttgaaatttccccattattaaaacctccaatttgatttttattactttaaagaataagttcatgaatattaatacaattttgttttgtattagtccaattgaacaattaattaataaattttatattaaacctaacatttaaatgtttacaatatcatcataatctattttaaacatatagtcaataatatttttaatatttgtttaaacaaatttcttgaaaatgtttagtatctagtatttaagccatcttatgagataaaacaaatttaaaatatgtttaaacatattttaaatttgtttaaataaactattcaaattttagttttttcacccctttactaaatcatcaaatcaagtttaaatttacaaatctcctaaaggttcaaattcatatctttactagaaatcataaatattttgattacgaaaagctatgaaaatatcgctggagattctaagcaactttgtaaatatattcatctaataaatctaattttcaagttgtttgtctatatagtgcaaattttttaggtgttggagtggcttacattatcatacattaataaattacacaaagtaatttattaccttattattttaattatttagttaacttattaaaaaaaataaagtataatatattcattaaaacctatagataacacaatcataaattataattagactatggaacacctcacaaccagaaatgagtaataaacttttgtaaccacaagggtcataatatggaatgtttcatttcggcgaggtatacgcataagtatagattatggttgagttacctatggtacaaatattttatatatgctccaatgataaatctgcatttaaaattctagttggataaacgctcaattaagtataagatgtagaaatccaattgcagcatatataccccaagataacttaagggagtgttaactttgcctaatgtaaaattcaaagatatatatcacatattaaaaagcaatatagataacggtaagtatgataattctatgatgcttccaaccgaaatggaattagttgacaaatttgaatgtagtagaaatactgttagaagagcaattaatgaactgagcaaagatggatatgttaaaagcgttaaaggtaagggcgtaatcatattagaaagcagagaatcaatagaacttcctattggaaatctacttgggttacaggaattacatacaaaaaagaaattcactactagtgttgtgcatttttcaaaaataactatagatgaatccttatcaagaataactgctttaaaattagatactgaagtatatcaccttcatagaataagattttatgataatgaaccaattatccttgatgtgaattattttagtgctgatgtagcaaaagatttgactatagaaattgctcaaaattccgtatatgaatatattgaaaaagatttaaatacaaaaattcttgcttcaaaaaaaattattgttgttgaacatgcaacagaattagataaaagatttttagatttaggtacatatgattgtgttgctgtcgtaaaaacatatgcttatactgattcaggtaaactttttgagtatacagaatctcgtcataggccagataaatttgtatttgttgaatcatcatctttaagaaaaaatatttaatcatagtaaatgacatttttttattcttttatagtatttagctctagtaaaatagactattataaatgttatccgctgatttaattgcattataatttcctaaatgctaaaaaaacttactaaataaatttttagtaagtttttttgcatagaatatttagttaatgaaaatgaatttatattattctataaaattgcaaaggtatgtatattgcttatttaattctttttgataccattctgtttttattaaacttatatatgcatcaactatctttttcacttggctttcttttgtaatctgcatgaataatgcaagaataaaaaaaactataattcctattgtaatggcattttttacattattagtaaaattgaatataattaataatactgcaccaatagctcctgtagctattgaataatatgttacgtaatctattctatctttagttcttactattttcgcctttaatgtatcaacgatatgtacatccttaaataacaaatctaacttatctctatataaatccatgaatttagacaacatatagttatatctttcaacattactactttctaagattctcatgcacataattaatggataagggtactcagccacacttttatatacatattcatttcttctttcaagactaggaatctttacacttaattctctattttcatcaagagtcaattcataattgtcatttactaaacttgtataattgtctttaataatttctaatgacttagccattaatttattattctcattcattttatttagcatgtccaaaatcgtcatattctcttctcccctactttttaaaataaatgcttcatcagctatattatagcatactttaccaatgcatgaacataaaggattgattttagaacttattccaatatgtttttaagcacccctatagctaatgtcataccttcatgctttattttgcttataataacctctgcacccgcaagatcaacagaaggctcacagaccccagttattccaagtgttttaaatacaaattgacttttatcatatttatcttgaactgtttttatttcatctttgctaaaagttttgaatggacaattaatcttttccgctaattttataataccttcttcattagctttaatatctacagaaacaattcctgatactgctcttatatccaaattatattttattaaatttgcatttacaaagtcatataatttttcataagttgtgcctttcctacaaccgatacccaaaactatatctttctttataagtctaagtatcttagaataatcagttctttcaatatcttcattgttactactttttaaacaatgagttatccaaatacaatcctttcttaagtactgtatcttttcgtatccattactgatttttattatattataatcatctttaattccaattatttttttatcaattaaaagcgccgccatatatttagccttttttaaatcttcaataatcaaattattttctttagctaaaatatctggggcaatcagccctaaattatcacttgcagtggttataataggcatagaatttaatatttctgataccttataagtaagctcattgcctccccctaaatgtccacttaatatatttattgcatatttacctgatagatcaactactacaattcccggatccttatccttgccttcaagaaatggagctattgctcttactgcaattcctgttgaagatataaatataataccttctgaattattcatagcttcttttgtaatagtctttaaactgaaatcttcaccatatgcaaaagtgtttatttctgacttccaattattaatctgatcttgtgatggattattttcttttatatataatcttccattaaagctttctttaagcttcaatgctatatcttttcccttaggcgatggacaaattatacttatatttttactaagtgaatttattgcctcactttgggactttttagatagttcttcattatttagattcattacttgtatcctcagcgtctctgaacatatgagaaaagctcttatcatataacaagcttttttcaaaatcgctatcaataaaatctccaactaatatttgtgcacatttagtaatattattttccttaactttttctgctatatcatcaagagttcccataattactctttgatcaggccatgtagctctttcaactacagctattgaaacattctttttatacccttttctaagtttctcaacaactttgtctatcattgaaatagataaaaatatagccattgatgctccaatagatgccaatgtttcaagatcctcatttgctggaacaggagttcttccctcaatcctagttaaaattacagtttgtgatactcctggtaaagtaaattctctatttatagcagctgctgcacctgtaaatgaacttacacctggaacaacttcataaggtatactaaccctgtcaagctcaaccatttgctctcttatagctccgtaaattgatggatcacctgtatgtagccttacaactaactttcccatttgttcttccatggtcattatttccattacatcttctaaagtcatattagcagaattatagatttgaacgtctggtctacaatattctaaatgttcttttgaaactaaagaaccagcatatattactacatctgctctttctaataaatcacgacctttaactgttattaaatcagctgctccaggacctgcccctataaaataaatcatgcttaaaacactcctttttaatattaatttaactaatattttattatatttattccctgtttgctattattaaagacatataatctctaagttttagtatttcttctctttcagttaaaacagtctcgccctctctaccaactcgacttgcataaacataatcaaagcctttttcttctaatgtatttataacttcttcttcatgcttgtatactttcattattacaacaaacttttcatctgttatttccttcactttagtagctggcataaccactagcttctcgtcacctacaactaaagtcctattaactaggctcgcagccgcacaaaaagatgttattccaggaattgtttgaacatcaaatccacaatctctaacatgctttaacatatgactatatgtactgtaaatatacggatctccaatagttaaaaatgcaacatcctttccttctttaagcctcgcttctataaattcataagcctccaatgcttttattactctatctttcttccccattggaaaatgctttacaataacttcagtacctggttttatatattccctagctgtttcaagcgcaatgctttccccaccttcagtagccgatggtgcaactacaacttgacacctttctattgttcttactgcctttacagttaaaagttcagtatctccaggtcctacacctattccgtataatgttgccattttataattcctctcttcctaagtaactacatatgtatatattattattttaattctagttaccgatatcatattatctttatttatacacttttatttataacaactatgtattattttatcttaaaaatctttattaaattatacttaattccttatacattgaattatatatattggattattagctatcatcattaaagtatcttcacggtttttacttatattaactaacgaaatttcaattttataatctagtttcttcatgacctcaattgctctgtatgcattgtctaaggtaataaaattcataactatcgtgcctttttttactacgattgcatttaccttaagtaatatctcctctaaatgcccgctgcttcctccaatgaatatagaatcgaattttaaaccttgaaaaatcaaagtatccaaaactctacttgcttctttatttaaaatctttacattatcacattcaaacttttccacattagtttctgtaatttcatatgcttcataatttttttctattgcaagcaccttaccgttttttgcaattttagcagcctgaactgtaatactccctgtaccacttccaacatctagtactaaagaattatctgttaagttcattttcgcaattgaaagtattcttatgtcttcctttgtcattgggcagtttcctctaataaactcttcatcttttataaaaaccatgaaaatttcctcctctatttcaggtattaatcaaacgtcaacgtcacacaaaaatcattataagttctatcgacttgttctatctactataaacacactcagcgaatcatattttttattcataaattcttctggcgtcccattagttataatctcatcttcataggataaattttctcctattgcaactttacatctaactttttctttatgcaaaatttcacataacatagcaggattattctctttatctgtaagccaaatgcttaagtcgtgattattaaccacagtcaaaaagtcttctttccttccatgtaaacttcctaggtacgcattattccatgacatatttaatttacatgtcagatattgaaacgaacttattcctggtattacttgaaattctaaagttgctttactttttatataatttgttatcccataaaaagttggatcaccagatgcaacaattgaaataatcatacttctatttttctcatcacatatatattcgttaatatcacttagcttatttatatataatttttcattatctacaaactctaaggaatccaatgctcttttaaagcctattattatattagatttttttaatatttccaaggccttaggcataatgtaatccttgtgtccaggaccaagccctacaatataaatcatttttgtgtccccctatgaaagcttaattaacttttttatattaatccctaaaatattttacacaatccataatctaatgaactatcctaaaatttatattgaaccttattattaattatccttaatggacttccataataaaatctgatttgatgcgccataatacattacagcgtcaacttctaactctccataaacatgctctttgattttttgaactattttatttccaatattctcatagagtttgtcatatccatctccaagcattttaactgcaccttcacatgtcttttcctcaagcactctttttacaagtgacatatcatatccaagaagtgcaagttctaatgcaataacttcaagcctcactccattgaccttactatgggtattaaagcatccataagctattttactcatctttcctatatgtccaactattataatagacttaactttacatgaaacacaagtctctaatgcaaatcctataaagtttgaacatgttaccacttcttcctctttaaacccaagttccttacaataattatcgcctaaatttccgaaagttaaaactaatctttcattatttattgctttttgggtaatttctatctttatggaagctttaagtgcatcttctgacataggatatacaattcctgttgtcccaagaatagaaatcccgcctacaatcccaagtctaggattaaaagtcttttttgctactttttctccttgaggcactgaaattataacttcaactctttctccaggcggtaacacttttaatacttcttcttttatcatctttctaggaacagggttaatagccgcttgtcctttaggaataaaaagcccttccctagtgacaattccaactcctgttccgcctttaagcactactctttctaactcatcttctttttctgctctgctatcttcaactaaaacactatcaaacttttgcaagtcttcatcttgaaatattttattatctattggtttgatctttttaaccatggcctttatttctattccatgagtgttatcaggatcatctccaccatcttttaaaatagtacactcaacataatcatcaaatttttctattaattctataggcattgttacatcaattcctttaggagttgcaatctctatttcattaagatttttctctttattaaataagataattgttgctgcttttgctgctccagcactacaagaacctgtcgtatatccacatcttaacctttttccatctacatcaacgtacatttcaaacataaaaatcacctcctgacatcattaactttttaactatctttaatctaataaatttaattatcttgaaaccaccatgtacataagggcattaactattgctgctgcaacagtgcttccaccttttcttcctttaattcttatgtaaggtatattaagctcatccatattttccttactttctgcagctccaacaaaacctactggcgcagctattataagctttggttttgcctttccttcttttattaactctttaagcctaaaaagagctgttggtgcattaccaaaaacgaatatatctacattatccatacaagctttttcaaccgctgccatgcttctagtaatatttttttcctttgcttctttatgaactatttcttcattcacataacagatgacttcactattagttttagctaacgccattttattaattccgtttaaagccatattagtatccgtatagatttttgcaccttgtttaaaaataccttttgcagtttcaattgctgtttcacttatttctaccaaatctttatattcaaagtctgcagtagtgtgaatagttcttttaactataagcagttcttcttcactaaatgagtgcgcgcccatttcgttaccaataatctcaaaacttttttcttcaattcccataggattttttaaatattccatatatttttagcgagggatttaacaaacacctcaccaagctcacctctttccaagtttaataaattgattaatagttaaccaacgcttttaataattcttcatttccaagaaagtttatatgggcatatcctcctaatgtattatttttaaagtatccgcatttccactttaatacttccccattatataaagttttttctacatcatatacattgtcctcatctaaatctacctttgacttatgaaactcatgggcattaacttcaaattcattatcttctaatcccttattatcaaagcatttgttatctatcttaacattacagtaaccaaaattctgaagcttattagtcattgtgctatctccattaaaaaaaccaaccatttctgatccatctattgattctgtaagatacataagtccaccgcattctgcataacacctcaagccgccatctaaggcttctttaatgctttttcgcatagaataattgttttccaattcctttttaaatacttctggatatcctccacctatatataaaaaatctaagttttgtggcaattctttatcattgattggactaaaataaactacctcacccaagttttctaaagcttccaaattatctttataatagaaactgaacgccttatctaaagccactcctattttaaaatttctatttttagattctccttttgaactttcaaaacttttttgtttattatcttctttaaaggaattactaagatcaccatctgtacttattttatactcctgagtcgcatttataattccatctatatctacatacttttccattaaatttgcacatatatctaatttttcttcaagattaagaatttccatactctgaacaagccctaaatgcctgctgcttaatgatatttctggtgttttaggcatatatccaaaaacttttatattacaattcttttctattgcatactttaataaattataatatttttcacttacagaatttaatacgacaccaacaatattagcatccttataatttttaaagccgctaatttcagcgcatatgcttgcactttgccccttaggagacaacactagaactatcggcatatttcctaaaagttttgagacatgataagtagaacctttttcacttgctccaattccgtcatataatcccataacaccttctattataccaatatttccagaacctttttgaaaactttttttcacaccttcttcacccagtaagaaagtatcaagatttcttgaagctatccctgtcactgttttatgaaatgctgtatctatataatccggtcctaccttataaccttgtacatgaaaatttctacttttaagtactttcataagcccaagagtaaaagtagtttttcctcctccgctgcaattggaagatataattatagacctcatattattttcctttctgtactaacaagacttttaaactctacctaactacctgcaaagaattttgcaactataaaaattgaactatctaagttttttagtccttccagcgtttatatatttattctcaattgagtcataaattctatttatatagagtccatcaaatttatcaagctctccaagtccgtgcatatgtaacttcacttcaattccttctttttgaagcctagtctttaaagaatgatcttcatctgatgccatatcattctttacgtgatcacctgccacaagtaatagaggaacaagttttgtcttatttattccttttttctttaacttctttactacattttcaactgttgggtacccttctacagttgccacaaaaacattctcataatcttcatctaccaaaacagtttgcagcattccatagactgcattagatggatgttctgtaccgtggccaaataatattacactttcttcaccttcgaaaacatctttaatactttcaataaataaagaataatcttctggtaatccattcattccttgataaaaaaatatcggtcttccaagcttaagatctttaaaatcatttttccttcgctccacaacgccttttatgtaatcaaattcttctcctggaattatatgaagcggctgcactataacttcttcaaatcctctagatttcaaatcttctagtgcttcttctggtgttaatatatccaaattatcctttgcctttaatttctttattataaaatgagctgtaaaagctctaaaaacttcataatctttgaattcctctttgattttattttcaatcttttcaattgaattcttaagcgcctctaaatggcttgttccgaaactaactactaaaatagcttttctcatgtattttcctcctaaaattgtcttaaaaaagaccttaatttaataaatttataaatatttcataagatttataatttggaatatataaaaatcccctttatcgttagataaggaggaaatacataacaaattaagaatgtagaatatactctactacatcccgctatttgcaagttttcttccctccgaagaatagcatttttataaactcctaggcaggtctcctgactttggcctcatcctaattctcttccttcccaagaaaatttctcagtggattttttagtatactatttaaaagcagctaattcttaattaatgatgagcacttttattatatactttagagattagtcttccatcacagtagcgggggctgtagtggattttaaccactttcccttttaatcatatacacttaaccttatatgaacctaaaaatcatttcttattgtattttaaattatataggactattgtattttattcaactaaaaatgaggtttattgttgacagtatctgcttgtcagcaataaacctcaaaataattttaatataataaggtaaccataaaattgtactcattaaatctttactggtaaattaaaatcctcattctttcttacagctttgttttattagttgattagtatagactgtagctcccgttaccagtatgccttgaattactgattctacgctagggcccatgattccaacagcccctaatattcctaggaataataatatcatcggaatatatttatcgttaattttttctgtattttttattaccataccaacaatatatagagcaggaatcaaaatcagagcattttgtgttatatactgtgcaaaatccatatacttgtccctcctttaactaaaaaatttctctaacttaaaataattttaaatatgatataatattctgctttattatgttatatgcgttatgtcaagttttgtttctatattaataaaattcatatcaaattttcacttcactaattgctataaaaatagaattaatatctattttttgcaagtaccccactaataattatatttaaataaaagtcaactattccacttactgaaatactcaccacatttaacattttcaaagaaataatttacaaccatcaatattactgtataatttaaatataacttgttaacctaatataaataaaaaaagctagaagggattgatataataatgtcagcatatatgattacatattttttaagcgatactcatggccatcatcacgaacatggtgatgattgtggatgtggagaagatcattctcatgaacatggtgatagctgtggatgcggagaagatcattctcatgaacatgtacacagtggcactaatataccaggaaaaattaaatctttaggttcatgggctcaatttatgcctgaaggattctttgtaaaaacagatacattatctgcaaaagaaatatttgatgaagtaagctctgttgctaatggaggagatattatttttgtaacaaagattgatgctgaaacttcagcatgcgcaaatcctgctgtattagagtggatttcaaaataatagtttcaagtaatataacttaaaattgtagtataaattaaaaaagaggattatcaaattttattttgacaatcctctttttgcttttaaacttattagttaacataaatttcaattgctcttctacattctagtattatttgaacatttggtttacttaagctttaaatgtaaatttattataaaatatagtaatttatcataaaaaataatacccatcaaaattaaactgttcataaacaataaaatctcaatggatatcccacaaaatattaaaaaggagtcgtaattccgtatgatcaaaaaatcatacaagaggagcgatgagtatattttacaatatacacctctatttaaattactaactatataatagtttaacagattttcagcgaaaaacaagtatgttttttaaatatttagaaaattatgatttgtataaaatgtaacaaatcatttttacattttaagcactcttctctaactctttccttttttacggatatattcaaaaaagttgttgacataatagataaatgagtgtaaaataatatttgttgtgaggcccattggtcaagcggttaagacgccaccctctcacggtgaaatcaggagttcgattctcctatgggtcaccaagttagaaaacatcaaggttttaagtatttaaaatcttgatgtttttattattttacaccatagttttttattgataaattcatattttaaatttgtgtttttaggtcctgtttcgcaattttattctaactaaaattaaaaaacacctatatttctatagatgttttaattctaattatataaataatgggacgttgaatttattctgagtacctgcaaatttcggacttttgagatagttgtcaggagcttacgagttacttgataattatacattatatcttaatataaaaaatttgtgatatgaatacaataactatagtaagtaatgctatcaatcatttttatcaacctttaatgcacgattgcagtaaatcaatttctatttttatcataacttgtactcttattcaatttactttaaatagactattaaccaatcaatacagatgacttattttcataaaaatttttaatttttttcatttgctcaggatgagtaattaaatatagtttatctaatttatatttatccatagtattatttttttcccaatcaaataatgtctgcatattgatatcttttaaatgatctattgatactttataaactgcagaatattcactttcattataacttttatgtatatcatcttgttggtgtgcaaattcatataaaaattgttttctatattctgataatggcttttttcttattaattccgtacaaacaatttctgtatatatccaaggagaatatgttccagttttataaacttcaccatatttttgtataaagttatcagtattaagaacaaaaattgcttctgttttatctatcattttttgtaatgcaattgacaacatcacattaacatgttttgatgcagtattacattttgtatggttatataaataaccatcatttccatcttcacgtttatcactatactttgaattaatcatttccaaaagttcatctgcatatccccagatatttgcatcaataaaacatttcaacccaaatttttgatttaaccacccagctagtccttgtgctaattttatatccttatgtgagtgtgaaataaaaatatctgaatctacttgtggaaaccaatcctcttgtagtttagttccatctgttgtaccgttcattatataatcttgtaatgcatttttacaattcgctttttgctgatctagatgattttctcctaatttttgatacttatcaaaatctataattttatttccataattatcttttttgtgataggtctaaattaaagcctacaaacatatactttccttctttcattatctaatatttatttcttaatatctattaagaatacataaattacaattttattcctatatatatatcattatacaaaacaatgtaataaactcaagtaaaaacaaaaatattaaatctgaaattgtttttcaaagtatactggtagttgtgatgatattatacgtacttcataatattggttttaaaaatagatcttacttttcttaaccctatttgttaaaacaaaaaataccataagaacttgccctatatatttagtactcgctctatggtcttttttattaattaaacacatatatttaattttattattctatcttatgttatcagttaaaattttaatattaactttataactattatttatttcaagcccacctaaaatttatctgcataaattatctctccttactctctatatatttaaataattttttcgataaacttctataatccatattatataaaaattcttcattaagagctgctgatgcataattaatttcagtccatttatctgtcttttttagttcatgtgatttttcagaagaacgccctcctactgaaccaactaaaaatgtatcaatgtttgactttctagctaatttaatttcttcatcaacaccttgttcatcagggctatctttttttatctttccaccaatacatattaaagcacatatattattttcagaaagcatttcttctctcattttggttaaactttcattttgttctgtttcagcatctatctcatttacagtggcatatttatttatttcacttatattataactatctttaaaccatttagaaatatacattgatactgattgctgtggatcatcacaaaactcttcagcaacagtaaaaattattttttgaaatgtagggtgtgcaccaaaaattagtgtatatccattttttattatttcttgtgaaaaaattttaacagcttccataagaggttgcttgaataattcttcatcactttcagggaatgcaccagaaatcacaatttttttggatttttttaccactttattattcacctctcttttccacataaaactatgattttcaaaaccattttcaaatatagtattcccaatttcattcaaatttaatctacttgaaagtaagactgccgagtcatatttctcatctccacacttctgatattctttagataaaaaattattaaaatattctttatcactctcctttactgttctaccataatattgtatatattgaatataatcacgtcttggatacaaaccattcttattactattatatgtaattttatatatttgatattctttatcaacatttacaaatgatacattattttcttgagcccaatattcaaaatcattaacataatcataaattaatcgggaacgattcattataatctcaaaacacaagttttcaacttcatcaacaatcttttctaatttaattccatcatcaaaatctttactatcatattccaaatgagctttatcccctggtattacttctagtccttttgtatcagcattatctatccttatccaaagaattggaatatcataaattaatgcactcttaatttctttttcaatccattttgctcttactgactttggcgtatgcaaaaaaattaaaacatcgctttgtaacaaagctgagtcaattgtatcttgggctggttctcctactcttacttctacaacatcacgaaatgtttttttgctctttcctaataaatttattttatcacataatttcgccgctatatcttctccgtctaatcttttatgacttacaaataataatttattttcagtataaaatgttggtttacattccgaaataacttgtcttacaaaaatctgagcaacagttttaatattatcttttgacaataatctattttctaatcttgaaacaacatcaaaactttgataactttctataatctttggtggtatccttgaatcctttgttaatgctataggccaaattttagattgattttctttggctaaccgaaataatttttccattttaggcatatatatttgagttgaattattaaaatatatcaataaaattgcctctttcacattacaaattacttcggataatctgccttcatttgatatttctgaaatatctgaatactcttttgctatttttacaacatagtcatagaattcagtcgcttctcttgtatcatctaatgttaaccttgactgcatatatatatcttcatcgtctataatactcctaattactttatttagttcgtgtaatatcataattactttctttttcacttttatcaaaagcattattaatatattcatcaatattttttaagaatgtttcttcctctacatatgtaatatatgagccattcatataatcatatgttttacactcatcacaatgccatattgatggttttgaattaaaatgatttttgaaaattatagaaaataccttattactattataagaaatagttgacgttccatgacagttttcactttcggttttaaaccaactatatcccccattatcttttttaataacacctacaattccatttgtttgagatctctttccatttcttgtaatacgttttaatgtatattctatttcccaatctatccatttactttttttcatatttggagtaagaattacgattgttacagttgtaccaaacatcatatcttttaaattcttcttaatattctctgttgatgtatcagttaaatcaggagaatcacttgtttctcctttataataaacagcatcatctcccattgcttcaataatatcatctcttaagtttttcgcttcactatatttatatgaaataaatgttttatgcgccacaatactatcacctttcaacaattttaataaatttatgtactatttcttaataaagcaaattaatattcaaaagcatttttttcaatgtattttaaaataactctataatttaactcgtaacctttaagaattatttcattatctctaatcttctctggtaacatcatctgttcttcatagactttacgtttttctctatctactattgttatataatatttaaaatgcccatcactaaaaaatgaattatttacttcaacagattgtatatcatttattcctagaacaatttctctattattaatatcatatatagtcaaatataatgaaggaccaaaataaccctctgttattttatgccttatatatgaatattccttttctccataaggatattctggatataagctaatttcaagtgaactacttttttttaagtcttcaataaataatgtcatctgcattctaagaacatcattacttatattgaagacttcatattcattattccttataaattgttccacttttcgtaattcttttacccttggttcttttttgaatatttgataataaatattattacaaaccttatttaattccatattactctcatataaattatacccctttatcatccctaatttttttaatatattatctaaattattaattatattattgtataaatcaatctccttgtaaatttcacccatctgatgttcttctttatttttattataaaaactttgtaattcactaagtttatccttccaataaacaagtaatctttgtcgcactgctgcagattcaatatcttcttttattgtaactataggtataattcgtttatcataatcttctctagctattgacaaaatcgcttcatacatacaatgacgagaatgaaaaaattcctgactaagaatcattataatatggttactatttgaaaccttttccataaagccttcataactttcactatattttacgctaatatcatctttgatcaattcaacatcattatctttaaaaaaatgataaatctgatctgcttcaaattttttagcatctccataagaaatagatattgtatgctttctatttcttaaaaaatttaatattttaaacataaatatttaactcctactatcttaataacttccacaacttacttattaagcaattttataatctgtataataaatctaatcggtgtgattttttattttgttcacatctatatttccaatcaattaaaacattattatctgcatattttaacttatgtatatcagccagaaacttactttttactgactcatttataaaatgttctgtatttttttcaatcttcttatatcttttaggtaaagttccccctatcaaattgatagtatttatctctaaataaatccaaggagaatatgttttttcatcatctaattttgtcatttcttccttggtgcttataattaaattatctgtatttaaaaatataaaacattctgttttattaatcatcttcattaaagcatttgctaataccatatgtgcatgacttgacgaaattaaagttttttcataattataataacctgcaatattttttgtctcttctactatatttttcatctattatatttaataatttattactatcaccccaaacacatgaatctataaaagatttaagtttaaacttttctcctagccaacctgcaagctattgctaaatctctatctttatgtgaatgagatagaaaaatgtctgcatttaaatcatcattattaaaccaatcttcttatagtttagaaatatcaattattccttccgcatctaaatatttttctatgaaatcgctaattaaattcctatggcaactaatacaattttcacactcttctaaatcaaaaaatattggtattaatattaaaattaaattttgaaaatatttattacatccttacctatagatattttgaataatattatttaaatatatatggataaaatagaggataatttaaaaaaataaatataactgccgcaataattggcagtaaataaaatggccaaatagtaggtcttaataaattattatatattttttcatattccaaatctcctttatacaaatccaaattgagtctatacatattactatagtctcccttttgccttaagctaattatataatcatacacttttctatagtttctttctgtacataaaaagaatgcggttagtccccagaatgggatagatataattggaacacatcctattgcaaatggtaggttgtccttagttaaggaaaccaaagctactaataaagttacataccaacctcgtgccttaaatgcattatctgccattcgttctataatattttctattaaatcaatttctttatgcaaacttgattctgttatttctccaaatgtattattcatatatttctatctcctatttttttatagacagtataaaatagttatttttattttctataataattaataattatctttattattaatcgcatcttctattaattgttctatattttcttttatatcatcatatacatatttgcttgtttcataaattgaatcaaagcaagtaataaattttgataaacgttcattattagatccaatataaatattataaaatggattatttcccttatttgtttgatttccgttattatctttcaatttatgtatgtgtatacctacaattcccttgtttaactcataagccttgttaatttcataattaatccacttacgtccagaggtagtttctccaatcaaaacaactaagcacgatctttttgccatttgtgaatctatccactctttaatttttttatctgttttttcttttacttcttcccaatcattatctgaaaaagtagaactattatcaacttttcccatgtttctaacttcacttgctctccaacaatctttattgtactcaaaactgaaaaatacttgtcgtttagccatgttcacacttccttttaattattattttatccatatattatataacctttttgaatacttaaattatataagtcctaagttcttgatttgtttatcctatatgaaaaccttctgtttttacaaataaatcaacttgtccttttatttgaaatatttatttttgaatagcttttattccagatcacaagaagaatctgctgaaatctcttgaaaacattgacactcatcatcataatagcaacagcatttttcacagtaataatatttacagcttttgcatctattagtttcactcattattctagtaaatccatcattcataatttcgtcaaaacttatctttccattactttcacaatgttcttctagttctctatcacagccatttttatcatacttctttattctactattagatttatctttaaaatattcttttattatgctagcagatccattttcatgacttgatattgcagcatcaagtgcatttttatgggtgtcctcatataatgcatccaatggatatttatcatatgtatcattttttttatatctttcttcccatcttttaattgatttaatatccatatctactagatgatttaaggtaatatcatatgcaattgttatcaaactaaaaaatttagattcatttagactagcttttttgtttatattcttataatcacgataagttattaacggcttttttctaacaatatcagtacaatttatttcggtatataaccatggtgaatatgttttgatgtcatttatatttcctgacttactaattgaattttcagtatttaataacataacagcctctgtcttgtcaatcatattatgtaatgctatagatagcattgtgtttacatgttgtgatactatattacatttgttatgattatatacagctccatcaaaattttcttttttatcactatatatactatttaatttttctaacagattatcagcataaccccagacgcaagaatcaataaaacacataagaccatatgttatatatatatatccagcaaaagcaacggctaattccttatctgtatgtgaatgagaaataaaaatatctacttcttcaattaaaggaaaccaatctttttgtagttccgtccctttaattatatcatcactattattaatatatttttctatttcattctcaagtgaaacttttttctcattaagatgtttttcaccaatatttttataataatcgaaactttttgaaaaacattcaaaatctttttcattaagcattaaattaaatcctgaaaacataactctcttctccttatttttatctaattacaatttaatttctaacaatttcatgtctatgat

SEQ ID NO: 51 - DNA, 41638 bp, Clostridium beijerinckii
gatttatactatgaagttttaaaattagaagaaacattatataaaaaaaatataggatatataacatactctaatcctttatataaagagaaattgagcgggattttaaatcccccttatttccttttttatattggaaatatagacattataaataataaatctataggtgtagtaggggcaagaaaatgctcaaattatggactaactgtaacaaaactcttgacaaaggagcttattactaataatataacgcttataagcggaggtgcaagaggaattgattcaattgcacataaaacagctttagagaatgatggatataacatatgcgtattaggatgtggaatagatagaacttatccatctgaaaataaaatgttgttttctaaaatagcagaaaaaggcgtagtaatttcagaatttttacttggtacagcgccattaagagaaaactttcctaaaaggaatagaataattagtggtcttagtgatggcgtaatagttatagaagcttcagaaaaaagcggatctttaataacagctagacttgcgcagcagcaggagaaaaaagttattgctgttccaggctctatattatatgctggagcaagtggctctaacaaactgattagagatggtgctagtatatgtactgatatagaggatttaagagttttacttagtttagaacatattgaaattcaaccaatgaattttacaccagagaaaagtgaaatactagagttaattacagattcaccaattcacatagatgatatttttaaaaatacgtctgttgatagaggagctttatacgcattattatttgaaatgcagataaaaagtgaaattatttgtctaccgggaaattactatgtgaaaacaatttaaaaatgtgtagggggtgaatacttcataaattttatggagttatactatgggtcaaaaacttgtaattgttgagtcgccggctaaagcaaaaacaatcggcaaatatttgggtaagaattatattgtagaagcatcaatgggacacgtaagagatttacctaagagtacattaggtgttgatatagaaaataactatactcctaagtatataactattagaggaaaaggagaattaatagataaactaagaaaggctgcaaaaaaagcagaaaaggtttatctcgcaactgaccccgatagagaaggtgaagcgatttcgtggcatttagccaatatattaaaaatttcagaggatgaaacatgcagaattgtatttaatgaggttacaaagacagctgtaaaagcctctataaaacaagctagaaaaatagacttggatttagttgatgcccaacaagcaagaagaatattagatagacttgttggttatgaaataagtccgattttatggaaaaatgtaaagtggggacttagtgcaggaagagtacaatcagctgctttaaaattgatttgtgacagagaaaaggaaataaatgaatttataccaaaggaatattggtcaatagactgtacacttaaaaaagaaaaaaagaaatttccagttaggctatcaacatataaaggaaagaagattgagattggaaatgaagaaacatcaaatggaattataaaagagcttaataagggaaactttgtagtaaaaagtataaaaaaaggtaagaaaaatagaaatccgcttccaccttttacaacaagtactcttcaacaggatgcaaatagaaaattaaatttcatgacaaaaagaaccatgtcgattgcgcaagttctttatgaaggtgttgaagttaaaaattatggtacagtcggattgataacatacatgagaactgattcggtaagaatttcagaagaggctcaagaaagcgcaaaagaatttatagaaggtacttatggaaaagagtatcttccaggtgctcctagagtatataaaggtaagaaaaatattcaggatgctcatgaagcgataagacctacttatgtagagattacacctgaaattgctaaagaaaatttaaatccagagcaatataaattgtattctctaatatggaatagatttgttgcaagtcaaatggcgtcatgcgaattaaatacacactcaatagatatagaaaatggagactataaatttaaagcatctggttcagtaatctcttttgatggttttatgaaaatatatgaatactcaaatgaagaagatgagaattctgtaatattaccagagcttaaggaaaatgaagagttaaaagtggaatcactaaatggaacacaacattttacacaaccacagccaaggtatactgaagcatcttttgttaaattattagaagaaaaaggtataggcagacctagtacttatgttccaacaatttcaactcttctaggaaggaattatgttattcgtgaaaagaagaatctaattccaactgaacttggtgaaatagtaaataatattgtaagtgaatattttaggcaaatagttgatgttgattttacggcagatatggagagaaagcttgatgatgtagaagaaggatctgagaattggactcaaatagtagaggaattttttagtccactaaaagttgctattgaaaaggctgaaaaagaaatatctaaagtagtaattgaagataaggtcagcgatgtaaaatgtgaaaaatgcggtcgtatgatggttattaaaagaggaaggtttggagaatttttggcatgtcctggatatccggagtgtaagaatgctaaacctatagttgaggaattagatgttccatgtcctgaatgtggaaaaccaattgtagctaagaagagcaaaaagggaaagaaattctttggatgtttaggttaccctgaatgtaaatttgtaagttggtatgaaccagtaaaagaaaaatgtcctaattgtaattcctatatggtagcaaagtattcgaaaacaaaaggaaactatatacaatgctcaaatagtgagtgtaattataaagaagaagtaaaaaaagataactcaaaagaagagtagaaataaatacgaagaaaacagctttataagtaaataagtgatattattttgtcgaatctaataaaaagagtgttgaaaagcaagattttatatgataaactagtcttggtagcaacttgtaaaaaaattcaataaattaagaattttctaacaataatattcttttgctaaataatattgttatacagctgccaaggaggattataatatgtcatcattattaactaaaactagaatgttaaataagattctgcagaaatctggtacagaacctgtagcgtttcaagatatatgtacattattaagtgaagttcttgaatgtaatgtgtacataataagcaaaaaagggaaagtacttggatatacttttggtaaagattttgaatgtgaagccatgaagaaaaaagtaatagaggataaaaaatttccagaagattataataagacattgttggaagttaatgaaacattatctaatctccctaatgaaggcagatgtgtatttcaagagattggtaagtgcaagaaggtagataagctatcaacaatagttcctattataggaagtagagaaagactaggaacattaattttagctagattcggtaatccatttactgatgaggacttagttatagtagaatatagtgcaacgattgtaggtatggaaatgcttagagctatgcaggatgaaataacagaagatactagaaaaaaagcagtagttcagttagctataggaactctttcgtactcagaattggaagcagttgaacatatttttgatgagttaaatggaaatgaaggacttttagtggcttcaaagatagcggataaagttggtataactagaagcgttatagtaaatgcacttagaaaatttgaaagcgcaggagttattgaatcaagatcacttggaatgaaaggtacttatattagaatattaaatgaaaagctaatagatgagttaaaaaagattaaataatagatagctatagacaagtaatggtctatagctatttttttattcttttggaatttataattcggtaaaatctgtgaacaatttttgggacgggtaattaactaagggagtatctaaaagaatgaaaaataaatcgtattctccaactatatttctcttagatgtgttcgaaaaggtagaagcgtaaaaaaactcttgcttaacagcttcagagattttcttctaaagaaaagtaaaaaataaattttgaagcacaataatacaaataataatatatagtttattccatttgtgtataagatttaactattttgagaagactttaagatgattaataaaattttattaaatacaaataatgtgcatatttttatttatgcaagttaaattgaaaaatttttgttgataccataaataccttatgatatactacttaaggtaagaaatacacacactatccaatttatagatttggtgcccttattttaagggaaatttataagatgaagatagtggaggtaaaaaccaaggaggtaacaaaatgtcagtaatatcaatgaaacaattattagaagcaggtgtacacttcggtcaccaaacaagaagatggaatcctaaaatggctccatatatcttcacagaaagaaacgggatctatataatagaccttcaaaaaacagttaagaaagctgaagaagcttataacttcgttaagcaagtagctgaagaaggaaaagatatacttttcgttggaactaagaaacaagctcaagaagcaatacaagaagaagctatcagaagtaacatgcatttcgtaaataatagatggttaggtggaatgttaacaaacttctcaactatcagaggtagaataagaaaattagaacaaattgaaaaaatgcaagaagatggaacttttgacgttcttcctaagaaagaagttataaagcttaaaggcgaaatggaaaaacttgaaaagaatcttggtggtatcagaaacttagatgcatcaaacgttggagcaatgtttatagttgatccaagaaaagaaaaaaatgctatcttagaagctaagattttaggaataccagttgttgctattgtagatactaactgtgatccagaagaagttgactacgtaatcccaggtaatgacgatgctattagagctgttaaattaataactgctaaaatggctgatgctattatggaaggaagacaaggcgaacaattagctgagtagtttatataaactttaaaagggtaagtgagttcactccaactgcccttttattaggtgttaaggattactttcgatatagaggaggaattaaatttatggcaaatataagcgcacaattagttaaagaactaagagaaatgactggagctaaaatgatggattgtaagaaagctctagttgaaacagaaggaagtattgaaaaggctgttgaattcttaagagaaaaaggacttgcagatgcagctaagaagtcaggtagagttgctgctgaaggtatagttaagacatatatttcagatgataagaaaacaggaacagttcttgaattcaactgtgaaacagactttgttgcattaaacgaagaatttgttggttttgctgataagttagctaaaatggtagctgaaacttcagttaaaacagtagaagaacttcttgaagaaaagtttgatggagaagcaacagtagcagaaagtttaaaagctttaatagcaaaacttggtgaaaacatgtcagtaagaagatttactaaattcgctattgataatggaatagttagtagctatattcatggtggtggaagaattggagttttagtagaagtttcttgtgataaggcttcagaagttttagatgaagttgcaaaagaagtttgtatgcaaattgcagcagcaaacccattattcttaggtaaagatgatgttgatgcaacatctatggaaaaagaaaaagaaatctatagagttcaagctttaaatgaaggaaaaccagaaaatatcgttgaaaaaatggtaatgggaagaattcaaaagtactttaaagaagtttgtcttttagaacaaccatgggtaaaagattctgataagacaatcaataaattcttagaagagaaatctaaagaggttggttctccagttaagataactagattcgtaagatacgaaagaggagaaggaatcgaagttgaaaaggtagactttgctgaagaagttgcaagacaaatcggtaaatagttggaacctaaagagaacactttgtgttctctttttttaagaaataaagtacatatacttattaaaaaggttttattgatccctaaaatattcaggaggtaattataaatggcagattgtaaatacaagagagtaattttaaagctttcaggagaagcgttagcaggagttaatggatttgggcttgattttagtgtagcaaaaagaattgcgcttgaaattaaagaattaattgatatgggcgttgaagtaggaacagtagttggtggcggaaacatttggagaggtagaagtggagaaggcatggacagaactactgcagattacatgggaatgatggcaacttgtataaatgcattagcgctacaagattctttagaacaagttggagttaaaacaagagtacaaactgctatagaaatgaaggaaattgcagaaccattcataagaagaagagcaatgagacacttagaaaaaggaagagttgttatatttgctgctggtacaggaaatccatatttttcaacagatactactgcagcgcttagagctgctgaaattgaagcggatgtaattcttttagctaaaaaggttgatggagtttatgataaagaccctcataagtattcagatgcaaaaaaatatgatacactatcatatatagaagtattagaacaaggattacaagtaatggactctacagcaacttcattgtgtatggacaatgaaattcctatccttgtatttgggttagatgagccgggaaatattagaagagctatgtatggagaaaatataggtacattagttgcaacacaaccaagaaaataataggccagtatgcttgtttattttgtgtcgttggaagctcgactcgcatgcgctcgctgagtaagcgattcacaccaaatcatagatttgggttatctgctcatcagtaaactctactaatagccctgctatgagcagaatttatttccttgtgtgacgcgaaatatacgttgcatctttggtctattatttcttttatgtctttaaaaagaaataggaggaaaaatcatgattaaggatattattcaaaatgcagaagaaaaaatgaaaaaaacaatatctgtattaaaatcagatttatcaacaatgaaagcaggaagagcgaaccctacgatgcttgatagaattcatgttgaatattatggaagcatgtgcccacttagccaagtagctaatgtttcagctccagagccaagagtacttatgataacaccgtgggaaaagcctctattgaaagagatagaaaaagctatattgaaatcagatttaggattaaatccttcaagtgatggttcaatcatcagactagtaataccagaattaacagaagaaactagaaaaactcttgttaaaaatgttaagaaaacaggagaagaagctaaagtagctataagatcaataagaaaaactgctaatgataaaataaaagccttgaaaaaggatgaggatttatcagaagatcaagtaaagaaagctgaagatgaggttcaaaagaagactgatgcagttgtaaaggaaatagattctataattgctgcaaaagaaaaagaagtcttatcggtttaaattttaaagcctgctagaaaagcaggttttttccttaagcagattttagaattcagaatttagtatatgaataatttattctttgaacaagctgaagagtaaaaatctaaatatattatttagattggttaatttagttaactcctacaagagttaacttgtttttgaataaaagataagttgtaaagtaaactttttctcagggcaagtgaaatatagattcaatatctgtatgaataaaatatttgtgaaattgttgaaaagtaatacatattattacattttgtttaaatgaggataattagtaaagactttattgttgacttcatatgaaaaaggtttagtattaataatgtatataaagaatatatgcgggtaggtcaagtttttctaataaactagggggagaaagatgttaaatatatttaaatcaaaaaaggaatttaatcaagattttgacttggatatgaataacataccaaatcatatagctataataatggatggaaatggacgatgggcaaaagaacagaatttacctagaagtatgggacatagagcaggagtagagactattagaaggattttaaaggaagcaacaaggcttggaataaaaaatctgactttatatgctttttcaactgaaaattgggctagacctaaagatgaagtaggaacactaatgaagcttttagtaacttatctaaaaagggaactaaaagaatgccatgagaatggagttagaatgaatgttttaggagatacttcgaaattacccaaggaatgccagaatgcattagaagaagctttagaaaccactcgaaataatacaaaaataaatttgaattttgcactaaattatggtggtagaaatgaaattgtcagagctataaaacttattaattcagatataaagaatggcaaattaaacgaagaagatattaatgaagctttagtagagaagtatttatatacaaaagggatacctgacccggatttaattattagaccatcaggggaacaaaggcttagtaactttttattatggcaatgtgcttactcagaattttggtattctgatattaattggcctgattttaaagaaaaagatttaagaaaagctatagcggattatcaaaatagagataggcgctttggaaaagttaaatagaggagtggttagattttgaagtctaataatagatatttgggtgctgctatgattgctccatttatagtatttgtatttcttggaggaatttatcttaaatgctttatattcgcattgtcagcaatggctttatgggaattttacaatgcgttaaaagagaatgatttaaaaccaatgagaagtgcgggatatatcctgttgataatatattatcttttgaataacaatttcgaaaatatgatgtatgttgttgttgctgcaacgttcatattattgatatttccggttataaatttgaaatatacttttattgacacatcactaacattgcttggatttatatattgtggaattttatttagttttgtgtatcttgttaatgtgaaagcacatggtgaatttttagtttggattatatttatagggtcatggctttcagatacagccgctttttatagcggaaagctctttggaaagcacaagctttcgcctaaagtgtcacctaagaaaaccatagaaggttcaataggaggacttgtaggagcaactgtttttacaggtatatttggaatagtagtgcaaagatatgttaatattatgccgatatataattatttcattatcggtattttatgcggattatttggacaattgggagatttggttgcatcatcaataaaaagatatgtaggagtaaaagattatagtaatctaattcctggtcatggaggagttctagatagatttgatagtataatttttgcagcagcagcagtgttttattacttaacttttataataagaatttaaaaattagagagaaattaagcgttatatagtataacttatataaggcttaatttttttttatataagttaagttatgaagtttttaacaagagatgattggcatataatatacaaatattaataattattaagttagtgaggtgaagaatatttttaaaacttataagaaacttttctcacttttattgtctttcgtatttgtattaataggaaccttttttataaaatactattttaagccgtttttatccatgattataataattatagtatgcgctcctatatacaaaatcatgattaaggctaaaatgccaagtaaaattgcgggggctttaagtattgttactgtcaatattattataatacttgtgacaatatatttgggaagtgaaattttttatataataaaaaaattatacttaacaaatttagaatggatagagaaatttattcaagatatttcagttgcgctaaatgtaaattttaataatttggaaattggaaagagcgtaatatccataattaatgatcagaatataaggaagggagcagtaaatactggagatagtgttttagcttactttataggaaacatatgtgctttctttatattgattgataagtcaaaaattttagaactaatttctatgttgcttccaaaggaaatgatgatgaaatttagagatcaaaaagaaaattttactcaaatgattgggatagaaggaatcttagttataatttcaactatggagataataatgggattttgtatacttggagtatcgaatttttttgcccttggtatagtgtgtggaatattggatattttgccatatgttggaactataattgtatttattccgattataatatacaatattataatgaagaatttccttactgcatttggtcttatatgtctatatatactagtgcaagttattagggaaatactagaggctaaatttttaggcgacaaattagatatgcatcctcttgttatattgttatctatatacataggagtaaaaatatttggtgttttaggtatattaattggcccaatgtatagcattctagcaaaagaaataatttatagtactgagtgattatgaagaataaggaattttagtttgatttaaataatttatttaaagttaattaagagacttttaatcttcgaattaaaccttgagcagtactgattaagatttgcttttaggaggaaaaagaatgaaaaacatttctatactaggggctacaggttcgataggatctcagaccttagatgtaataagaaaatcaaatggagaactaaagcttataggagtaacggcgaacacatctgtaaaaaaagttattgagataattgaagagttcaaaccttcttatgtaggtatgatggatgctgtaagtgctcacgaaataaaaaagtattgtgaagagcataataaaaagattaaagtattggaagggatagaaggacttgataagatagcatctttaaatgaaattgatatggtagtaacttctgtagttggaatgataggattagagccaactatgaaagctatagaggcaaaaaaagacattgctcttgccaataaggaaactttggttgtagcaggcgaaattgtgatgaaagctgccaaagagaacaatgtaaaaatatttccagtcgattcggaacacagtgctatatttcaatgcttaagggggaatgatataaatactttgagaaaaataattttaactgcttcaggaggaccttttagaggaagaactttagaaagtcttgaagatataaaggtggaagatgcactgaaacatccaaaatggaatatggggagaaaaatttccatagattctgcgacacttatgaataaaggacttgaagtgatagaagcacattggctttttaactgtgattatgataatatacaggtcgtagttcatccacaaagtattgtgcattcgatggtagaatataatgatggaagtatagttgcacaacttggagcacaggatatgagattaccaatacaatatgctctactttacgaaaatagggaaaagcgtattgcagatacaatagatttttatgaaatatctcaattaacatttgaaaaacctgatatagatacttttaaggctttaaatttagcgtttaaagctggaaaagcaggtagacttatgccaactattttaaatggagcaaatgaagcagcggtagagttgtttttagatagaaagataaaatttttacaaatagctgacataatagaaagatgcatggaagtatttaaaactcaggcaaataaagaattaaccctagaaaacattattgagttagataaagaagttaaggaatatgtaataaaaaatgcggtactttaaggagggaaaaatttaatatgtatataattttggctatattagcatttggagtcttgataatagttcacgagcttggacattttacattagctaaacttaatggggtaagagtagaagaattttcaattggaatgggaccgaaaatcttttctaaccaaggaaaagaaacacaatattctttgaggttatttccaataggtggatatgtaaaaatgatgggagaggaagaaagtgttgaagacgaaagaagtttttcagcaaaatctccattaagaagaataagcataataattgctggtgtatttatgaattatgtattagcgatagttatttttactttctttatacatgcgtttgggtacacaaataagattccgactggagttactccagattcaccagcctcagaagctgggattttaccaggagataaaatcgtgaaagtaaatggaatgagagctttctcatacgataatatttcggctggaatagtattagcaaatggaaatccagtagatatttctattgaaagaaatggagaaaagaaggacgttacggtaacaccaatgaagaatgaacaaggacaattattaatagggcttaattttgaaagaattcaaaatccaggatattcagagagttttaagcagagctttaatcagacagcttcgttagtttctcaaacttttaaaggtttagagatgatattcacaggtaaggctaatctaaaaactgatgtaggtggtccacttacaatagttaagatttcggcagaaactgctaaagctggaatttggccgctactttactttactgcttttttaagtgttaatttagctgtttttaatcttttacctttcccagctttagatggaggctggtgtgtgatattacttatagagttaataactagaagaaaggttccggataaaatagttggagttttaaattatataggatttgctgcacttataggtttgatgatattagtaacaataaaagatatattgttccctgtaaagttctaagaataaaaaatgattttataactataaaaaacttgcattcagatttgaagtgattcttatatgaatgcaagtttcctaagtttaaagtattaaacttactatacataatattaataatgtacaatatataagaagtataagacaaatattaaaaaaatagtattagaaatattttgataaaagagaaatatgcaaaaatatatatgcttcaattcacaatgcacaattcacaattacggctagaattcttgcaatatttttagaattatgttgaagaattatttttgcaatatatatatatatatatatatatataatgtttatattttagattaattataattagaggagatacattgtatggaaagaagaaaatctagaaaagtcaaagttggaaatgtatttgttggaggggactcacctgtcacagtacaatcaatgacaaatactcgtactaaagatgtggaaaatactttgaatcaaatagaaaagctatatagcgctggatgcgatatcataagatgcgcagttttggatatggaagatgcagaaagtctaggggaaattacaaaaagatctccaataccagtagttgcagatatacattttgattataaattagcgctaaaagcaatagaaaatggtgtttcagctcttagaataaatcctggtaatataggaagtgtagatagaataaaaatacttaaagaagcttgtagtgagaaaaagataccaataagaattggtgttaactctggatctctagaaaaagatattctagaaaagtatggcatgccaacggcagagggtttggttgaaagcgctttaagacatgttaaaattttagaggatttagactttcacgatattgtgatatctataaaatcatctagtgtacaaatgatgatagaatgttatagattgatagcagaaaaatgtgattatcctcttcatttaggagtgacagaagctggaactattcaaagagggacaattaaatcaagtataggaatagggacgcttcttgcagaaggaataggtgatactataagggtatcattaaccactgatccaattgaagaaataaaggttggaattgaaattttaaaagcattgggattaaggaaaaaaggcgttgaattcgtatcttgtcctacttgtggcagaacacaaataaacttgataaaaattgcagaagaagttgaaaaaaggcttgaaaattataaaaaagatattaaagttgctgttatgggatgcgttgtaaatgggcctggagaggctagggaatctgatattgggattgctggcggaaaaggagaaggaataatttttaaaaaaggcgaaatcataaagaaagtaaaggaagaagatcttattgatgccctaatggaagaaatagaaaaattatgcacagatgaaaaaagcacggagtgcaattaagaacaattcacatatgaagaaggtgcggagcacaattaagaacaactcgcagatgaaaaaagcacggagtgcaaataagaacatttcacagatgaaaaaggcacgaaattaaattagggatgttttcgcagattgaagaatcgtggagctaagtatatataataatgtatatgtctataaaatgtattttaaaattgtgaattatgaactatgcattaaaatattgagcagatatttaaaatttgggaatatcccttgtaaagttaatttgtttatgatattatataagaagatttatttctaatagctagaaaaaaggagtgggaagttacccgctctttctgtttgtaacgcaactaacttaagatagttgcgtttttgattacaaattttaaaaatgcataagatagatataagacatgtgtttttaaaagatgaaagtgagggttagaaagatgaaaaaagatgtattgattgaaagaattgaagaattagtaagacctattgtttcagaattgtcatgtgaattatattatgtagaatatgttaaggaaaacggtgagttttacttaagaatatatatagataaagaaggcagagtatcattaaatgattgtgaagcggtttcaagaagagttagtgagattctagatgtggaagacccaattaaagaagcatattatttagaagtttcttcgccaggtcttaataggggattatataaagaagagcattttaaaaagtacataggaagcgaagtgctaattaggcttactagttcactaaatggagtgaaaagtgtaaaaggattattaagagatgtctcagaagattctatattagtagaaggcgagacagaaattcaaataccaagagataaaattaaggcagcaaatttagaaggggaaatataacgaggagggtataaaaatgaatgaagagtttgtaggtgctcttaaagaattagttaaggaaaaggggatttgtgaagatttactttttacaactattcaagacgcgatggttgcagcatataagaaaaattatgcaaatgccaatacaaatgcacaaaacgtgaaagttaatatcgatagagaaacaggagaaatacatgtatatgctcaaaagacagtagttgatgaggtatatgatgatgtaacagaaatttcattagaagaagctaaagaattaaatcctaaaagtgaagttgatgatattataagtttagaagtaactcctaaaaatttcggaagagttgcagcacaacttgctaagcaggttgttactcaaagaattaaggaagctgaaagaactataatatatgatgaatacaaagaaaaagaatttgatataattacaggaactatattaagaaaagataaaggtattgtttttgtaaatttgggaaaattggaaggtataataggacctaatgaacaaattccaaatgaggaatataaattcaacgaaaagttaaaactatatatagttgaagttaaaaatggtaataaaggacctcaaatacatgtatcaagaacacatcctggattagttaaaagactatttgaacttgaagttccagaaatatttgaaggcgtagttgaaattaaaagtatttcaagagaagcaggttcaagaagtaaaatagctgtatactctaacgatgaagaagtagatccaatgggcgcttgtgtaggaccaaaaggagtaagagtacaaagtatagttaatgaacttaagaatgaaaaaatagatataataaaatggagcaaaaatccagaagaatttatagctaattctttaagtcctgcaaaggtgctaagtgtagcggttgatgaaaataataaatctgcaaaggttgttgttgatgataatcagttatcgcttgcaataggtaaagaaggccaaaatgtaagacttgcggctaaacttacaaattggaagatagatataaagagtaaatctcaaaaagaagcgcaagatgaagaagatgaaagaattctaaatactgaagtagaaattgaaaatgaacaaactacagatttaaatgaattagaaatttttgatgatattgaagttgatgattcaatagatgaagaaacttcaatggaagaaatacaagaatagaggggtgcttttcatgaaggttaagaaaattcctttaagaatgtgcactggttgcatggaaatgaaaccaaaaaaagaattaataagagtagttaaaactccagaaggcgaggtgtgtgttgatctgactggtaaaaaatcaggaagaggtgcatacatttgtaagaacacagagtgcttagaaaaagcatttaaagcaaaaagacttagtagaaatttagaaattcctataagtgaagaaatttataataaactaaaggatgaagtaaataatgaataagttttttaactttctaagtatggcaaagaagtcaggaaacttgcttgaaggatatagcaagtgtgatgactatagaaataatactaaaatttatctttttatcatatctaatgatttatcagataaatctaaagataaatttaaaaagcattgtaatgaaaaaaatataccatatattgaagacttctcaaaagaacaactaggacctccaattggacgtaaagaaattatgttgctgggaattctagataacgatatagcaaaaagactgttagcgttatatgaggaggaaaaaaatatatgagtagataataatacgggggtgactgcatgtcaaaaataagagtacatgaattagcaaaagaattaaacatagagtcaaaggaattaataactatattaaaggaagaatttaatatagaagtaaaaaatcatatgagtacaattgaagacgaagatgctgaattaataaaagaattattagcaggaaaatcaccaagcgatttagtagcatcggctgataatgctgagaattcaaaaagcatagttgacgtatatgaagatgaattagcagaacaacttaacaaaggtataaagaaaaagaaaaagactaaaaaagaagaacaagaagaagcaagaatagctgctgaagcagaggctgaaggtaaagtaattgaaattggtggaagcataactgttaaggaattggcagaaaaattgcaacaaccttcaaatgatgtaataagaacgttaatttttgccggagttatggcagcaataaatgcggaaatagattttgaaactgcagaaaaggtttgtgctgaatatggagttttagttgaaagaaaagaagaaattcaagagttagaagtattaaaaatagaagaagatgatgaagaaaatcttcaaaagagaccaccaattgtaactgttatgggtcatgttgaccatggtaaaacatctttacttgattgtataagaaaagcaaaagttactgatacagaagcaggtggtataactcagcatataggtgcttatactattaaattgaacggagaagaaataacattcttagatactccaggtcatgaagcgtttacagctatgagagctagaggtgcacaaattacagatgttgttatattagttgttgctgcagatgatggaatcatgccacaaactaaggaagctatcaatcactgtaaagcagcaggagttcctattgttgttgcaataaataaaatagataaaccaggagcaaatgtagatagagttaagcaagaattagctgaacaaggattgcttgcagaagactggggcggagatactatatgtgaagaagtatctgcgaaacaaaaccttaatattgataagttattagagatggttctacttactgcagaaatgcttgaacttaaagcaaacaaagatagaagagcagttggaactgttatagaagctaaattagataaaggtagaggagcagttgctagtcttttagttcaaaatggaactttaagagtaggagattctatattagtcggatctacatatggtagaataagggctatgtttgatgatactggtaaaaaaataaaatctgctggaccatctataccagtggaggttctaggactttctgaagttccagaagctggagatagatttaatcaagtaaaagatgaaaaaactgctagaaatatggctgaaagcagaaaagacaaattaaaagcagaaactttacttgctaaccatagagtatcattagaagatttatataatcaaattaaagaaggtaaggttaaagagcttgctataatcgtaaaagcagatgttcaaggttctgttgaagctataaagcaatctttagaaaaactttctactgatgatgtaaaggtaagagttattcatggtggtgttggagctataactgaaacagatataactcttgcgacagcatctaatgcaatagttataggatttaatgtaagacctgacaacaatgcggctgctcaagctgatagagatggagtagatattaaatcttatagaattatatatgatgcaattgatgatgttaagtcagcaatgataggaatgcttgaaccagattataaggaagttatattaggaacagcagaagtaagagaaacttataaaatttcaaatgtaggaacaattgctggttgttatgtgctaaagggtaaacttcaaagaaatgcagagacaagagttataagagatggaatagtaatatttgaatctgcattatcatcattaaagagatttaaagatgatgcaaaagaagttaatgcaggatacgaatgtggtttaacaattgaaaagtttaacgatattaaagaaggtgacatcgttgaatgcttcatgatggaggcaattaagagaaaagaactttaaaagaggtgaagatcaacatggcaaactatagaggtggaagaattaacgaagaatttaaaagagaaattagtaatttaattcaaaatgaagttaaagatccaagacttacagctatgatttcagttacagatgttaaagttacaaaagatttaagatatgctaaggtttatgtaagtatattctctaaagatgatgaggaaaagaaaaataatctagaggcattaaaaaatgcaagtggatttataaggaaatcagtaggccaaaaaataaatttaaggcacacaccagaaataattattgaattagatgactctataaattacggtatgcatatggatgaattaattcaaaggataagtaagggcaatgagtagtcttaaagaaataaaagaagaaattttaaaatcaaaaagaattggattatcattccatacatctccagatggagatgctataggcagcactttagcattactaaatgcattaagacatttaggaaaggattcatatattatatcaagagatgttatttctgataacctctctttcctttcttttgccaacgaaattgatggtaatactttagagcctaaagagggcactgatcttgtaatgatattggattgtggtaatgttgaaagaatttctgcagatctaagtaattacaaaggtaagattattaatattgatcatcatatttcaaatgaagaatatggatttataaattatgttgatgtaagtgcagcggctacatgtgaaatatcatatttactagcaaaagagttaggaattgattttaataataaaactgatgttgaaataaatatagggaacgcagtttatacagggattgtaacagatacaggttcttttaggcattccaatgttactaagagaactcataaaatagtatcagaacttatagaacttggagtaaacaacagtaaagtccatagtaatctttttgataataaaccatttgagaaagtaaaattaatgggatgtgtgttatctaatattgagcttgctctagaaaataaagtagcagtccttgagataccgaagggaatgttagaggaatttaacttaaaaaatactgatacttcagatataatttcagttggccttggaattaaaggtgtagaagtttctatgcttttgaaagaagttgaagatggagttaaaggaagcttaagatctaaaaatgatgtggatgttcgaaaagttgcagaagtatatggcggtggcgggcatataaaagctgctggagttatgcaaaaaggtgtagatatagaaactgcaaaagaaaatctgctaaagatacttaaagaagagctcgactcataaaatataaattatatttatgaaaagtaagtaataacttcacttatataaggaaggaatagagaattcatatatgaaagatacaaaaacttcacagataaatggagtattaaatatattcaaaaataaaggaatgacttcctttgatgtagttagaaaaataaaattcttggctaacgaaaagaaagtcggtcatactggaacattggacccagaagctactggagtccttccagtctgccttggaaaagctacaaaaactattgattatatcatgaacagtaataaggtatatgaggtgaaatttctacttggagtgaagacaaccacatatgaccttgaaggtgagatattggagaagaatgaaatagatcatattaagagtgatgaagtttcagaggtcgcattatcctttatcggagaatatgaccaagttccacctatgtattctgcccttaaaaaaaatggagtaaggctctatgaattagctaggaaaggtattgaggttgaaagagaagcgagaaaagttagaatatttaatatatcagatttgaagattgaattaccttatgtatatatgaaagtagcttgttcaaaagggacatatattagaagtttatgttatgatattggtgaaaaactaaaagttggagcagctatggcagaattaaatagatctgaaacatctatttttaagcaattagatagtgtaaacatagatgatttaactaaggaaaatatacaagattatattatgactatagaggatgcactttctttttaccctaaaattacagtaaagagtacatttactaaattattaataaatggagttaaagtattcgataagagattgacaaatgaaaaaagagaaaaaaatgttctatatagggtatatgatagtgaaggcatttttataggaattggaaaacaagatgatgatggattcaaaatcgaaaaattgttgctttaggcatcttaactagtatgtagctgtttttctgggtgccttgatttaggagtaaggataatgataattatagataaacattcaaaagatattcaaagttctaataattatatagctcttggaagttttgatggacttcatattgggcatctttctttaataaataaagtagtagaagttgcaaaaaaaaataaagggagaagtatggtttttacatttaaaaaccatccaagaactcttataaataaagaaaactcagtaaaacttttgatggacaatgaaagaaaagcaaaaattctggaaaaacataaagtagatatagtttgctttaaggaatttgatcttgaatttatgaaaatgacaccaaaggaatttatagagtttttgatagttaattataatatcaaggggtttgttgtagggtttaattataaattcggatacaagaatttaggaaatgtagaacttctaagagaattgcaaaatgaatatgggtatgaactatatgttatggatccacgtacatataataacgatgttgtaagcagtactagaattagaaaagccattcaagatggtgaggtttcagaagctaataagatgctcagcatgccttacacattaagtggtgaaattattcatggaaagaaaattggaagaactataggttttcctacagcgaatttgaaatatgatgaaaatttcattttacctaagattggtgtatattatactaatgttaaggtaaataataatatatataaaggaatcacatctgttggatacaatcctacggttgaaggtaaaaatttaacggtagaaacttatatattagattttaataaagaaatatatggagataaaatagatgtgagttttataaaaaaaatccgcgacgaagaaaaatttaatagtttagaagagttaaaggaccagctcgaaagtgataaagcttttgcgaaaaatgagaattgcatgtcggctttaataatatagtttacaataatagttacttttgatataataacacagggaacctaattctaagttgtaaggtgccatcttttacttggaactaggggataattaatataatacacggaggtgcacttataatggataaggcaagaaaattagaattaattaaaaagtttggaagaagcgaaggcgacactggttcaccagaagttcaagtagcattacttactgaaagaattcaatctttaactgaacatttaaaagttcataagaaagatcatcactcaagaagagggctattaatgatggttggtcaaagaagaggtcttttaaactatttaagtgatcaagatatcgaaagatatagaactttaatcaaagaattaggtttaagaagataatttttagagcggagttttccgctctattattttaaactatacaaattatagaaaaattatacaatattattaatgattagatgaacctaaagggaggtcataaattatgaataacgttctaacgactgaaatcgctggaagagaattgaaagttgagttcggaaaagtaggtatgttatcaaatgcagcaacatttactagctatggagacacagtaattttaactaatgttaatgcatcagagcagccaagagaaggaattgatttctttcctctaagtgttgaatatgaagaaagattatatgcagtaggtaaaattccaggtggatttatcaagagagaaggaagaccatcagaaaaagctatattaaatggtagagctgttgatagaactctaagacctctatttccaaagggatacagaaatgacgttcaagttgttactacagttgtatccgtagaaaaagataatttgccagaaatcttagcaattaatgcagcatcgcttgcattatgcctttcaagtattccttatacaattccagctgcagcagttcaagtaggaattatcgatggtaaattcgttacaaatccagatactcaaggtcgtgaaaaaagcattcttcatttaacagtatgcgctacaaaagaaagagtaatgatgattgaagctggtggacaggagataccagaagatactatgatagacgctattaaatatggttttgatgagtgtcaaaagattattgcattccaagaagaagcagtagctaagtttggaaagaaaaaagatgaaccagtattatatgctgtagatccagaacttgaaaaagatgttaaagaatttgcatctgacatgattaaagaagcaatgtatatcatggaaaaagatgaaagaaatgctgctgttgatgcagtttatgaaaaagttaatgaagcatttggtgaaaaatatgctgacaaaatgggcgatattaaggaagttctttacactatgcaaaagaaagttgtaaggcacatgcttctaaaagataagagaaggccagatggaagagcatttgatcaaatcagaccattaggatgtgaaataggaattttgcctagaacacacggtacaggattattcacaagaggattaactcaagtaatgacagttgcaactcttggttcaattagcgagattcaaattctagatggaatagatgaagctcaatcaaaacgatatatgcatcattataatttcccaggatacagtgttggagaagtaaaacctttaagaggtcctggtagacgtgaaataggtcatggagctttagcagaaagagctttagaaccattaatcccttccgaagaagaattcccatatacaataagattagtatcagaagttttaagttctaatggttcaacttcacaagcatcagtttgtggttcaacattagcattattagatgcaggtgtaccaattaaaagaccagcagctggtattgcaatgggattaataacttcagaagatttaagtgaagaagcagtattaactgatattcaaggaatagaagatttctttggagatatggattttaaggtagctggaacaacagaaggtataacatctattcaagtagatactaagcttcaaggttttagttttaatgtagtagaaaatgctataagagatgctagaaaagctagacttactataattgataaaataaacgaatgtatttctacacctaaagaagatgtttcattatatgctccaaaaacacaaattatgagcataaatcctgataagataagggatgtaataggagcaggtggtaaggttataaataaaattatacaagatacaggagttaagatagatataaaagaagatggaactgtatttgtaagctcaactgatcataatggtgttaatgaagccataaagataatagaaggattaactaaagaagttaaagctggagaagtttatcttggaaaagttactaaaataactacatttggagcttttgttgagattttaccaagtaaagaaggattagttcatatttctaagctagctaaggaaagagtgaacaaagtagaagatgtagtatctattggagatgagattttagttaaggttacagaaattgataaccaaggtagaataaatctttcgagaaaagatgctttagtagaacaagaaaataaggaagagaaataaagggcaattaattgccttttttttaactaagaaggagggcaagtataaaatgtataacacatatacccttaaaaatggattaagaattgtaacagaaaaaatagaacacttaaattctatcagtgttggagtaatggttcagaatggttctagaaatgagagtccagaagttaatggaatatcccattttattgagcatatgttttttaaaggaactgataaaagaacttctaaagaaataatggaggatattgagaatgttggaggacagatcaatgctttcacaagtaaagaagctacctgttattatattaaagcattagatacccatctagatttaacgttagatgtcctttcagacatacttttaaatgcaaaattcgatccagaagagatagaaaaagaaaaaggcgtagtaattgaagaaattaatatgagtgaagattcgccggaagatgtattagatgatgtgcattctaaagcttgttttggaaatgagtcgttaggatatcctattttaggaacaataccattggtaaagtcatttactagagaaaagatattaaattttattagtgaaaagtatacgccatataattctgtaatatcagtttgtggtaaattcaatgataaagagttagatgaattgattaataaatattttggtgaatggaaaagcaaaggtgaatatactccagaatatgataaaacaataatacaagttgattctgcatatgcaaaaaaagaaatcgagcagcttcatatttctctgggattagagggattaccttatggagatgaaaacaattacgcattagtgctacttaataatatatttggaagtggtgcatcttcaatccttttccaaaaagtgcgagaagaattaggattatgttattctataacatcttacctgcaaccatttcagggagttggaactttaaatatatatgccggattaaatagaaattatggagagaaggctttagaagttatagaaaaagaaattactctatttagtaagaacggaataactgataagcagcttgaaataaataaggagaaaattaaagctaattatattttagggcttgaaagtactagttcgagaatgttctcgaatgcaaagacattcttgtttagaaataaaataaaaactcaagaagaagtaataaagaaaatagataatataagaaaagatgatatacaatacgtcttagaaagatgttttaaaaagggagttataaatgcagcgtatgttgggcaagatgtagaatatagtaaattagattctataatactaaagagtgccaaagcatatgataactcaaatcataatggtaaaattaatttatagaagattatgtaataatacacctccttttctcatattattttatgagtactaaaaggaggtttttattatgagcgaagaaaataaggtgaaatatttaagtgacatagagagatacgaacttattaatataaatgatggtgaaaaatatgattatctattgaataatgatctaataatagatgaagaaggaaattttaaatatttaatagttaatttaagtggcggaaaatttaatctatttagcagtaaagattttttagaaattccatgggattgtgtaaaaaaaattggtgctaaaactatcatattagatgcagatgaggaagtaataaaaaaagtaaagttataattcaggaggaaatttaatgaaaatagttgtacaaaagtttggaggaacttcagtatccactgaagaaaatagaaagaaagtaattgaaaaagttaagagtgctattaaagatggatatagtcctgttgtggtagtatcagcaatgggaagaaaaggtcagccatatgcaacagatacattattatcattaataagcgataaatttaaaaatgccaataagttagcacaagacttattaatgacatgtggagaaattataagctcagttgttatgagtaatgatttgtataatgcaggaattgatgctgtaccacttactggcggacaagcaggaatattaactgataataattttactgatgcaacttgtattgaggtgaaacctaaaaaaatactagagttagtgtctcaaggaagaattcctgtagtaactggatttcaaggaatgactgaaaacggatatttaactactttaggcagagggggaagcgatacgacggcttctattttaggagtggcccttaaagcgtcagaaattgaaatatatactgatgtagatggaatcatgacagcagatccaagagttgttgaaaatgcaaatttaattgatgttataagctataatgaagtattccaactagcagataagggggcaacagtaattcatccaaaagctgtagaagttgcaatggaaggaaatattcctatattaattaaaaatactatgagcaatagtaaaggaactttaataaacaactttggagataaaagcaatgacaggataatgacaggaatcgcaagccaaaagaatagaattcagatttctataagggctgcagaaaatcaaggaaatgtaaaatacaaaaatgtattggatttattagctgcaaataaaataagcttagatctaataaatatatttcctaatgaacaaattttcactataaatcaagtggataaagagattttagaaaatgttctaaatagtgctagtttaaagtatactttgatagacaactgtagcaaagtagcggttattggttctagaatgaagggaataccaggagtaatggctaaaataatcaaggcattaagggataataatatagaagtattacaaacagcggattctcatatgacaatctggtgcttggttcactctgaaaatgaaaaagaagcaataaatgttttacataaaacttttaaactttaatataacggaagtttaattaaatgagttctatgagtttttatatagagtaagttaaattaataaaataatagatttgggattcaaaaggaaaattggctagttgggtaagttcgagtaactaaatcatagattttgaatttaaaaggaaactcgactcgcttcgttcgctgagtaagttcaattagccaaatcatagatttggaatttcacttatgtataaaataattcctactgtacaaaataaaaagagtataggaggaattattttatggataaatatattttaaataataatgagaaagaaaaggaagataaaaatacatcagaagcacaggataaaatagaaaatgtaaaagaacttggaaatactacattagcaactccaaataaaagaatacaggttttatctataatagggcagattgaagggcattctgtacttcccccacaaacaaaagccacaaaatatgaacatattatacctcaattaatagatatcgaacaaaatgatgatgcaaaagggctactcatagtcttaaatacagttggaggagatgtagaagctggtttagctatttctgaaatgattcgaagtatgtcaaaaccaaccgtttctatagtaattggtggaggtcattccataggagtaccgcttgctacatcagcagacttttcatttataacaccatctgcaacaatgatagttcatccagtaagaatgaatggatttgtgattggagtatctcaaacatttgaatactttaagaaaatgcaagaaagaataaatgagtttatagttagaacatcaaatataaaaccagatactttagaaagattcatgcttcagacagatgatttattaaatgatgtaggaacaatgttaattggaaagcaagcagttgattgtggacttattgaccaagttggaggaatacaggaagctttaagcaaacttaacgaattaatagaaaaatagtagctatttttaaggttatagaaaaaatctatagccgatttttgtttttagtgttatcttattaaaggagaattgctattcaatgtagaaataaaattatgaggtgatttaaggtgggtaggactaaaggcaaacatagcactacaaaaagtaaaaaagatgaaaacacaataaatccagatatagtaggaatagtgtatattgcaacaggaataatacttggtatagcaatatacacttctttagctggaatattatcatctttagcgcaaagagtatcatatgtagtaattggaataggtgcaaatgcattgcctatttatttaatatattttggattccaatatataaaaacacgaggaaatattaaattaagcaagaatttttttggaataactatattagtagctgttaccatattgacatttggaacaataaacattcaaagtttagacgggcaaggaagtttttttgaaaattttaaggtcatacttaatgatagcgcccagactcctcatggtggaataatggcatatctcatatgttatccaatgtataaaattataggggcccttgggacatatatagttcttctcgcattttcaataattgccatcactttgattttcgatattactctttatgatttagggataaaggcctacaataaaggtgaaaaaataagaaatagcagaagaagtagaaaagtaagggatgagcagaaaccagttagagagaactttataaatatagtagaaaaagatgataaagaaaatgaaaaagaagcatttctttctggtgtagaaaagaagataaaaattctagattttatgaaaaatactagtgatgatacagaaatctcacctatatcaaaagctgaagtatcatcagatattcagatagagagttttatagaaaaacctacgcaaagtcatactaagaagaaagaaaacttaggtaatgatgttaaggaagtagtaaataaagagatacaagaacatataatggaacaaaaagaaactaaggagtataaacatccaagccttgaattattaaaattaaattcaaatacaaaacttaatagcagtgacaaaaaagaattaatagagaatgctaataagcttgaagaaatattatctaattttggagtagatgccaaggttactcaagttacaaaaggtccatcagttacgagatttgaacttcagccaagtccgggtgtcaaagttagtaagattgtaaatctatctgatgatatagctttagggttagcagcttctgggataagaatagaagcaccaattccaggtaaggcggcagttggtatagaagttccaaatggaaaacaaaaaccagtctttttaagagaagttctagaaaatgatgaatttatcgagtctaagaaaaagcttgcatttgctttaggaaaagatatatcaggaaaatgtgttgtgggagatttgagtaagatgccacatacactgattgcaggggcaacaggttctggtaagagtgtatgcataaactctcttataataagcctattatataagtataatccagaagaagttaaacttttaatggtagatccaaaggttgttgagttaaatgtttataatggaataccacatcttttgattccagttgttacagatcctaagaaagcggcagcagctttaaattgggcagtaaatgaaatgaccaataggtataagctctttgcagactctggagttagaaatatggagtcgtataatgaattatttaataagggtataatagaacaaaaactgccatatatagttattatagtagatgagcttgctgatcttatgatggtatgtcctaatgatgtagaagattatattggaagattagcacaaatggcaagagctgcaggtatgcatttagttatagcaactcaaagaccatcagttgatgtaataacaggggtaattaaagctaatattccatctagaatatcatttgcagtatcatctcaaattgattctagaactatcttagatggatccggagcggaaaaattgttaggaaaaggtgacatgttatattatccagtgggagaaagtaagcctcttagagttcaaggctgcttcatatcggaggaagaagtagagcaagttgtatcgtttattaagagtgaacagggtgatactaagtatgaagaagatataattgatcatattaataatgcgtcagattcaaaatctgtggatgcaaatgatagtaatgacgatgttgatgaattacttaatgaggtgataaatgttgtagttgagtatggtcaggcatcaacttcgtttattcaaagaaagttcagaatagggtttaatagagcttctagaataatggatcaattagaagaacgggggattatatcggaaaaggatggaagtagaccaaggcaggtgcttattactaagcagcagctattagaagatgaacatgaagaggaaaattaattaataatgtctaaaaagtttaaagctatagttttagattaattatgaaataaaattaaacattatgttaacttttttaatttaactcttttgaggtaaaataataagtgatttttatgagatttgggagtagtatatgtataatagcaacttgtaaaatgtagttctaatttgttataattaagactattagaacgtaggaggatataagaagttgagcgaaattaaaatagaaatagcgaagaatagagaacaatataatgaagaggcttcaagcaagtataaagttggaatggtaagcttaggctgtgataaaaatagagttgactcagagataatattaggtaagatgagtgatgaatatgagataactaataaccccaagaacgcagatataattatagtgaatacatgcggatttatagagagtgccaaacaagaatccattgacacaattttagagatggctaattataaaattaattataaatgcaaactgcttatagctacagggtgtcttactcaaagatatggagaagagttgaagacattaatacctgaaatagatataatgcttggagttaatgactataataaaataaatgaaatcataactgaatttatagatggaaataaattagcaacagaacttttgaattattccgatgaaaacattaatgaaggaaagagaattattacaactcaaagggagagtgcatatataagaatagcagaaggatgcaataatttttgcacatattgtataattcctaagataaggggaaaatttagaagtaggaagatggaaaatattataaatgaagcaagagatttgagtgagagtggagtaaaggaaattatacttatagctcaagacactactttatatggaagcgatatttatgggaaaaagaatctgcatgttcttcttaaggaattatccaaaattgaaggaattgaatggataagggtgctttattgttatccagaagagatatatgatgaacttataaacgaaattgcttgcaatgaaaaagttgtaaagtatttagatatacctattcaacatataagcgataagattttaaaacttatgggaagaaaaactagtaaaaaagatataattaataaaatacaaattttaagagaaagagttcctgaaattgttataagaacaacatttatagtaggatttccaaacgaaactgatgaagattttaatgaaattattgatttcttaaaggaacataagcttgagaaagtaggtgcatttacttattctcaggaagaagatactccagctgctaaaatggatgggcaaatagatgaagaaattaaggaaaaaagagaagaagatttaatgcttttacaaaagaatatttcagaagaaataaataaattgaaaattggaaagttatatgatattcttgttgagggatataatggaaagtgctattatggaagaagctatgaaatggctcctgatatagatgcaaatgtattatttgaatcaaatgcaaaaatagaaaatggtgaatttgtaaaggtaaaaatagtagagactatggattatgatttagtgggagttgttgttgatgaatcttgcaaataagttaaccttaattagaatatttttggttcctgtatttttagtatttatagcagttaaagatataccatatggaagttttattgctacatttatatttattttagcttcattaacggataagttagatgggtatattgctagatctagaaatcaaataactaactttggaaaatttatggatcctttagcagataaattattagttactgcggcgttaatttctttagttgatttacaggtagtaccaggatgggcagccgtagttataattgcacgagaatttgctgtttcaggtttaagatcaatagcggcagcgcaaggaagagttatagcagctagctggtggggaaaaattaaaacggttatacaaattatagcaataattttattattattaaaagtaaatattcatgatgcaaggctgttaaaaatttttgtaatagacaattattatttgaaaggattttttaaattcgctccaatgataatgcttatgattgcggttatagtaaccctgctttcaggttacgattactttaaaaagaataaggaagctgtttcttacgataaataaaatatataagatccatgtttagaaatataaaaaaatggatatgaattaaaaaggttccttctttgctagcaaagaaggggcttttcttagaattaattattgactatggtttgtaattaatttataataaatatagaacataagttcgatggaagggagttaattagtattatgggaattataaatgcagaaaagttaaaagcaattgaaagtgctatgagtcatatagaaaaacaatttggtaaaggatcagtaatgaaattgggtgatcacaatatttctaacatggatgctatatcaacaggatgtttagatttagatatagctcttggaattggaggagtacctaaaggtagaattattgaaatttatggaccagaaagttcaggaaaaactacaattgcgcttcatatagcggcagaatcacaaaagaaaggtggagcagtaggatacatagatgcagaacatgcattagatcctagttatgcccaaaaacttggagttgatgtagatagcttaataatttctcaacctgatacaggggaacaaggacttgaaatagctgaggcattagtccgttctggagctattgatgttttggtagtagactcagttgcggctttagtacctaaagctgaaattgaaggagaaatgggagattcacatattggtcttcaagcaagacttatgtcacaggcgttaagaaagcttgcaggaacaataaataagactaattgtgttgctatatttattaaccaattaagagaaaaagttggggttatgtttggttcgccagaaacaacaactggaggaagagcattaaaattctatgcatcagtaagacttgatattagaagaatagattctataaaacaaggggattcaataataggtaacagaacaagaataaaggtcatgaaaaataaagttgcaccaccatttaaacaagcagaatttgatattatgtataatgagggtatatcaagatgtggtaatatagtagatgttggagtaaaagaagagattgttcaaaagagtggcgcttggttttcttatggagatataagattaggtcaaggaagagaaaatgctaaattatatctaaaagaaaatcctgaagtggcattagatatagaaaatcaaattagagaaaagtataatcttccacctgcagaactatttaaggcagctgcaccagagggagctaaagaaaatataagcgataaagatgatgttgctgtagatacaaaagaataaagaagatgtaataaatggaaagtttaaatgtgaatttacttcataatatttattaataaatgtatagctgcatatattatgataactcatatatatgcagctatattaagtatttaacagcataatgcagtatgtaacagttatatgcgcaaacttgacataattttgtttttaatatagaataaaaaggaatactggtttatcatattccaaatgcagtgagaagaatatgacacctactatactttcttgttaataatataatgagaaaatgataaattaggaggtgtttatgtggtaacagcagtaatgatattaatagatgtaatagttttattaatattaggaatagtggtttataaaacgattcaaaacatatcaaaagcaaagattgaatcgcttgaaaaagaagcagaagaaattctagtaagagctaaaaaggatgcagaagcaactaaaaaagaagcaatccttgaggcaaaagaagaacttcataaattaagaaatgattttgataaggaatctcgtgagagaagaaatgagattcaaaggcttgaaagaagagtaattcaaagagaagaagcacttgataaaaagagtgaacttcttgaaaagaaagacgaaacaatcaatcaaagaatgcttgaggtagatcaagtagaagcaagagtacagaagctttatgaagaaagaagagcagaacttgaaagaatatcggctctatctagtgaagaagcacgtgagattcttctagatgaaataaggaaagaaattacacacgatgcagctttaatgataaaagatattgaaagtaaggcaaaagaagaggcagacaagagagcaagggaagtaattacaactgcgatccaaagatgtgctgccgatcatgtgtctgaatcaactgtacacgttgttgcactaccgaatgatgagatgaaaggtagaataataggtagagaaggaagaaacattagaaccttggaaacattaacaggagttgatttaattatagatgatactccagaagcagtcattctttctagctttgatccaattaggagagaagttgcgagaatggcactagaaaagttaatagtggatggcagaatacatccagcgagaatcgaagagatggttgaaagagcaactaaggacgtggaaagtagtataaaagaagaaggagagcaagcagctcttgaaactagtgtacatggactacatcctgaaattataagacttcttggtagattaaagtatagaacaagttatgggcaaaatgtgttaaagcattccatagaagtttcatacttagctggcttaatggcttcagagctaggtttagatgttactttagctaaaagagcaggattgctacacgatattggtaaagctgtggatcaagagcaagaagggcctcatgctctaattggtggagatctagctaaaaagtatcacgaatcgccattagtaataaatgcaatagcagcacatcattcagatgtagaaatgcaatctttagaagcagtactagttcaagcggcagatgcaatatcagcggctagaccaggcgctagaagagagacattggaagcatacattaagagattggaaaagttagaggaaattgcaaattcacatgaaggtgtagaaaagtcatatgccattcaagctggtagagagattagaattatggttaaaccagataaagtagatgatgctggaacaattgaattggcacgtaatttagttaagagtgtcgaggaagaacttgaatatccaggacaaattaaaattaatgtcataagagaaactagagcagtagattttgctaagtaaaaaaagtgaagtatattttgttaagtgatgaaatatacttcgttttattatagattagatgtaattaattcatttaaactataattgagtatataaaaacaaaatacctagaaataaaaatattttttaatttagtaattctaaaaggaattttaggaattatatagaatatatttaatgtaaacgatttgtgtattaaattctaggaggaataacaaaaatggaagtattaaaagtatcaacaaaatcaaatcctaattctgtagcaggtgcactagcagctataataaaggaaaaaaatattgcagaaattcaagctgttggtgcaggtgctataaaccaagcagttaaggctattgcaatagcaaggggatttgttgcaccaagtggaaaagatatagtatgtgtaccggctttcacagatatacaaatagatggagaagaaagaacggccataaaattaatagtacaacctagataattaaaattatttctaaattatcatatgagcaatcatttttaagttgaaattatcaataaaaacgattatactataatagttaaatgctatatttattaattttttgtaaagaggtgtatataatgatagcaaaagaggttacagtaaaaaattcatctggtcttcatgctagaccagcaacattattagttaagaaggcttcttcatttaaatcagacgttagtatagaatataacggcaagaaagcaaatgtaaaaagcttaatcggagtattatctttagcagtaactaaagatgctactatcaaggttgttgcttcaggagatgacgaagctttagcagtagaagaaatcgttaaattagttcaaactttagaagactaatataccaaaaaaggttccatattattaatatggaaccttttttggtgcattagtagtataaatattaaataatttatataagtataattcttgatatcgattactcatgcagatctttaattaaagtctaattctcatccattattaaattgcatctaaatagcaatgaaaccaaatctaaggcacctaaaaatactgcaatatagataaacctctctattattggaatattcatagaaattaattttgctatatttaggttgaacaaacctattgttccccaatttaatgaacctataagaactaataaaaaggaaagtttatctaagatacctatcttacacatatttcttcactccaatctttaatatgatccttagtatatatatatgattcttagagacaataataacaaaaatgtaaaataaatttaaatacaaaagagaacaaataattctaaaattaaataggcaaaaatgaaaaaaatatgatataatacgaatgttaaaagaaaaagcataaaatatattcgtgtggaggtttttagatgagaaatttatatagcacacctttaaattcaagatacgcatcaaaggaaatgagctttattttttctgatgatatgaagtttacaacttggagaaaattatgggtagctttagcagaaggagaaagagaactcggattaaatataactgaggaacaaatcaaagagttaaaagaacatatcaatgatataaattatgatgaggctgctaaaaaagaaaaagaagttagacatgatgttatgagtcatgtatatgcatatggtcttcaatgtccaagcgcaaagggaattatccatttaggagctacatcttgttatgttggagataatacagatattataataatgagagatgctttaaatctaattaaaaataaaatagttacagttctaaatcatttgaaaaattttgcactagaatataaagacatgccaacattaggttttacacattttcaaccagctcaattaactacagtaggaaaaagagctacattatggatgcaagatttagtaatggatgttgaaaatatagactttttattatcaacattaaagcttagaggtgttaagggtactacaggtactcaagctagttttatggaactttttgatggagatgaaaataaagttaagtctttagataaaattgttgcagaaaaaatgggatttgaaaaaagttatggagtaacaggccaaacatacccaagaaaacttgattctattgtattaaatacattatcggaaattgctcaaagtgcttacaaatttagtaatgatttaagattgcttcaaaatatgaaggaaatggaagagccatttgaaaaaaatcaaataggatcatcagctatggcatataagagaaatcctatgagaagtgaaagaataagtgcattagctagatatgtaatagtagatgcattaaatccagcaattacagcaggaactcagtggtttgaaagaacactagatgattcagctaacaagagactatctgtagctgaaggatttttagcattggatggagtgttaaatttatacataaatattgctgaaaacatggtagtatatgataaagttatagcatctcacgtgcaaagagaattaccatttatggctactgaaaatataatgatggaagctgtgaaaagaggtaaggatagacaagaattacatgaacaaattagagtgcactctatggctgctgctcaaagagtaaaaggagaagggttagataatgacctaatagatagaataataaatgatgattcatttggcctatctaaggaagaaattctagcaattatagatccaaataagtttgttggaagagcaccaagtcaagttgttgagtttatagatgaatatgtagatcctattattaagaataatgaagatgcattaaaaatcaagagtgagataactgtataacaatataaacgttaaaattaagcatatatataaatcaaagaaatgagatacatatttatgaatatgtatttgaaagctaactgttataaatgaaagttcaaatttataatttgagttcacgaacttagttaacttattaaaaattgatttaattataagtaaggttgctaaggattagcttgcaagattaaagttgaagcaagctggtccttaatgcaacctctttttatgtgctttcagagttatgttttgtagtattcaggtaaacatgtatctgacttagatttatagatataataatcataaactatacttaaactatgaagtatcttccaaccagaaactggaacaaaagtatattattcatttcggtgagttatacgaataagtatagattatagtgttgggttatctatatatgatctggagtttgagatagatattgtatatcaatcgaattttaaggctctgagtgttggatatctgttgggataaatttgactaagaggataattcaatttgtcataactatgacagcaataaagacagtcaccattttgaagcctataagtaataaagccattatgaaaatatcgtcctatagacggagtgtaaaattgaattaagcagcctctatctaatgatttatcgtttggaagcttagtggcttctaatttcggcgttattaagtattgatatagttcttcaactcgaatccaggcatgagtatatggtttccaagttgcattttgactgaaacccccagcatgaattatttgagacataaaattagtacaatcccctccgatgccagaaaatgatttgtattcaggattataatttaatgaaaatctttcagcataatcgcaggcatctgtgacattaaatttggaagctcttttttcatcatggttattagtagaaagccagctagaagctatgaacatttcaaataatgaatcaattgatgaaagtttatccttatatacatttatgttgctgtttttattgaaattacggctatttactaggcttgataaatcagtatttaggatatgttcatataaaagtggattttcttcattctctgctataaattgtattttgcatttgtcttgcaaatactctaaaatgagtatatattcatttattgaaactgaatttatattttgaggataagttttaacaataaaagaagtcttcagaatcagtttaaccttaataaaacttggaatttgttctagtatattatatgcataatcaaatttatagtctttaaatgaagagtttaatttttttgcccattcaaagttgaataatttttttaggtaaatttcttttaatatggtatcatctaaattatacttatgtttagaaattaaattgatattattataaggcattgatagtaaaaaggataaattatataaactatttgttagcatatagtttccttatttaaaattgttatcattaaatatgtttatgagggaaattatagaaatgtgttaataaattcattttttataaaattatttgtttgcattacctgattgatagtttaatatgagctttaggcataatcaaaaaataacacttcatttatttcgtatgccttaatgaactaaaattttcagaaaaatatatattaagattggtaataccctagat

SEQ ID NO: 52 - DNA, 41371 bp, Clostridium beijerinckii
cctacatcatgttcatgatatactttattctctttcaccatatcactcccttgtttcttactttaattataaactatatttcattttcttaaaacaaaaaattgcactaaacaattcacttagtgcaatacttgtaattggtaatttttcataaggttctaactcttttttgagtgaaacatgactcaactaactattctaatatttcttctgttttaataaataatccttcaaaaatattactggagtaatactcatttatagaaggcttaaatacgccatctaccagattatactgaatcatctcacctgtctgctcaactattacatattctaaaactccatacctttgatatatttgaagtttggttatataatcatgtcctgaataattaggagaaaccacttcgaatattatctttggtggagatacgaagctttctccaactttttttccatcttcacacattacaaatacatctggaaatatatttattatatccttatcattatgaaattttaattctatttgctcagtatatactttacatttactattagttaagtagctcataagcttaaattgaatattatttactatctcattatgtttaacagaggttttagaatgaagaacaacatctccatttatgaactctatattatatttatatttatgttgtaacttctcatattcttctaaagtaaacattctattttcttctatatgcatttatatcagccccttatttaataaattatatactaatatatttttattatagcctaaatcacattgtaatgaaacaaaaagcagacatgattttttattaaccatacatgatatacattaaatacatgtgatttaaaagtactaataggtagcttgagaatgaagttgctatatatatctttccaaacattttttatagaaaaactccacaatattatctgcttttatagtgttataaaattctaacatcaaagtattaaattctaatctatctttagctttaacatttaatactccttgaccattagaaagcaatatatagttacatactaatcttgatgttctcttatttccatcataataaaatttatttaacgccccccataggaacatttcaaatgctaaatccgtctttgtcttacatctatctataatttgtggcaattcagtagcaaatataatttctaattcatcatattttggtggcataaaatctgttccaccaatcctaacctgtcctgttctaaattgcccacatattaatgcttcatcttttgcaattattttgttgaagtcattaaaaagttctttccccattgttatattatctttcttcactatttcaaataataaattccaaccttcttttatacgaagaacttgttgctcatcacttaatctatgacctccaattgttattccatctaaaagtgtttgtacttctggatatgtaaatggatttccttctaagctcgccatattaaatacaacatctggcaataatctttttatcaatataattaatttatttatttctaattgaggtacaacatcggaaaatgtaacatttcgctcaaataacattatctttaacatcctttcaatttgtctataaagtaattatattacaccctataaccaatttccttaaaacaaaaaattgcactaaactttcacttagtgcaacacttgtacttataaacttttggacctcaggagtgctggtgaggaacttgtgactcacttgctaatttttgttccccccaggggtgctagtcgggagcttgcgagcgacttgtccgaagggctgaggttgctaactagaataaaatggactcattactaataactttcccaatattccaaagttcatattcactaatatcaatatcctcattccagcttacaccataaccaccaatatcaacttgtgcttgttcaaataacatcttattttttaaatcactgtagaaatcattttgtagtttttctttaaaatcaatctctttaagtattccattatcaaataaaactattaaaatatattgctgagaatctatctttattttctttattttaggattattcataattattattctaagccctctaacttcctaaataatttagtattccacatatctatcaaatctttttgatatctctcagcccattcttttactaattttaaagctctatttgataaatcaccttctatcatttctaatgtatttatatctataacaccaacatattctccatatattgcatgaaaatgtggtggtgtatgatcatttggatacatctttactactatcccataaaatcttgtaataactggcatgttgttcacctcattcattcatttatttatattatatcccataaactatttttcttaaacaataaaaattgcactaaacattaatttagtgcaatacttgtacttggaaaattatgtttcccctcaggggtgctagtgattaacttgtgactcacttgctattttactatattttttaaatactctataaactcatccttaatttcaggctttcttaaggcatattctactgttgcttctaaaaatccaagcttatctccaacatcgtatcttcttccttcaaagttataagcatacatagcttcacttttagcaagctctagcaatgcatctgtaagttgaatttcatttcccttgccaggttttgtattttctaagatttcaaatattgcaggagtaactatgtatctaccaagtattgcagtattagatggtgcatcttctatacttggcttttctactaatcccttgaccttgcaaaccctatcttctattactattccatcaactataccatacttacacacatcttcaggttcaacactttgaacacctaaaatacttgttttgtactcatcataacaatcaataagctgctttaagcaaggtttcccttcattatatactatagaagaatcgcaaaaggttcattacctacaaagctcttagcacaatgaatagcatgtcccaatcctctaggttccttctgtcttatataatgaatatcaaccatatctgaaatatctttaactaattctaataattcatccttgtggttttttgcaagctccatttcaagttcaaccgatttatcaaaatgatcttcaatacattttttatttctaccagtaacaattagaattttatcaatacccgaagcaaccgcttcctctataatatattgaattgttggcttatccactataggaagcatctcctttggctgagccttagttgcaggtaagaatctcgttccaagacctgctgctggaattattgcttttcttattttcttattcatttatgtttctcccatattttttaatatgaatataatattcaatttttacttgagtaatttcacaattaaattcaacaaaaagattgcactaaacaattcatttagtgcaacactacttgtacttggaaaattctgtttcccccaggggtgctagtcgagagcttgcaatcgacttgctaatttagtacaacctccacaattgataacttttcacaagggtctgatccctttgttagtcaagcataacttaacttgctgcattttattgattttcctttaaaatttcgattgttcttccgaccccttcatcaatatcataaagcccttgccacccaagattctccaacttgctcgcatccaatgctgagcacgacatcatattatatcccaagatttccacatcatctggattttcaaatacaatctttcgatcacagctatttgcaaagctttctgcaagttgtcttattgttacaactgaatttctatttgaaatattataagcttcccccgatgttccattcaataggactgccaatatagcagatacacaatcgaacacataacaatatgaacggagttgtaatcctgcactcttcataataatatcttgtccatttattacatttcttgcaaattgagcagaagcccttgaatcactatttgtcatggttggtccatatatatggcctggcctaacgactaatacatctaaatcgtattcttttttgtaacttgcacataaagtttcagacgcccttttacttgaaggataacaagctcttggatttaggatgttaacaaatccataatcattttctttataatattccgaatcagttttttcaccatacacttcgctcgatgaaatatataaagttctaagtacgttatgttcttgagcgtacttcagtaaattattcattccgcaaaaattactaatcatagtttccaccggttgttctgaataagctaatggatgtgcattactagcaccatgtataatataatcgacatcaaaatcaaaatccaactctttattagcatcatataaaacagaagtaaaaaaatctttatctaaaaactggctaaatctttgttgaattctatctttacttcttccagctgcatagatatggatattcgaattatctatgcaatttttatagattaacgtatctataattgcagagccaatcaatcctgtggatccagtaactaatatgcttttattcttcataaaatcaacattaaaaacattatctattgtttcctgtaaatttttattatacttatcattatattccatatttatattccttccttattattataaaagtaatataatttttactatttgatccatgcatcattatttgaatgtaaaagcgctttgaagatttcaatatcctcaactgttgtaattttaatatttttttcagatcccaatgaaaaataaattttttcaccaagtgcattcataagagaacaagaagcagctgtatttataatacctctcttttcagcttcttcatgagcccataacaacttacctaatttataaacatgaggtgtctgtgttctatatagtttttctctcggaattgtattttccgattcaataccatcttcactttgaaaaaccgcttcagtacatggtattgatgcaatagcagatccatatcgcttatgtttaatcaacgaatccgtaataatatcttgagatacaaatggtctatttccatcatgtactaatactacatcatcaatattacaatgcttgcttaattccataagaccattttttattgattcttggccagtcttcccgccttcaacaacccactttaattttgttatattaaattgttttgcataagcccataaaatttctatccatgcagataatccaacaacaataatagcatcaatgctaggatgcttttgaaaggcttccattgtataaatgataattggcttattttcaacatgtataaattgctttggtatatcctgatgtgctctagttccaataccaccagcagttaataatgctatattcataaatatttcctcttttcttataaattaatttattttgaaacatttttctttaaaatcatgtggtatttaaatgcaaataatgttgcaaccaagtatcacaattatatcctataaactatttacttaaaatacaaactacactaaacattgatttgatactgtattttttggtaaataactattattatatatttctaatctttccacataattcggcagatgactgaaactcttgtgaatgagataacggttgataatatcaaaagggatgaagtgagctcttcttgatattccttatataagaatgatgcttttacgtgttcagaaagatcatttacttatttaataataatgcaattttcattttcgtaaccccataaattcaaccaatcttctacaactattaccatcttgatacttatataaccatttaatcagcttactgcgcctatccttgaatacatcattattagaagcaacattttcaataaatttaatcatgtcattaaatgtaaagattttatctccaaccagataatcctctacattatcaacgcataatcccaatttataatcttttaaatctgataaaacaaaaccaatgggacgattcattaacaaatatgaaaaagccgatgccgaataatcactaatcaacgcatctacatttgccataagtctataattatcgatcattaactcctttactgtaatccccgtcaaaattttgatattaggagtctcacttaagttagcaattgtctctaaatcctgcatcggatgtatctttattactaaaatcaccccaaatttattcaaaatcctatcaagcttttcaaacatttcaacactatcaatcatcggaataccaaaaggcaactctgcatcactgtcaactcgcttatatccccccccttttctaaatgtaggcatccataatatttttttattatatttaccatctgtaatcttactaaattcatctgtaatgtttttaaaataaacgtcttctgatggatatcccatgtgaatcatcctatcatttggatatgacatagacaactcgcgtgacaaaatcgaatcataattcttagatggtgacaatacataatcaactgaagatggtatatcacacaaaccttgggtttcttttaaactaatagcaccatgtgtaaaatagaacgatttttgatccgaacgtactttatcagtaatcgtattatcagatagcagatactttgccatgcaaatatagtaagcttttttaagacttggcttatgtaaaaaaaagcattctacattttggggaagtcgatctggtttatcatgttttaacaaccaaataattttataatctctattaaacccattatcaatcaaatagttataaaatgcgccaccattacaatcaaaatcattgtgactctcaataatgataatattcttcaatgctttattcttagtaaaaatactgcacaatttagtaaatgctatttgaatcttatactcataaagaacttgcaccattcttttgattcctttatctttaatgtagtgaaataatttcatcaacgtactttcctttctttaatgatttacatttattaaccacatattaccaatcgcatattcattaataaaaaaataaatgttatctttggatatctttaatttctttaataatccattccttttttatccaagcaataaataaagcactaagtaaaattgaatatctaattatcatgtatttataaattattaccattatcatcataacaactaaaacaaaaaatgtaataaacacatatcgcttaatgtcaaaaatatctgttaatctaatatttttttgcttcaaaatactataacaaaaaagaaaatgtatagtagcataaagaatatagcaaacaagcgttgtatatccagctgcatagtaaccaaatcttggaataaataagtaattcaatacaacattaatgattgcacatataatactagatattgaaatatatgttgtctttttataatagtattcaatgttactaaacaaagagtacatgaatatgaaaaatacagatgctgatactggcggtattaccccaattgcctcatagtaattacttccagcaaatatatatattatttctggtgcaaaaatgattgatacgcaaaccatacttgccgcaagtataagtaatgtattggcattcttttttataccacaaaaattattttcttttaacgcttgataagtatatggcgtgaaggaattattaatcgcattagtaaccaataaaacaactgttccgattacatatgcaatcccatacattgcggcagatgaagcatcaaccatattcttaatcataatcctatctgactggttcaatatcattgtagataagaaatgtgggattaaagggatattaaatactaaagcatatttccaatattttttgtgaaataatttttttcctcttaaaactagcaaaacaaagataaaaattcccacaacagccttaacaaaaacatcagaatatactcttgcttctaatttataacttgttgacaaaactgcaataacagaaatgagtatactcatcactgacatgccaatacttgttccaatcaatgctttatatttatattcaaatctcaattttgttgtccaaaactcatacgctggcatggtaaaaagctgaataaacatagctgtcataataattggcgataaacccaaaaaacgtgtccaaaaatcaatattaagagcataaataactaacgtgactatagtaataactgtagtcaatgctaataatgaagatgtatatttatctttatctttatcaaattcaactagtcctttaccatacacaccaataaaaagattacatgtcccaaaaattataagaatgccataccaagactgaaatactgtataatctccatactgctcagtagtcagcattctagtaaatataggagttgcaagtaacgcaattcctttattaagaacattgcatattgtaaaccaaaatgaggccttaacaggttcagaaagtccctcatattttttaattaatcttattattttttctctcattttctaatccgtaagctcctatatatcatcatatttatattctttaatcttttctcctattgttttcataaacctcaagctctaagcgcaatcacaaatcacctcatatttcaaaggtagtatcatcccaattataatacatttatcaactatacttcagaaatcaagttcctaaactactttttaaataatacttataatttaatggaacctttcctcttttttgagtttattataatgatccttatccctatatttaaaagaaattgcaggatgtccgcctgcaattgcatatggaggtatatttttacataccacgctccccgcctgaataatggcaccttctcctatagttactcctcccaaaatgattacattatttccgagccacacattgtctccaattattacatctttatctataaatgtatcatcatatggaattgcattaccttcataattatgaaacgaagtaataatttgacatccaggccctgagtggaagttatctcctatattcacctcgccctttccagaaatcgccatgccgttaaagcatacattatctcccaatattgtattaccagtcacataacttttcccgccaacatacagttttcctctataaaattttgctgtttttctaattttccacggataatatattttattaaactcaaaaattattttcctgaatatactcattttcaatttcctttcattttctctcaatctactaatctatatagtccaaacaaagatgatagaaataaaaacatataacaatatagtgttgtactgtcagttatcataatagcgaggaatgtaattaacgttccattagccagaactttatattttttcaactgaattctgtctatatatgaagaaaattcaatcatcataatccaaaaggatatacataatacaactccaccatcgattaaattctgaacaatctgattgtgcgcataattcatcccagtactccaaaaagttgttattaatgccccatcaattccatatccaaaatatgggctattacaaaaaagttccagagcgtttttccaaacaaaatttcttccactaaaagtactgttgtctataatatttacaaaaatattatttcctgacacagtatacactataaaaacgcttaacccccaaaaagcaaaaacataccatttagatttaaaccatagcaaatgatatattttgaatttatacatcataccaacaacaatcataataattgctgcaactctagcagaatcagcatctccagtaaacattgttattaatgaaattatgataaaaaaaactgccttaattctccgatttttatctaataagaattgtaaagatccaaaataaagtgccaatgttccaaactgtgatatagtttggacatggcctaagaaaacaatgtgttcatatgcaaaaaatattgatctaaatgcaactaaattaataatgaaattaacaaacaatatattaactatgctattaataatttttatcccatcttcttcaaaattcattgagaaaaaaatgcataaggcgggtgctgcaatcatctgctgtaaaccactcccaattgttcctcttttgacccaagtaattataattgctaataaaaaatagagagatatcataaattttttattgttaaatttgcagccttctttgatgcatctcaaaaaaaattggcttaatattaacaataccgctatccatatccatattgtaaagaataatttatagccttcatttatttcagaaaaccctctcggatacaaaaatggtataaaaataaaatataaccatatattttttagtactatccttatagaatatttgttacctaccataccttattatcctcttaaaatgattaattctttcttgacctatcatacgaattatgcttctcctaattcttgtctttttccccatccaggaagcactataatgatgtattgaaatggtttcattacactttaaatttctcatgtcttttccaggcgcagcaggatcaaagtatagcggcgggaatatcactgcattatcaactctttggatgtcatcactatacttatatccagcataaaaaaacacttttgaatttaaatatgggcatgccatatttattttattttcttctgaatacattagtccgtcatattgttttagcatcgcaagtactaccggattgtgtggttctgccccgaaacctaatccagtgttacatagatgttcgcactgctgaacacctatgtaacactcataattaagcaattgatcgaggctttttaaaagttctacatcagtgtctaaatagattcctccattctcataaattatcttcaatctagcatagtctgaaacaaaagcccacgcttttgcttcataagcactttttacaaaaggggaactattcaaatcaaaatttttttcatcccactgtattattttatagtctggacaatattttctccaagattctttacatttttcaacatcatttggaagatgtttacctccaaaccaacaataatgaattacttttggtatcatgttattttcacctattcttcctatccatcaattagaatttatactttttttatataccgttggatttccaacatataaggcatttgatttaagatttttagtaacaactgaatttgcaccaatgacacaattacatccaattgttattccttttgttacaactacattagtaccacaccagacatattcaccaattcttactggcttcacagaatatttttcacaagattctttaactcccaacgaaatatcatggtcatggtcatatactgacacattagagccaaacatacacccctgacctatggttatctcaccttttgatattaaacggctgaaagtattaaaatatgtatcctttctaataacaatacgtccattatcggccagcacagtgcaataatcatcaaaatacacatcattatgcattattatcttaccacatccaattattatgaacctacaattcttgcctatatatactggcttaccctgaaataagttgaattctatttttttaccatatattagttttattcttagcaatctaacaaggcttaaactccattttacacatttcattaatacagaaatgatattttccccactttgtacattaaatctttgtttctcttctctattcatttagcatgtcctccaaaatttcaaaaggtggaatgtctttcattacaactgcaccagctactataaccgctccatatccaacatttaccccatgaagcacagtaactccagtaccaatccacacattctatcctatagtactaggtttaaattcagcagtaaacatagtatcatcgatatcatggcttctcgtaataaattttgaataacttgaaatattacaattatgtgctacttttattcctgctctagcatctaaatgcacaaaccatccaatagctatattttcatccaaatctaatcaatttgcatacaaaatatcagctcttctacatataaccgttccttttccaatctttgatccaagggctctgtaaaaatattttctaacatgtctgcttggtattttattaacaacaacattaccgaataatacaattgcataataaatgcacttagcaactttattcataaaattcactccattaatctcttataatattttatatatctatcctttaagatttcataactaaattcttcattatatttttttaaggcattaattttaaacatttctgttctttccggaaatttaaagatacttataattgcatctgctagttccttaatatctttaggtcctaccaaaattccattcacatcatcatcaataatctccacagtaccatcaaccgcagtagcaacaatgggttttgcaactgagaaagcttctattggtgtaagcggaagtccctcccaaagagaacttaaaacaattaaatcaagttgactcattacattttgtatgtcatttctatatcccaaaagaaccacataatcttccacatgaagttccgatataagagtttttatcttccctttatcttcaccatctccaataataaagaattttgtttttttatatttttccaaaactaaaggaatagttctaacaaaatattccatacctttttgctcagatatccttccaatattccccaccaatgcataaccgtctcttttatacttttttagtatttctataggctcaatctgatcttcaaacggttcaacagcattatgtataacttcaatattaaattttgaaataccataaaaatcacaaagattatcttttactttgtttcctacagctacaatatttgcttttcccaaagaaaactttgttaacaattttttatcataaaaagtattgtgagagttatttataaatataaaatttctagtaaacccaataattctagtataaaatgctgccatacgatgatgggtgtgcacaatatttatgttttcttcctttattatcatcgatatcttttttaaaacagtcaaaatagttctaatatcttttttatcaatgtcaggaatattgtaatgtttaatattcattttattaagattttcaacatttactcctccacaagagcaaactacaattttatctgcttcagatttcataatttcacataattgtaagacaactttttcagtcccacctaaattcatagttcttgtgaaatacaatatatttttccgctctttcaccacaaaacctctatctttctattatgataagacttgtatttaatcttaaccatctttatctatatttccatataagtttaaatattttcgtatcgtcaacaaaataacgtctaaataaccttttaggctcttgcatgaatctataaaaccattccaacccattattactcatccattgtggagctctactaatatttcccgcaagaaaatcaatagttgcccctgcacagattgaaattttagcatcatatttatctatgttctcataaataaatttttcctgcttaggacatccaaagcaaacaactagaatatctggtttcacatcagaaatcatacgattaattttatttagctcttcttcacttttttcaaatccaaattttggcgcatacgttcctactattttaatttgtggatactgcttttcaagtctaactttagcttggtctgcaataccttcttttccacctataaaaaacattgtataccctttatttgctgccatttcacaaactaatggaactaaatcagaacctgatattttttcttttaccggagtttttaacaagctagatatccaaacaagtggttttccatccataagaaccatatcagcattatctgctatttcctttagatagctatcattttctattttgattattacgtcaacattcaccgctataatgtatgactttttactatcttctttaatgcaattttctatgtaacttaaagtttctttcatggatacgttatttacatacgtatttaaaaatttaattttactattattcatattctcctaatatcctattcaaaaaatttttcttcgagcattagacacaagcaatgatatactggcaaatgtaattcttgaatcatataggtttcatattcaggtaccgttattaatacatctgatatacttttaagttttccaccgtctttacctgtaagtcctataactttcattcctttagctctagccgtaattgctgcataataaacattttctgaattaccagacgtagatatgcctaaaaaaacatctccttttttcccatagccattaacttgttgtgcgaaacataaaataccatcaacatcattgagataagctgttgcaagcgccgcgtgattatttaaggcaatagctggcaatccatcttgtaatttttctgctagctttttgcccattacatcgtcaatatctataagttttttggaaaactcatcagaaatttttcttttcttcttgaagcctttcatcaattcaccaacaatatgatcagcatcagctgcacttccaccattaccagcaattagtaatttccctccatttttatataactcctcaagcgcacaatatgcttcaataatttcagccttaataatttctaatactggatatctctttattaacaattttatatgtccagttaatctatcatccaaagttcccattattaatctccttcatttcacgttttaacttctgaaatatagatctaaatattatctacaaatttatttaatgtttcataattcgtataaatatcactcttacctattaaaacaacattacaacctgcgcttatacctgccttcatatcactttcactgtctccaaccatccatgactttgaaagatcaatattatattttttagcagcacttaaaagcatcccaggctcaggctttctacaatcacaaataattttatattcagttttctcaccatcaaaccctttatctggatggtgaggacagaagaagatatcatctatataagctccgctttcacctagaagtgtctccattttattatgtatttcttcaagctcctgaatactaacctctcctcgtgctattacaggctgattagtaaccacaatagcaaggtatcctttttcattgatcttcttgatagcctcgtccacaccatcaatcaactcaagatcatcaatattctttagaaatcccacatatctatttatagtaccatccctatccaaaaatactgctctttgtttatgtaataagttctttcctttcacttttccagttttaatgtcttcaattacagaataaaatctatctggagtccccatatctttcacatactctggtgaatcataaacaaaaagttctccagatgaaataagaggtttcaatacttccctatccaaatccattttttttaagtctttaaatgttttaagaatatttaccgaaaacatatgaagtccagcattaacacgattcttgtaccaaaatctcttatcctccttgtgaagccaattaattactttctcattgctatcagctacaataattccactatcataaggatggttattagggtgtgtaaataaagttgccgatccacctttatccttatgaaatttataaaatttctttatatcaacatcaaaaataatatctccatttactaacaggaaatcttctgtaagcttttcttttaacaaatataaagctccagctgttccaagtggctctttttcttctacgtatttgatatggacaccaaatgactttcctgtagctgatgatatcttacttccatccccaaagtaatccttaattacacttccaagatgacctacaactaaaattatatctgtaaaaccttgatttctaaaacattccatttgatattcaagaattggtttatttaaaattggaatcataggttttggaacttctgaattaattgatgctattctagttcctttccctccagccataataactattttcataatacatatcctcaaatttcttttatatttattttcaaataaactcactttaaaaactagaatccgctgccacaaattgctgtgagttatctattgttttctcttttagcacatatgattcagatgtatagtgaatgatactagttccattattttcgaattcaaacggaacatacaataaatctttcatagcatctttaactttttgctgcttatcttgttcaacataaaataataaaaatcctcctcctccagctccaagtaattttccaccaattgctcctgcttctatagcttttgcatatagattatcgatagaatcattcgaaatcttgttagtaattccacgctttaatttccatgtataatcaagtagccttccaaattcattcaaatcacttttagatgtcagaatttcctctgcatcatcaaccaagcttaacatttccaataattgtttactcttatctttcattgtgctttcttgaatttttgagatatcagacgagaatcttgagaatccagtaaaaaaaagcatcaaattatcattcaggtgcctctttttatcagctgaaataattataggattcactgtatatccatctgctctaaaatcaattctattaaatcccccaaaagaagctgcaatttgatcttggattcctccactttcttgacatagcactctttctagatatattgcctcatcagcaagcttttttttatctgcatattttccttttagtccatagaatgcgtttagcatccctactgcgaacgaactgctagtccctaatccagaacgagcaggaaggtccgcttcgtaagtaaggcgaatttcatgcatatctaaaaatttcattgcttctcttatggcaggatgttctatattttctatagaatttacacgctctattcttgaataggaaagttcattagaataatcgaaaaatcttggcaaatgtctgacatttacatagcaatatttatcaaatgtagtagaaatcactgctcctccatgttcattatagaatccagaaaaatctgttcctcccccaaagaaagacattctaaaaggcgtttttgttataatcattagtttattctccccctatttccaacatatattttatcaatatctgcgcaagttacatcacatctattttcatattacttcccctatcttgcatgttcatcaccaaaaaacaccccaaatgtttttaatactagctttatgtcaactagagtattcctctctctaacatacttaacatctaatcgcatccaatcttcaaagccaatgtcgcttcttccagacacttgccagtagcaagttagtcctggtttaactattaatctttccatcatccaatcttcaaatttcactacttcttttggaagtgatggcctcggtccaaccaagctcatttcaccttttaagacattaactaattgtggcaattcatctatacttgtttttcttatgaatcttcctattttagttacccttggatcttctttcattttaaacattggtccagccatttcatttttagcacttagcttgtcctttagttcttccgcattgaccaccatagatctaaatttatacattctaaattttttcccatttcttccgaccctctcttgtgaaaagattgagtttccttcagattctaatctgattaaaatagctgtaactaaaaatattgggcttaaaattataagtccaatagatgaacaaaccacatccatagttctctttaaaaaacaatatcctattctgctgtcttccgtttccagttgttctttaaacaaaacttcctcactgttaaattctaactgctgcatactactccccctaaaccttatcatttttagcaaaataaacttccccttgttcattcataaaaaacaaccacctttaacttaaattaaagccggttgcactaataacttaccatatataaagtgcccaaataaatatatggttcaacgcatctctgtctcagattataccacataattaataatttgttaatattgattcgacaatccatcccatgaaatttcttccatagttagacatctaattaacgggcttatctttttaaaaaccaaaatatcgattttttttctttgattttctctcctgaaaactttatctccccattatttaacattttttcagaactatctttaaatacatccttaatttcacttttatttattaaatccaaagccttactaagaccagtatttcttctattaatattatgagcatctgaccctataaagttatatataccattatttaggagtgcattagctgtcctttgaactttttctccaaatcttccatctatacttccagcatttacttggaacaaataaccttcattaataaacttattaatattcttaggatcttctataataggaatatatctttctggatgagcgattactggcactatatttctcacttgaagttcataaagagtatcgaatatactttcatcaaactttctcatcggaaattcaataagcatatatctagaatcatttatagttccaatattcccttgcatataatattctatcatcttttcagtataataaacttcctgaccactatatatctttatatctatgttctcttttactaaaatattattaatttccttcacataattcttaacttcatcaattgtagcttctccatactcaagcaaataatgaggagtagccacaatctctttaacaccatctttttcagcatttctaagcatctccaaagtcatttccatatccttagacccatcatcaatcccaggtattatatgtgaatgaatatcaactatcataactatccctctcctctaaaataaaaaaatcagtaaaagtttccctcttctttccgtaaatatactcacaaaactaattttcatagatacgcaatttaaatcttcgacttattagataaacaaattcgctagaaattatattttttatctatatctgtttcaagtaaatatccatattccaaaccatatctatgcctgaatatattctatactagaaataaaggtcttgcttttgtggaagtgttacattagaggctaaactgtaattatatatccaatttaaacctctacttattagatagacaaatctgctagaactttgaattcatgtctttactagaaattataattatttatctatatccgtccaattagatatccatattccaaactatatctatgcctgaatatactctataccagaaagaagaggtactcctttgtgtagtgtttcattaagaattcagctgtaggtatttcttcagtagaagttgttcaatttgaagtgagagtccaaattttatatttggattctcgaacttcctcagcgaacgtatgtgagtcgagtttccttttttcagaaacttatcgcaggagcatgcagaaattggtacaacttctactgttagaaatccacaatcctattctctagcatatcaaaacaacacagttccgcttctttcggtaaatatactcacaaaactaatttatattacatatagaattctcactagaaagtagaaacatttttatgcagcaggcatttgaaaataagctgttaaaagtgcttgattgtaggttgttcagctactgcttgtcacaatgaaattgggagcaagcagtagtgatgcaacctgcaatttagcactttcagcgaaattttcatagtcctgtgaaataacaatgtttctactttcggtagatcattatgtaaatctatattactttatttaccttcttcactgcttccataatagtagtagtatttacccctagtattttctactgcatgaagtacagtacctaatatattagctccaactttagttaatgaatttttagcatcaattaccgattctctgtttgttctttgtgctcttacaacaagtatagttccatctacctttgtagaaagaatttgagcatctgtaacagcttgaagtggagcactatctaaaattaccatatcgtatttttctcctaatttttgtatcaaattagtcatggcagttgaagataacatttccgatggattaggcggaatcttgccagatgttagtatatcaaggttttcgttacgactttgtattacattatctaaatcttcttttcctataagaacttctgataatccacttaagttcgataatttaaaatttttatgaactgaaggttttcttaagtcacaatcaactattataactctcttctcattttgagcaaaagataatgcaagattacctgatacagtagatttcccttctgctgcttccgcactagtaactacaatacttttaattgtcttatcgaaagatgaatactgaatatttgttcttaatgttctataagcttctgatactattgactttggctttttttcaactacaaagcctctatagtcttgattagctactgctttatgtaatttttttgctgaaaacatcttttatccccctattccaaatcctcaggaattgcaccaataacaggaactcctaatatttgttctaattgttctttgcttttaaaagtactatccaagaattctaataaaaatgataatccaacactgatcataagtccaagtaaaaatgcaatagcaatatttaatttcttattagggctagccggattttcaggcaattctgctggctctactattttaacattaccatttggtataagatctgtagatgtctttataaactgattcgttatagaatctaatacttctttacttaaatttctatccttgcttatgtatgttatttctaaaatctgagtattggctgctggtgtaacagttaaatccttaagtacatcttttgcctttaaatcaaaatctccagcattaatagctttttcaacgagagcattagtctttataacttctgcataagtttttaataattgctgatacatctgaatatcactattattataattttgatccttgctatctgtcttttctttacctataaatacttttgtgcttgcttcatactttggtgcaattacaaaaaaactaacaattccggccgttaatgttgcaagtaaagttattgaaagtatcatcttccatctttttaataatatatttattatttcttcgatcctaatggactcctcaattcttatgttttcttcgttcatctgtcaaactccctataatttctatttttaaatgcatgtaccatttttttcggtttaaatcattttttcaaataatcagtcgtaaaggtttagtctaaaattacacacatcattaatttcattaatcttctcaaaaaaatattccccctaaatagttaattaaatttaataacatcactatttaccattatatcataattttttcttatattatacttagtatttaaattagacataaaaaaacaaaatattttacactaatttttctataagttatattttgtaattaaacttgttatgtttttttataaaattcacattctttaatgcacaatacttacttcaatgcacaatgcacagtgtacaattcttacttcaattcgctattagggacataattcttgggatattttttcgaatcatcatgaggagttatttgtttcgatatatatgtaacaaaaataagcagtaagatctataagtttcttaccacttcattatagttattattttgcgtagtgttgcattgagaaaagagctataggattccttaagtagacgttgttccattgttgcttgtcctgagttttgcctcaggagcatgcaaaaatggatgcaacttttacttttagaaatccatagtccgattctcaaaaaatattattcccacaaaactttattcatacataaaacagaaatgagatacatgtttatgcagcaggcatttgaaaataagctgcaacaagtggagttttaatactatataactttactttatatctacactagaaataaagggcatgcttttacggaatgttgcatctaggattttgatggctatgtttcttgattataagttgttctaaaatgctagttcaaaatttacttttgaggctagcattttgggtacaacttatactcttagaaacatccatctaaatccttagcaactggagtaaatgcatgccccttatttcggtggtttatccaaataaagttctatcgcttaaagcttctgctccattagctttttcaaagagcccaagaagtttattattatctaatttttctttttcttcacctttgacgtcaactaaaatcttgcctctatgcatcatgaaaagtctattaccattttcaagagcatgtttaagattatgggtaaccataagtgttgttattccgctgtcttttactatatttcttgttatatccattattatttctgatgttttagggtctagtgccgctgtatgctcatctagtaataataattttggtttagacattactgacataagtagagttaaagcttgtctctgtcctcctgataaaagctgtactttattataaagcttatcttcaagccccaaattaagttcttttaccatctctttgtaataatctatcctctttttatttatcccaaagctaagcccaaaggatttccctttattatctgcaagagcgatattttctaatattgtcatattaggtgctacacccattgatggattttgaaaaaccctcccaatggactttgatcttgcgtattcaggtttattaataacttcatcaccatctaataatattgatcctgaatctgcttcaagagttccagatatcatatttaacaatgttgatttacctgctccatttgaacctattatacttatgaagtcaccttgcttaacatccaatgataatctatcaaataccctattttcatttattgtattttgattaaacactttggatagttgtttcacttttaacatctttagcactacctcctataacagattttcttttcttaaatttcaagacaccgctattagaacataatgctataactacaattatagctgtcattaattttaagtcattggcatttaatccaagttttaatactattgctattgccgccttgtatatgattgccccaagtattgataaggtagtcactttaataaaagataatctctcaaataatgatgttccgataattactgccgcaagccccattacaacagtaccagttcccattccaacatcactaaatccttgatattgtgcagttagtgccccagcaagtgcaactaatgcattacttatcataagacctaacactttaaccaaatctttatttactccaagagatgaaactacttgttcattatccccaacagctacaagcaaaaatcctgatttagtctttaaatataagtctaatagtattttaactacaataaccattatcaaaatcactactatagccggaattgatgacttaaataaattaggagtattaaataatggaacatttgcttttcccattattcttaagttaatagaatataatcctatcattactaatattccagccattaaatttgttattttaagcttaacatgcaaaaatgctgttattcctccagctaatgctccacctaaggttgctattattatactaatccatggattaaccccatttaccaaaagagctgctgaaattgcagccccaagtgggaatgtagagtccactgataaatcaggaaaatctaaaattttataagttatatatactccgattgaaactaatgaaaatagcagcccttgttctaaaatatttattaaaacacccactactcaacgcctccagttacctttttacaatttgattctatatctgctggaagtgttatatttaatttcttaactacatcagtgtttatagtaaatgacatatcacttaatgtgcttatttcaacatctgatggcttctttccatctaaaacttctgctgctttatatccagcttcttttcctagcttgtaataatctattcctatagaagcaagtccacctttagttactactgcttcttctgcacctattataggaacgtttttatctaaacaaagtttacctactaacgcatatcctgaagcaactgtgttatctgtaggtgtatataatacatctatttgacctaaagcacttgctaaattttgatttatctcattaacatttgtaacaccaatttcttttactgctaagccttgtttatctgccgctgctttaagctcatcaacttgagttacagaatttgtttctgaagtgttataaattactcctactgttttagcatttggaagtaatttttttaataattctatttgcttgtccacaggaactttatctgatgtacctgtaacatttgttcccgagctcttccaatcctttgctacttctgctttaacaggatctgttactgctgtgaatattattggaatatccttagttgaattataagctgcttgaactgctggtgttgcaattgcaaaaatcaagtctttctttgcatctgtaaattgcttagcaattgtttgagcattagcttgttcaccctgagcattttgttgttcaattttaatattcttaccttcttcatatcccttttcttttaatccatcaacaaatcccttattagacgcatctaaagcatcatgttgaactaactgaatcactccaatattcttcactgccgatgatgcagcacctccattattagaatccgttgcactctttccacatcctgcaagaattcctccaactaaaactgtacatagcagcatggctgctttcttttttcctaccatatttctatcctcctactatattcttattatcaatttcctactatacttcaaaatgccaactaccttctcaataaatacaatcataattatatatctatatttatgataaatattcaaataaattgataataatttataaatcttttaagttatgatatcatattttgaaatacttgtaaagttgctacccttactttgcaagcttttttagttttttagtataaaaattatacatcaattcacaatgcacagttcacaatgcacaatgctcaattcgtaatccacaattcgcgatgcataatttacagttcacattttataattcacaatgcacaattcataattcacagctcacaatttacaatgaagatttcaatatatatatttagaaaagccgacggcttttcctccttaattgtgcattgtgaactgataattgtgaattgttattttcttcatatatataagagaacacaaaaaaggggttgtcgcattaacggattaaaattcgttagcaacaaacccttttctttcatgtatgtatatcagcagtatacttgtattattcttttttgtttttcaccaaaattcacaaattcctcatctagctttcctgtttcgtttttagtttttctaaaatcaaatattaaaagatagccttcttctaatccatactgttctaaatattcacttaactgtattaagccttttttgtggtaagcttctccattccatttcttaagttctaatatatacattttcttattataagttatgactatatcaaaacgtttttcatctccaccctgtacttccttaaatgcaaaccctgtgccatttattattggacttataaaagctaaaaatagtaatcttccatctgcttctaaaaaagcttctcttttcgctgagtattcgtgtttcattaactctgagaattttattaaaatcttttttacatccagatttccatcctcttttataaaattcgacttataattatattgagacataactgatttcttatcctgccttattactttcatcatcatatgattataaatcaattgctcataaagcttattatttattttacaaactccatctttttcttttaaaataccgtatatacttcctaaacttactatattatctgtttttatataatttatattttcgttatctaatactattcttttaacaaaatcatatagctcctcattgttttctatatttttaataagactctcaaaattagtattactatcttttaatatttcttttacagctaaatccatatattccttttcccaaacaaattcattatcactcattatcttttcatctattatcttacataatttgcttactaaaaacggatatccttctgtataaaaataaagcttttctgaaaagtattctttatctaatataacttttttatcttctacataatcctcaagcatagtcattatttcttcttttgaaaaactcatatcaacatcaaaatctgaggctatattccaagggctgttatatttatgttcttcatcacttcttattttaactttaagagttttaacatcatagacaccagccaaaattatactgtgaaaagtataatcccgcccttcacttctaagaagatatttgtttctaagcattcctaaaaaactcaaaaacaattgattattactgcttttatcaacttcatctatcattaatactacctttttgtttatctctctaacaaatttagttataaaataggataaatcatctaaggtttctacgctttctttattagaagaaataaattttgataattcaacattttcaaactcgattgtacgttctaatattttcataaaacctttactaaacctattttcatcctcaaaaatcaaatcgcctataccttcaaagcttatctttataggaaaataatcttctgattcctttaacttattatctagtaaaaataaagttgtagttttcccatattgtcttggtctatttatcacgaaatactcttcaccatcaataagcttcattattttatctatttttttcgaaatatctacaatgtaatgtttattaggaatgcaagttccagtgacattaaatttttttaacataattttatcaccatcccataaataatatttaattctgttaattgtttcctgctataaaggtaatgccctatgccctattcctataactacttcatctaagtgcagaagtccaatacttaagaatatacacactgaaatatgttctccgcctctagctattccaatttttccacctacattttgcccatttgctctatttgcaacttgaattaccgcatctctagttgcacctataacagcaccttcatgcaaatgttcttctcttattaactcgtttctttttgcagcaactaatgcactttcaagtattttagctatcgatgaattaatatttccacctatatttactgcggtgactttaattcccttctctgcatatactttctttaaatgctcttcttcatgtctatcacatatagccattttagtagctatctttgcaactcttgtactattgctttccatttttacactctccaatcaatctaaacctataacattgatctgattaacttaaacatatacctgaaaaatatcctttccattaatattagatctttcttctttaaactctttgtttttattaaaattaaagattaagagataccctttatttaaatcatgtatattcaaataatcacaaagctgctcgattcccttttcgtggtattttaaacctctccatattttcatctcaattatatacttaaacttattgtaggttataactacatctaatcttttctcttctgaaacttgaacttccttaaaatcaaatcctgttccatttattataggctttataaatgctaaaaataacaatcttccatgatgttctataaactcactatctttagaagaatactgctccttcataaaatgctgaaatctcttaagtattttttctatatttaagccaccatctttttttataaatgcttccttaaagttatactcttctatattgttataattattttcaagctttgaaatcatataattatatattatttctccaaatattttattagatatagatacttttccgtttttatttttaaaataaccatatgtgcttccaatttctataattggattatagctattaaaccccttatcgtttccatttactattatgtcttcaatgtaatcataaagttctttattgttttctaagttctttattaaactatcaaataaagtatttttttcttctaaaataattttaactgccttttgtatatcttcaccctcccaaggccctttatccaattcataaattttttcatctacaatttggcatagcctgctaactaaaaacgggtatccatctgtaaaaaagtgaatctcttcactaagtttatctatatccatagataaagaattttctattgcatattcatttagcatagtagctatttctttgggcgaaaaactcatatccacattgaaatcaacagcaatattccatggggaattatatttagcttcctctttatttctaatttttaattttagactcttcacatcatatacccctgccaaaatgacacttttaaaagtgaagtcctttccaacttccctcccaaggtacttatttctaagcattccaagaaaacttaaaaacaactgattatttgagcttttatctacttcatctataattaaaacaacttcctttttagctttttcaacgaactttgttattatttctgataattcttcaatgtcattaatctctctacttaaattttctaacctattgctttcttctttatctacaaatgctagatctttaattattagcttcaaaaatttgttgcaaaaacttttttcctcttcgaatacgatatctccaattccttcaaagcttatatttataactaaatatacatcctttaatctattatttatctcattcaaagtcgtcgtttttccatattgtctaggcctatttatagtaaaataaaattcattatctataagtttctttatttgttcaattttcttacttatgtcaaccatatagtattttcttgaaacacaaaccccagtactattaaaccttttcttcatactctatacacaccaccgatctttaactgatttattatattatatcctataagttattttaataaaacaaaaaatagggctaaagagtatttctctaccctttagcccctatattaaatcttgccatatataaatcaattataagctatagatatccaactttaaaactagacttatgtgataccttaccgaaatcataaatattttgattccgaaaagctatgaaaatatcgctgaaggttctaagcagcaggttgtatccactttagcatgctccaactttcagtttgacaagctaaaatggaacaacctacagctaagaccctttaacagctcattttcaaatgttttctccacaaatatatttatgatttctagtgaagatatgagcttaaagttttagtaactttgtaaatatgttcatctaataagtctaattcttaaattgtttatctatatagataacacaatcataaactatacttacaccatgaaatatcttcaaaccagaaactggaataaaagtatgttattcatttcggcgagttatatgaataagttcaggtcttagtggatatctatagattcatactataaaattaataaaaattccccatagctctgaatttattatatctattatctattagttcgtttaaatctttttcttttaactctaacaagttatctacaattgttttcttaagagcctctgctgctttaacagggtttttatgtgcaccacccctaggttcttttacgataccatcaattatatcaaaaccctttaaatctttagcagtaattttcgcaactgctgctgcttctttaactctgtttggatctttccatagaatcgaagcaaatccttctggtgaaagaactgaatatatagaatgttctaacataaagattttatctgcaactgctaaagctaaagctcctccactttcgccttcacctgttataattgaaattattggtgtctttaatctacttaattcaaaaagattatttgctatagcctgcccttgacctctttcttctgctcccatacctggaaatgctcccatagtatctataaaacaaattacaggtcttttaaatttttcagcctgcttcataagtcttaatgcttttctatatccttccggattaggcattccaaaatttctttttatatactcactagtatttgatcctttagttattgctataactgtaacatttatatcattaatagatgcgattccaccaattatagcttgatcatcaccaaagtttctgtctccatgaaattcaatgaaatctttaaatatagtttctatataatattgcccagatggtctgtctttgtgccttgctatttcaacactttcccatggtgttacattaattttcataaaatctttatccataattaattcctcactccatgcaaaataagaattttatatatacatgccctcatattctttctttcaacaatggcatcaacaaaacctttttcaagtaaaaattctgctttttgaaaattatctggaagagtttctttaattgtgttctcaataactcttcttcctgcaaatcctattaatgcattcggctcacttaaaatgatgtcaccttccattgcaaaacttgcagttactcctccagttgttggatctgttaatatagaaatatataaaagaccagcttcactatgctttgctagagctgcacttatttttgccatttgcataagtgaaaaaataccttcctgcattctagcaccgccagatgctgtaaaaatcattaatggaagcttattttctgtggcatgttctataagtcttgtaatcttttcaccaactacagtccccatacttcccatcataaagaagctatccataatagcacatgctacttctataccatttagctttccaactccagtaacaacagcttctgtactatcagtcttagtgctttttaacttttcttcatagcctttaaaatctaatggattagtagtttttaagtctttccagaattccttaaaagtatctttatcaaaaaatacttttattctttcttttgcattaagtctaaaatgatgaccacaagttgcacaaacgaacttagaattttctaagtcttctgcatatatcatcgaattacacttatcacatttttcccacatacctgatggtatattaggcttttcttcagaaacactcttttttaacgttgaggatttaacagttgcatattgtctttttacaaataaatccttaagcattcttcttcaccatcttttctgctaaaaatgaagtatcataatctccttctaagaattctttagtatgaagtattgataattcaaaatcaatattagtttttaccccacctactgcaaattctgctaatgctctatccatttttacaatagcttcatttctattatcaccaaaagtaattaatttagctatcatagaatcatagcaatgaggaattttatacccacagaatatagctgaatcaactcttactcccataccccctgggacacaaagctcttcgattgttcctggacatggtctgaaatcatgttctggatcttctgcattaactctacattctattgcatgacctttaatctttatatcatcttgagtataagctaatttttctcctgaagctatcttcaattgttcttttactaagtctatacctgtaatcatttcagtaattggatgctctacttgtattctagtattcatttccatgaagtagaaattattatctctatcaaacaagaattctatagttcctgcattcttataatctacagctagagctgctttctttgcaatttcacccattttagctcttaattcttctgttaatacatttgatggtgcttcttctaaaaccttttggttctttctttgcatcgagcattctctttcacataaatgtataacatggccatgttcatcggctaatatttgaaattcaatatgctttggcttttgaacaaatttttctatatataatgaatcatccccaaaacaagcttttgcttctgttttagcagttttaaagcccattaagaattcttcatcattattagcaactcttattcctttaccgccgccacctgctgatgcttttatcattattgggtatccaataccttttgcaatttctaaagcatgggcttcatctcttatttcaccttcatatccaggtactacaggaacaccagaagctttcataatttctcttgctttagccttatttcccataagctcaattgtctcataatcaggacctataaatttaatattgcattgtctacacatctttgcgaatttaggattttctgataaaaatccaaaccctggatgtatagcgtcagctccagttaaaacacatgcacttagaatgtttgttatgtttaaataactatctttaggcattgcagaaccaatacatacagcttcatctgcaagttgagtatgaagtgcttctttatctatttctgaataaacagctactgtacttattcccatttctctacaagctctaattattctaactgcaatttctcctctgttggcaattagcactttctttaacatttttatcacctatcctactgcaacgcaaaaagtatttcagcttcacaaactgtttttccatctactgaggcaatcccttttccaatacctataggtcctttaatcttaataatttcacaatataaatcaagcttatctccaggtacaacttttcctttaaatctaactttatttatacctgcaaataatggagtcttacctttaaatctttccattgaaagaatagcaactgttcctgtttgagctaaagcttcaacttgaagtactcctggcataattggttcttctggataatgcccttgaaagaatgcttcatttgcagaaacatttttatatcctcttacaaattgtttttcttctatttccatttcagttactctatctactaaaagcattgggtatctatgtggtataatcttttttatttcatttatgttaagcattaattattcccccttaaccttaaataatggctggccatattctaccatatctccgtcattagctaagcgttctactattactccattatattcgctttcgatttcattcataagcttcatagcttctataatgcaaataacctttcccttagaaactgtgccgccaacttctacgaaaggtgagctttctggtgatgctgaagagtaaaatgttccaaccataggagaagttataatacttacatccttatcgtctataactacttctttttcagcagcctttacttcttctttctccactatatgattttctgatctttctactgaactaagtgaactagcagcagtgttaacctgattatttacagctggagtataatttcctgagccattatcagctaatcctctagttaatgatttatccatctttatatgatcatttccactttgaagctcaaaaaaggctaaacttgaagagtcaaccaatttaacaagctctttaattttttcaaagtccataaaaatatcctcctcttatatatgttgcaattcacaattcataattatcaattcacaatgcacaatgcacaattcacagcttaatgcacaatgctcaattatcaattcacatttcaattcgcaatgctcaattcataattcaatgcacaattcacaattatcatttcacaatgcacaattatcaattatcaattcacatttacgtatgaaattcttgtaatatttttagaattattcttaggaattattttttgcaatgtatatatatatcttattcaaaaatattatttatatattttatgccgtactaagtcacattcaaaaagttaatatttcttattaactgcatttaacttttctggcataaaatatatgtaacactttttattttaccaaatatatcttcattatttccactttttcaaaagtaaagtggcattatgtccaccaaagcctaaagagttagtaagtgcatattctaaatcttgctttcttccaacgttaggcacataatctaaatctaattcttcatcttttgtttcatatccgattgttggcgggataaatccttcttcaagagcctttgcacatattattgcttctattgctcctgctgctcctaaaagatgacctgtcatagattttgttgaagatattggaactttgtatgcatcttctccaaacgcctttttaatagctgctgtttcaaatttatcatttaattctgttgaagttccatgagcatttatataagaaacttgttctggtttaattcctgcctcttgcaacgcatcagccatagctcttgaagctcctgctccttctggatctggagatgtaatatgatatgcatcacaagttgatccatatcctacaacttcagctatgatgtttgcacctctagcttcagcatgttctaaagattcaagaattacaactcctgcaccttctcccattacaaatccgcctctttccttatcgaaagggatagaagctctttctggatcatttcctgaatttaatgccttcatactatgaaatccagtaactccaagtctagttataggtgcttctgctccacctgcaagcattacatctgcataaccatgttttattgttctaaatgcatcaccaatattgtttgttcctgttgcacaagcagttactgctgatgtacatggtcctcttaatccatatttaatagctacatttcctgcacctaaatttattattgtcataggaacgaaaaatggagatactcttttagactttccagttgcaattttagtacattcagtttcaatagtttcaaatccacctataccagatccaagcattactccaaatctttctagattttctttttctaaatctattcctgaattctttattgcttcatctgatgcaaccaaagcaaattgagcaaatctatctaatctctttgcttctttcttacctattaaagtatctggatcaaagcccttaacttctgctgctatttttacatctactaaatctttatcaactaaagttatataatctattcctagctttccgctttttgcattatcccaaaacgtacttacatcatttcctatcggagtcagagctcccatccccgtaattactactcttctttccataaatcaaacttcctccattacattaacattccaccgtcaacctggataacttgccctgtaacataatctgcactttcacttgcaaggaaagctacaacatttgctacatcacttgcttttcctaatctcttaagcggtatagtcttcttcatctcttctttgtatttatctgctagagcttctgtcatatctgtttcgatatatcctggtgctactgcatttacagtgattcctcttgaaccaacttctctagctaatgattttgtcattccaattactcctgctttagacgcagaataatttacttgacctgcatttccagtaattccaactactgatgaaagatttattatctttccatgtttttgtttcatcataattggagttatagcttttaagcagttaaacacaccttttagattaacatcaataacattatcaaaatcttcttctttcattctgattattaatgcatcttttgtgattcctgcattatttaccattatatctatagtgccaaatttttctttagcagaattgataagattatcaacttcttctgacttagatatatcaccttttacacataaagtttctacacccatgccttttatttcattttcaacttctaatgcttctttttcattacttctataatttaaaactatattagctccaagagatgcaagctttaaagctattgcctttccaattcctcttgatgctcctgtaacaattgcacattttccttttagcatatattaaattacctcctattgttataaacaattaacctataactgagctgcaaataatcatttataatccatctactcattctaaataactattactatattttacaataataagcctacatttaaaatcctagcagaccatgtgtcagttaagataaaaatgcagatacttacttttaataaatatatatttatatattaaagattgcttttaatcttatcaattgtatttttcaatgaatccatatcctcaacatttaaaagacttgcactcttatctattttcttaacaaatcctctaagtgcttttccaggacctacttctataaatgtatcaacgccgctatctatcatatgatttatagtcttttcaaaaaggactgatgttcttatatgtctctttaataattctttaacatcatcttctttttcataaggaagccctttaacatttgaataaactactttgtcaagttctttaatatcaacattttttatagtattaaagaattcttcacttgcaggctcaagaagggaactatgaaatggtccactaacctttagcggaattccaaggcctcctaattcttttgcaatttttacggcttcatcgattgctttgttttctcctgaaataactacttggcctgggcagttatagttagccccttcaactattccaaattcacctgctctagttaataattcttgtatcttttcatcatttaattttaacacagcagccatttttccaaggccttctggtagcgcactacccattattcttcctctttcttttataagaagtaatccttcttctaaagaaagtgctcccccgtatattaacgctgcatattctcctaagctaagacctgctgcataatctgcttcaatgccatttatctctagtgcttttaacgcgataagtgatgcaacaagtattgtaggttgtgcattttctgttgctgttaaaatttcttctggcccttcgaacatcattttcttaataggcatatttaaaatttcttcactacgatctaatatttctttacattctggtatattatcgcaaagttcttttgccattccaatagtttgaactccttgacctggaaaaagaaatgcagtcttactactattcatgattccctccaaaacgcttaaatatttcatttgattctgtaaataattcttcaatcatttccttacatgattgttccttgcaaataagtcctgctatttgacctgacataagtgatccattatccacatcaccatctacaacagcctttttaagcgcaccaattccaagcttttctaattcttcagcagatgctccttctttttctaacttaagataagttcttgcaagcttatttcttagaactctaactgggtgacctgttggtcttcctgttacttctgtatctatatcattggcttttagtactttatctttataattttgatgtattgtacattcttttgccactaagaatcttgttccaacttgaattccttcagcgcctagcataaatgatgcagctactcctctaccatcacctattcctccagctgctataactggtacgcttacagcatcaacaacttgtggtactaatgtcatagtagttaactgacctacatgcccacctgattcagtaccttctgcaataattgcatcagctcctgacttttccattcttttagctagtgctacagaagctactactggtataacctttattccatgagccttccatttttccatatactttcctggacttcctgcaccagttgtaacaacagatacgccttcttcacatactaattctgctatttcctcagcattttctgccattaacattatatttacaccgaatggcttattggttaattcctttgttttctttatctgttctcttacccattcagttggtgctgccccagttattattccaagtccaccagcttcacttactgctgaagctaaagatgcatctgcaattcttgccatagcaccttgaaatataggatattctatttttaacaggtcacatactctatttttttccacaacatattcctcctaccattaccaatcacaaaatatcgcttaatgtactatctcttactataataatggaacttcctgtattttaatcttatctatgtataatagccattttgcctattatgataagtaattttactattatagcatatttttatcaatgagattactaaaaagttaaaaataagttcatattctccaacgtttatacattggtttttttataaatattaaattgcatcttgtattattttaatctcaaatgatatgatatttgtttccataaccattccattcttatatataaatctattttaaagttaaataataaaagcttatttaactattatttttaattaccactcaagtaatgttgctgcataagttaacccaccaccaaatgcgacaagaataattttatcacctttatttagtaagcctttttcatacatttcatttaaagctataggtactgttgcagctgatgtatttcctaccttttctaagttcaaataaaacttatcttcgcttaatttcaacttttctgctgctaattttataattctataatttgcttggtgaggtactatatatttaatgtcatcaaatgaaacattagtatctttcataacttcagtaacggcttcatctattgcagatactgcaaatctaagtatttctctaccattcatatcgatagttcttttagctaattttttttcttttgaaaaaggagtatcaaaatcagtagcgcctatagtaagtgcttcccccttttttccatccgctcttaaatatgatttaattattcctggtgcctcatccctcttaagtacagccgcaccagcaccatctccaaataaaatacaagtgcttctgtctgtccagtctgttacttttgaaagaacttcagctccaactactaatgcatttttataattcatagacatcattaaagctttagctgtctccaagccgtatacaaatcctgaacatgcaacacttatatcaaaacaagctgccttacttgcatctaaattactttgaactagacatgcaaccgatggtataaacatatctggactaattgtagcaacaataataagctctaaatcttttgcatcaataccagctctttcaagtgcaagcttagctgcttttgttgagatatcagatgtattttctccttctgagattcttctttctctcatacctgttctttgcactatccactcatcacttgtttcaacgaattcacttattctatcattagtaactactagagatggaagatatgctccaattccagcaattttaatattactcatatttttctccttcattatactaattcatatttttctttaaaaaagttatttattttacttaaagaagaaattaaaatttcttcttcttctaacgttaatccttctattgcattatttatcatttctccatgaaatctctgatggattctgaatgctaactttccttttcgagttaatttaataagaacaactcttctgtctgtttctatcctgtttctttctacatatccttttttaattaatttattgatagcagttgttaaagtacttactgtaatttttaatttctgcgctacctctgacattgttctttcactgtacataccaatagattctatagtatgaatttctgttattgaaagatctgaaagtacaccattctttaaactttgctcctcaatttgtaagacatcattaaataactgcaccaaaagctcattaatcagttttgttgatttatccatttatctgcactctccattttgacatccaaaaatatcttctaacaaaaattatattcagtgtttataaaatgaaaaatttggtaatgaaaatcttaaatatcataccaaatacgcaatctattgaccaattagacatatgaaataaaataacaagcaaacgacataaagatattttgtcctaagattggctgaggaaaattcattttgaattcagaatgaactacatgaaaagtttcactttactttagacaaaatatataaacaaacatatttactttatattttctgagtatgcctcgcctttaatcaaaaagttttaaaatcaaatagtttgataatcaaaatatactatactcaaaatacattgtcaaatttttttcaattttttccagtctcttgtatgcttttaattagcaatttcatatgatataattaattaaattagttaatattatctataatattaatttttaaacataggaggtgtacatatcatgactagaaagttaattatagctacagttttaatgttaagtaccgtaatggtttcttgtagcacaaagcctagtgattcccctaagcctagtgataataacactactactgtagagcaaaataaagacgacaatggctcttctaatgctgatagtaaaaaagctaatgaaactacaagcgatacaaaaaaagtaaataagttaaaactttctatatatagtatagatgataactctttggaaccaaatcaatcaggtactattgaggtaaatgaaaattcaactctacaggacaagctaaaagaattagcaaaagctgtatcagagaaaaaatttgacaatttaccaattgaagttaaatctatagatactgttaacggcaaaaaagttgctactataaacttaactgactcaaataataaaaaatgggttccaaagtttcaaggatcaactggtggttcagttacagctaatactttgattgagaatttccttcaatctaataacaaatctaaaggcgaatggattgatggcgtgaaattcctatataataatgaaacaatagaatatgaacatgcatcagacttatctactgttaagtatgcaaattaattacattaagttataacaaaaagaagccaagctttaatataaaatggaacctatgaaatagacactaaaaaaagactatttcaataggttctttttttgtacaataaaagataagaagaaatatagtaaggttgtgaaaagaatgagtaaaaaattattttcagat

SEQ ID NO: 53 - DNA, 40498 bp, Clostridium beijerinckii
ccataaacatccctccaattatactgaaattaattgtaacaaaaaaagaccctgtaaaatagagtcagtaagaaatttagctttataagccttttttctaactgtccattctataggatccattttattcaaagcagccttttatgttaagtggaattattcataatgtatctttagctatattattgttacagaattgaaaggtaaatgtaaggtttatcaatataagaacaattaaacttaggttattatataagtgatatgacagtaatggatttgtattagcttttgtttaaggaaaaattaatgttttgttaagggttatattaaagtattaatgatatactgatgaatattaggttaataaagttacataaattcgatatagtggacgtttataacaacagtgtaagttttagtgggacttaaagagtaacatatataataatgttagttaattactattacatggataaaaaggctgttaagaatagggggaagttttaaaaatgccgaaattagatatgaaaaagttaaaacctaagggcataagtcttaaggggatgaaactaaaaaagaagccaagcaaaaaaataatattaatatgtacaatatttataatagttggagctattataataggaaagtttattatgcctaagtcagctccgcaagtaaagtgtacagttctttctaaggggaagattgtaaatagtgttaatgttttgggagaaataaaaagtaaagaatcgactaatatatacagtaccttaaacaatccagtccaagaggtgaaagtaaaagagggagataaggttaaagtaggagatgttctagcggtactagattcaaatgggttagaaaaagatattgaacaggctacagctacagcagatgcaactgaagctaatgctaaaacacagcttgattcagctcaaaaggaatataatgatgaattgaatttatataataacaactcaaatgcagatattaaaaatgcagaagaaacactaagtttagcacaaattactcttgatgataaagagaaaatatatgagaagaataaagccttatttaacgctcaagcaatttctgagagcgacttaaataagattaagatagattatgacactgctaaatcagattatgagaaagcaaaaacagctcttgaaaatgctaaggttaaagttgaccaagctattaataaagctaaaagtgactatgaaacagcacaaacaaactataataataaaagccagagaattgcgattgagaagcaaaaacagcagctagatgattgcactattaaggcgacaagtgatgggataattacaaatgtaaatgctgttgttggaaatccaggaaatggagttttatttcagatcgaaaatttagataatatagagataactgtaccaattaaggaagtcgatatagccaatgttaaagttggacagagatcagagataaaaacagatgcaacaggagatgaaacttttgcaggagaagtagaaagtgttagtccagcggctaaaaaaggagggggatctgcacctcaagtacaatctgaaaattcacaaagtcagtctcaaggagcaagctcagatgcagattttgaggcaaaaattaaagtagataatacaaatgagaatatgaaggtaggaatgagcgcaagaataaatattattacaaatgaaaaatctgatatttatacagttgcatctaatagcatagttgaaagtggagatacgaaaagtatatatgttgcagaaaaaagtagtgaaaaaccaaatgaatatataattaaagagttaccagtagatacaggacttgaatctgatttcagtgtagaaatatcaggtgaaggaatatcagatggaattatcataattgatgacccttcaactcataaagttggagaaaaaattcgaataagtggaaggtgagttttttgaatgataatataatagaaatgagaaacatcgtaaaaagcttttatattggaactcccaatcaattagatattctcaaaaatatagatataacaataaaagagggcgaatttgtatcaatagttggcgcgtcaggatcgggaaaaagtactttaatgaatattataggggcacttgataggccaacgtctggaacatatattttaagtggaacaaatgttggtgaaaaaacagataatggattatcagaagttagaaataagaagataggatttgtgtttcaaacttataacttaataccgaggagttcagctttgaaaaatgttgagttaccaatgctttattatggaatgggaaagcaggagagaaaagaacgggcagaaaagcttctagaacttgttggaatgaaagatagaatgaagcatcttccaaatgaattatcgggtggacagaaacagagagtggcaattgcacgtgcacttgcaaatgatccaagcataatacttgctgatgaaccaacaggagcacttgattcatcaactggtaggctagttatggatttatttcataaggtacatgaaatggagaagaagacaattgtctttataactcataattatgaacttgcaggagaaacagagagaatcataacattgaaggatgggaaaatagtatcagaagaacataacgacaaatatactagaaggtttcaaaatggtgaaaagttatgtttataaaagagaatatagcacttgcgatagcaggtataaaatcaagcaaaatgcgttcattattaactatgctaggaattataataggaatatcatctgttatagggattgtttctattggaagtgcaattacatccagagtatcatctcaaatggataaaatgggtgcaaataatatagatattggtatagcaataaaaaaagaagatggtactgctagtggaaatgggactagtaaacagccagaagatagtgatcttataacaatggaacagataaattcatttaatgaagtatttaaagataaaattaatagtgtaagtgtacaggaacaattaggacaaggaaaagtaaaggatggatattcttatgcaaatgtaagcaccacaggagtaaatgaaggatacaaacaggttaaaaacttgaaactaattagtggaagatttatcactgatagggatgttaaagcaaattccaaagtcgctatagtttctgataagcttgtcaataatatctttaagggaaaaactgatccgttaggtaaagaaatcaaagtttatgcaaatgatgatattcagacatatgttataggtggtgtatatcaatatgaaaattcatcattatttggaatgggtgaaggttctacatcagaaaaggacagaagaacttctttatatatccctataacaactgaaaaagcactacaaaaaaataaaaactttgagtattttactgtagtccctaaaatggggatagacaaaggaaaattagttagcgatatgcaaaagtatgggaataagatgtacaagaataataagaattggacattaatggttcagaataatgaagctgatgctgcagaaataacatcagttcttagtatgatatctatggggatatctgtaattgcggctatagcattacttgtaggaggaataggagtaatgaatataatgctcgtatctgttacagagaggacaagggagataggaacaagaaaggctcttggtgctaaaagtagtcacataaagatgcaatttataattgaatcagttataatatgtacgattggtggaacgattggtataatacttggaattggaatgggaataattgcgtgcatagtattgaaatcaccaatatcaatatctattccaacaattttaataagctttactttttcaatggcaattggtgtattctttggatactatccagctaaaaaagcggctagccttgatccgattgaagccttaagatatgagtaagcagcatgaaaaggtaggaaataaaaaataaggaatatatattctaagaagtttaattcatcgaagctcaccttaaacttagtggatagtaaaaattagatatcctatgatgaatgaattgtattatttaaaacgtatatgtaaagtataatttatgttatagaggttaaattaagaaagatagatattttaattttactaataattaaaatatctatctattttcttattctgaagaaattttaagataggaatgaaaaattcataacttaattacatagaaagtcgatatttttactaataattattgacaagtccctataactatgtataattagtattaacaaaaaaatatctggataagttaatcttattaagagcggtggagggactggccctttgaagcccggcaacctgaaagattttatatataaattttttcgttggtgctaaatcctgcaagagaatatcttgaaaaatgagaggaattaagtttttgtagaacttataatatgactataaagtcacttcttgttttggaagtggctttttttattaatattatttctgatattagcaataagtaatgcattaagcaaagcaaattaaaggaggcaaaataatgactttaaaaaaatcttttgaaacaatcgcagtcagtggagtatcaggtggagataaagaaactggtgctataagctttccgatatatcaggctgctacgtttaaacatcatggtcttaataatagcaccggatatgattatgcaagggctcaaaatccaaccagggaagaagctgaaaaaacattagctgttttagaaggtggaaaatcagcgatagggttttcttcaggagttgcagcaattacagcctgtatacatttatttagggctggagatcatataatattatctgatgatttatatggtgggacatatagattgtttgatgatatttttagggattttggattagaagctaccttcgttgatactacagttactaaaaatatattaaattctataaaggaaaatacaaaggcaatacttatagaaactccatctaaccctatgatgaaggtaacagatataaaagcagttgcagaaataacaaaaacaaataaattactgttaattgtggataatactttcttaactccgtactatcaaagaccactagaactaggagcagatttagtagttcacagtggaacaaagtttttaggtgggcatcatgatttacttgcaggattcatagtagcaaatgatgaagaaatattagaaaaactcagaagaattcacatgtcaacaggagcaactttatctccatttgattcatggttaattttaagagggataaagactttacatataaggttgcaaaggtcacaagagaatactcttaagatagctaagtttttagaaggtaatcctaaagtggagaaggtatattacgtagggttagaaggttttgaaggctatgaattgaataagaaacaatcaactggttttggagcaacattatcatttagagtaaaagaaaaagaattagttgctaaaattttggaaagagttaaagtaataagatttgcagagagtttagggggagtggagacgttaataacatatccatttactcaaacacattcagagataccagaagaaattaagcaaagacttggagtagatgaatatctacttaggctatcagtaggaatagaaaatgtagaagatttgttaaatgatctagaaaatgctataggaaaatagaatttataataaaaaatagaatggggcgttaaatatgaattttggaactaaattaatacatgcaagtggagatatagatccggcaacaggatcagtaagcactccaatatatcagacatcaacatttcaccaatttgatatagagaacttcggaaaatatgattatgcaagatcaggtaatccaactagagatgtagtagagaaattaattgcagaacttgaaggtggtgagtgcggatttgcatttgcatcaggaatggcagctatttgctcagtattatcgatattctctgcaggagatcatattataatatgtggagatgtatatgggggaacatatagagccactacaaaattattctcaagattcaatatagaattcacttttgtagatgcatcaaatattgaagagatagaaaaagcatttaaagaaaatactaaagggctttatttagagacaccttcaaatccgctgctaaaagttatagatttaagaatagctagcaaattagctaaagaaaatggggcaataactatagtggataatacatttatgtcaccatatctgcaaagacctattgagctaggagtggatattgttgttcacagtgcaactaagtttcttgggggacatagtgatgttatagcaggtcttgttgtaactaaaacaaaggaattaggagatagagtttatcaaatacaaaatacttttggggcagtacttggaccacaagactcgtggcttttggttagaggtattaaaacactaaaagttagattagatgcgcttcaaaaaagtgctcaaaagctagcagaatggcttgaatctagagaagaggttgaaaaagtatattatcttggattaccttctatggaaggaagagaagtacatttagaacaagcggatggagcaggtgctgtattatcatttaaattcaaaacatttgaaagaacaaaagtatttttaaataatgtaaagaatgtagcggtagctgttagcttgggtagtgttgaaactatagtttcatatccagctaagatgagtcatgcttcaattccaaaagaagaaagagaagagcttggaataacagacacattgataagagtatccgtaggattagaagatatagatgatttaatagagtcatttagagaagcaatggaaaaataaaaattacagagataagttatatataaaagttgatgaaaaagggtgatttatatgatcatccttttttcatgcttctgattagaggaataattcgattaaatttggtgaaatgaaagaaatagaattaatcgagatattataatttaaaaaatatcctttatgtaagcaagtgattaggtaagtgttattttaatttttttaatatatttataaggtttattatggaatcatctaacgtaattacttcatcatcagaaagagaagaaattttttcagcgaaagagctacagatggcattacgaagagaattcagtaaatcataagcttttggtgttagttcaactctaagaatccttttatcattaggatctggatatctattaactaattcataattaataaggttgtctataattggagtcatattagattttgatatacctatattatctgctatttgagaaataggagatgaattactgtgaaaaagatagaatataactctggcgtgtgaaggaggaatagaaaaatcggagcagcattgtttattattttcatgtaatgattgaaaaattttagatatatcttgtactttgaatatattactttgaataatccataaaaagttaattaaggaatctgcaactttaaataaattttctttttccatattaaaacaaatccttcctgaggtggtatattagtaaattataaactattgataaattgaagacaatagataaggattattgtaatatttaatatacttaataggttaaaaacacttactaagtatatttttttgttttgtaaagataataaaagtatgctttcttttcgatcattttaggatataaccatgtattttcaacagtttaacattaactttaaatttgtcattgaaaacgtaactcaaatttgaagttgtttaaattgaaaaggtattcttcatagtttaagatagtaaatgaaagaactaataataaattatataaataaaaatagatggaggttttattatggaaactaacaaatcgtctcttaaaggaagcgtgcaaagattaggtagttttttaagcggtatggtattacctaacattggtgcatttattgcttggggtttaattacagctttattcattccaacaggatggattccaaatgaatatttcggtaaaatggtaggccctatgttaagttacttattaccattacttattggatatacaggtggtaagatggtatatggtcaaagaggagcagtagttggtgcaatagcaacaacaggagttgtaattggtgcttctatcccaatgttcttaggagcaatgatcatgggaccattcggtggatttgtaattaaaaaagttgaccaattcctagaaggaaaagttccaacaggttttgaaatgcttgttaataacttctcatctggaatttttggaggaatcgtagcacttataggttatacttgtattgaaccagtagttacagctttttcaaacacattaggaagtttagctactatagttacaaatatgggacttttacctctaatagatatattcattgaaccagctaaagtattattcctaaataatgcaattaatcatggaatattatctccacttggaatacaacaagcacaagaagttggtaaatcaatattcttcttacttgaagcaaatccaggtccaggtcttggtatacttttagcttacactttctatggtaaaggaaatgcaaaacaatcagctccaggagctataataattcactttcttggaggaatacatgaaatatatttcccttacattttaatgaaaccagcattaatattagcagcaatagctggtggaatatgtgcagatttaacttttgtattaactcatgctggacttgcagcaccagcttcaccaggtagtatatttgcagtacttgcgatgacaccaaaaggtagttatgcatctgttttagcaggagttgctgtaggtgcaattgtatcgttcttagttggttcaataattcttaaggcatcaaaagataatggagaacaagacattgatgaagctcaagctaagatgaaagatatgaaagcagaaagtaaaggcgcaaaagcttcagaaactgcggctaatgtatcaaaagctgatgttaaattaatagtttttgcttgtgatgcaggtatgggatcttctgcaatgggagaatctattcttaaaaaagcattaaaagatgctggaattactgatgttggagttaagcattcatcagttgatagcattccacaagaagcagatgttgtatttactcaagaaaacttagttgaaagagcaagaaaatcagctaaaactgctaatataattacagttaaaaacttcttagatcgttctaagtatgatgagtttattaacacattaaaataataagatattattaactagagtagaatttagtaatataacttacaggcattggtaaacggactgatttaccaatgccatttttaaatttgataaataatagagatgagagtggatgatagtcaaactttaaatttgtcattagaaatgtatcacagttttgaacttgtttgaattgaaaggatgtttcatatagagtaatatatatattgaaagaagcaataatttatagtaattaaataggaggttttattatataaaactttatttagacaaagtgacttccaacttgaactttggataaactggtagatctgatgataacgtttatgatacaacgggttattaactttaaattagcagttttatttaagatgtgtgtattggatcttctttaataggaaaatctatttttaaaagaatttaagaaattcaaaatctaatgacatctgaagattctacttcaagttaaaattaattgttatagatatgatcagtctatcaatatatacaaaataatagataaatcaggtgagatattatgaataatttaacgcctagacaacaattcatattaagtacagtattaaatgaaggaacttttaatataaaacggcttcataaagatcttgacataagtgagagaactattttaagagaactttcttctattaataaaagattaaagaagaatagtataactatatttaatgacgaaaatatgaatttaagtatttcaggtaataaagaaaatatagaggagataaagaaatcattagatatggttccgattccttggctattaagtaaagaacagagacaaatagttatcatatgtgaattattagttagtaatgagccactaaaagcttcgtacttttgtcataagttcaatgttgtaatgggaagtataagccttgatatagacaatattgaagaaaggctaatatctaagaatttatgtgtgattagaaaacgtagctatgggataagtattcaagggtcagagtggaataagagaaatgcattagtggagctattctttgattttaaaccttttgaagatttaatagcatttctttatgatgaaaaagttgatccgatagttaaaactttgtttaacattgtttttgggaatgaggctatccaattagtaaaggatatattaaaagatatagattttgattatcttaaaggaaatgatgtcaaatactttagtttgtttatccaagtattgctatctataaaaaagacaaagaatggagaaattatatatttacctcaagagattaaaaatagtatattatctttagaggaatataaaaaaatacaatatttaggtagtgttttacaaaagaataatatagatatatgtgaagatgaacttgtttacttatgtttatatttaagtgattacaaatacttttttaacaataagcatcttatagaatcagacattaattatgagaatattgctaaagaggttacagaggaaatatcaacaaaaatatatgtagatattaccaaagatgagcagctaataagggatttgactcagcattttaaacaaacattttatatgttaaatttaggattgaaagttataaatcctttgattaatgaaataaaggaacattatttagagttatataaaattataaaaaatacttgcagattaatattctctaggtacaattttaagattcctccagaagaggttggatatataacaatgcatattgctgttgcagtacaaaagcaacaggcgatgtcaaagaatataaaagcacttgttttatgtccaagtggaataggtactgcaagaatactttgtagtaaagtaaagtcgatatttaatgaaatcaatgttattgatgtagtatctttacatgacattaatagtataattgataaaaataaatatgatttgatcctatccactgttcctgtaaacctgaaaacaaaacataacctgattgttgtttctcactttatgactgaagtggatatagagaatataagtaattttatttctaactttaaagctagtaataatgaaagagaactagaattatttgctcaaacaaaagataatacagtgacaaatcacgaatatgaattagccaatacgatggttaagaattttcagctaaaaaaatcagatagtgattcatttattaatttaataaattatatagtagatgatattcacaagattgatattggaacagataaagaggtaataagggatcttatatttaagagagaggaaaatggaaatgttgtaattccgggaactcatgtagcccttatacacacaagaagtgatacaataacttctccatttgtaggagtgtatagaataaataaacctttatctatgaagagtataggattttcaacagaagatgtagatacctttatagtaatgtttgcaagaaatactgaaagtaattatatacttaagattcttggaaaaataagcgtttcattaatagaaaagaaagaatttgttgaaatgctaagactaagtaacactatagatattagagattatttaattaatattataaataacgaggaggaagactaatggaaaaaggaattttagtaaaagaaggaatagtattaaatgttgcgtcagaatctaaggacaaggcaatagaaagagttggtaaacttttaattaatggaggatacgttaaagataattatatagagggaatgaaagctagagaagaagaagttacaacttacatgggaaatggtgttgctattcctcatggtatgaatgaatacaagaaagaaatacttgaaacaggaatagttatagctcaatatcctaatggtgtagattttggcgaaggcaatactgcttatatagtaataggaatagcaggaaaaggcgatgaacatatggagatattatcaaagatagctttaactattcaatatgaagaaaatgttgaaagacttagaaaagcaaagacaccagaagaaataatggagattatagaagaaggagaaatgtaatatgaaagcaattcaattcggtgcaggaaacataggaagaggattcataggtgcattactttcaaaagcaggatatcatgtagtatttgctgatgtaaataaagaagtaattgataaaatcaatgaagataaaaaatatacaatacatgtaatggatgtaaattgtgaagaaatagtagttgaaaacataagcggagttatttctataaatgatgaaattttagatgaaataaaagaagctgaaattataacaacagcagtaggtcttgttgtattaccaagaatagctccaacaatagctaaaggaatacaacttagaaaagaagcaggaatcaaaacaccattaaatataattgcatgtgaaaatgcaataaaagcaagttctcaattaaaagcagaagttgaaaaatgtctaagcgaagaagaaaaagcttatttagaagaatttgttggattcccagattgctctgtagacagaattgttccaccagttaagagtgaaaatattctagatgtagtagttgaaaaattctatgaatggaatgttgaagaaaaagcattcaaaggaagtattccagcaattgaaggaatgaatttagcagataatttaatggcttatatagaaagaaagctattcacattaaatactggtcatgccattacagcatatataggaaatttaaaaggttatggaacaatagatgaaagtatagctgatgaaaaaatatataatgttgttaagaaagcaatgacagaaagtggaatgggcttagtagaaaagcataaatttgataaagaagctcacttcaaatatatagataagattattggaagattcaaaaatccttacttaaaagatgatgtatcaagagttggaagagaaccacttagaaaattaagtgatagtgatagattaataaaaccattaatgactgctagaggatttgacttaagcgttgacaatttattactaggagtaggtgcagcattacactacaataatcaagaagatacacaaagtgtaaaactacaagaattaataaaagaaaaggacgtaaaaggagctatagcagaagttgctaatatcgatgataatgacttattagaaaagatagaaaaggcatataatgacgttttagcaatatagaaaactcatttaaggtggataattatccaccttaaatattttattaataatttttagtgatttaacatattaataattaattatctgaagatgattttgtaaccaaaaagtaataataaaatatatatataaatatagacaattgaaaataatgtgataaaatagtcaaagaggcataaataaagaaaacagaggtgatgaatggagaagaaagaaaatcttaaaatcaataaaaagcgccaggactaagtgagatttagttgaaagtgaatttttacagggttggtttttagaaaaggaatttagttaatagtaagctttgatataagttacgcgaatagctaattaaatctttttaaaggaaactcgactcacgttcgttcgctgagtaaattcaactatccaaatcgaagatttggagtttcatttacgtcgacgaggttggggagtatcgaaacttcggcgggtgccccacggtatcgcactaccgtaaacgactggtaaaactgtgaagtgattcacaggacaaattcagtctggtgttaaaacctttgttttaattttaatttctaggattactatgcccttttataattgtgctaggaatgaagttaaaagaagaattaaaattaaatattatatgaaaaaagagaggaagataaatatgtgcggaatagttggatattttggaagtaaatcagcaaaatcttttttagtagatggattatcaaagttggagtatagaggttatgattcagcaggtattgcagttgttaatgatggtaaggtaagcatcgaaaagcataaaggtcgtcttactaacttaactgataatttaggacaaggcaaagctgaaggaacacttggtatcggtcatactagatgggcaactcatggagaaccatcagatattaattcacatccacaccaaagttcaaagggagatattactgtagttcataacggaattatagaaaattatttagaacttagacaatggcttaaaggagaaggatacgaatttgtatctcaaacagatactgaagtaataccaaatttgattcactactattatgaaggagatctttttaaagcagtagttaaagctactgaaagactagaaggaagttatgcattaggtgtagtgactggagcagaaccagacaagctaattgcagtaagaaaagatagtccactaattgttggtttaggacaagatgaaacatttattgcttcagatattccagcgataataagctatacaagagatatctatcttttagaagatagagaatttgttgttataggcaaagatggcgctaaaattttaagcgctgatggaagtgaaataaagaaggatgttttcaaagtaacttggaatgaagatgctgctgaaaaaggtggatatgattcattcatgttaaaggaaatcaacgaacaaccaaaagctattagagatacaatggcatcaagattatcaatgagccatgatatcacttttggagactttaagttatcaaaagaggatcttaataatatagatagaatatttatagtagcttgtggaactgcatataatgcaggacttatgggaagagtagcaattgaaaaattagcaagaattccagttgaagttgatatagcatcagaatttagatataaagacccattagtaactaataaatcccttgtaataacattaagccaatcaggagaaactgctgatacattagcggttcttagagattgtaagaaagctggagctaaaactttagctataacaaatgttgtaggaagtacaatttctagagaagctgacgatgtactatatacaatggcaggtccagaaatagcagtagcttctactaaagcatatacaacacaagttgttgttatgtatatgatggcaatgtatttcagtgaattaaagggattaatgactaaggaattagaaaaagaattaaaagaagcattattattagtacctgaaaaagttcaagtaattttagataaagcaagtgaagtagaagaaattgcaaatcttttaactgatgaaacagatgtattctatttaggtagaggtgctgactatgcattatctatagaagcatcattaaagcttaaagaaatttcatatatccactcagaagcatatgctggtggagaattaaaacatggaacaattgctttaattgaagaaggaactaaagtaatagcattattaactcaaaaatcattaagagaaaaaatggtaagtaatatagttgaagttaaagctagaggagcagaagtaattgcaattgcttacgaaaatgatgtattagatgaatcaattttcgataaagtaattagaattccagaacttcttaacttagtttcaccaatagttgctgtagttgcattacaacttttagcttactatacagctagaaataaaggttgtgatatagacaagccaagaaacttagctaaatcagtaacagtagaataattgataatttaaaacaatttatattgagcatgaagaactcaggtctaatcctgaatcttcatgcttcttttatttttgcaattaattatagtaaagaatatctagtggggatcaatattgaagatgtttcgtctaagggaaggggggcaggaataaaagtagtaagagcagcagacaaaattaatctttattcagcattcctacatatccatttttaaaataagatctaaataaataagacattttctctgaatcaggagtacagtttgactttaaccaccaatcaatagtgccgattaaagcattagcggtaaataagaatgccatttcttgtatctctggtgagcagtcttctttgcttacaatgaaggagcttcgtaaattttcacgttctcttaacattgagatgatgtagctgcgcagtctagatataaaccatatgttacatgaatcatccagcattgccagatataatctactgttttcagcaaagtgatcaaatagtttcacccatggatcagatttttgttcttcattaagatacttaaggctggattttggaaggcctaaatctttcttcattttttccattgcgtcttcaaaaatttttagtacaacgtcgtatttatcctgataatacctataaaaggtagaacgattaatcatagctctattggtgatatcaccaactgtaatgttatcgaaacgtttttcaaaaataagatcaataagagaatctcttatttgctgatgtgttcgttttgttcgaatatcatgtttattctgcaacattttcactcctttgttgtatataaaacaaactataagtattgttggttgaatataaatctgtatctgatatattttaattatagcaacaacgtgttgcataaacaataaatactgtaaaggagaatgaccatgaataatttgatttttgaagacgatcaattcgcatccaaggtattgggccttcttggagacactgctttcaaagctgcagatataggagaagtggtttcaacagcagagaaaattaaagagggagactatcaaagctggtgtgaagaatggaccaaaacagccaagcgtttgcaaaaagttgcagaggatagctattcagatggtcacttgataagtgcaagaaaagcctatcttagagcttctaattattatagaattgcagaattttaccttcatgaaaatccagaagactcaaaggtagaggaattatacaattcaagcctagattgcttttctaatgttatgaaacttaataagcctgttattgaagaagtgaaaatcccctatgaaaatacaacactttcaggacatttttataaattagaggattcaaaggaaccaaaaccagttttaattgctatgactggctttgatggaacaaaagaagcattttacggaatggcaatggatgcacttgaacacggtatgcattgtattaccttcgagggaccaggacaaggagaagctgtacataaacaaaaactattttttagacatgactacgagaaggttataaccccagtagtagactatctgcttacaagaaaggaaatagatccaaagaaaattgtcttatggggacaaagcttaggcggatatcttgcaccaagagctgccgcttttgaacatcgacttgcaggctgcatagctaatggaggagtatatgactttttagtaggatttacaagtatctttaatatgccaagagaagaatttttaaatttcgcactttctgattcagagggatttaataaagctgttaaggaaaaaatggaattaaactcaaaagcaaaatggagcttttcacatggaatgtatgtatttggtgtaaatacccctgctgaattcattctaaaggttggagagttttatatgaaaggattaacagaaaaaatacaatgccctgccttaatcgttgattcggaaaatgacaaacttcttagagatcaagcaaggcaattgtatgaggagcttacctgctataaagattttattttatttacagctgaagaaggtgctgaattccactgccaagctggagctaaattaatcgcaaatgaacgtattttcagttggattgaaaagattcttaagggtatatagatatcatagaatttaaatttttatattataaggagagatgcgaaatgtcaaaagtagttatttttaaaggtagtccaagaaagaatggatatacaacaaaattattagatcaagtagcaaaaggagcaaaatccaaaggcgctgaggttattgaatttgatttaaataacaccggaatacgtggatgccaaggatgtttttattgtcgtactcatgatggctgtgctgttaatgattatttacaaccaatgtataaagctattgctgaggcagatggcattgtatttggttccccaatatatatgtaccaaattacaggtcaggcaaaaacttggttagatcgtacgtttccaatggttgaagagcttcccaataagtttattcctagacatccaggtaaaaagttaataactgtatttgctcaaggaagcttagatcctaaaaaaggtgcagaagccattaaatatgttaataatatttttgacgtatttggttggaaattagaggattgcatccactactgtggaactgatgatgaagtttttaatgagttatctttaagagcatttaagaatggagaaaatttagtttaataaaatgtattttagaagtttaacttttgtgtctaagatattcacataacactatcatgcaggaagagaatttgccatacagttagctgccataataatgtgattgctagttgtagtggaaaaaaggtggttttcatatcaaaaccaccttttggaatgttatttttaaattaaaaacagtttactgcattaatctagattatagatagaagatctagatggtggctttattgccagcatttttactaacataaagattgcgcgatgcgcctagaccggcaaataagcataatccggcagcaccgattaagataataagtggcaacgtccagttgttaaccgcatcatgcagaaaaccaaaaagcatcggcccgaaagcagcgagtaagtagcctcctgattgagccataccggatagtcttgctgcctcgtctgcatttcttgtacgagagctgaaaaatataagagctaagcaaaaagtaagagctccgccaatacctaatataatcatccatagtgctgtaagctctgtttctccgaggaatattcccaaaagccctaccaaaacacatagggaagcagtgataactaatggtcgttgattagccttacgcccagcaagtacagaaccaacaaacgatgtaggaagagataccagttggtaaagggagagcatccatcctgctttgcttgaatccataccttgatgcactaaaatagctggtaaccacgcaatcatgcaatagagtagcatagactgtaatcccatatatactgtcacttgccatgctaaaggagatttccagagattaatcttattaatactagtactatttgccttaacgatctccatttcatcttttttttcgtggacgtctttggcttttgttctaatgccactatgaaccgttctttgaacaatagatagtttttgttttcttcgtataatttgaggcatccagaggacaatggataagaaactaagtgaagcccaaatgcttaaggctactccccatcctactcctgattctgaagcaacggggacactgataccggatgctatagcgccaaaaaggcccatagaagcagtatagatacccgttattacaccgacccgctcaggaaattcatgttttattaagctgggaatcagcacattacctacagaaatggataatccaatgattactgtaccaagaaacagtcctaaatctccaaacaatgaacgtaatataattcccaaggtcaggaaaataagtgaccaaaaaagcactaacttagtgccaaattttcgcgccaaatttggagcgaaaggtgaaaatcctgcaaaagcgaataacggaagtgttgtaatcatacccgctaatgtatttgaaatatgtaagcttctacgaatttcatcgatcaacggaccaactgctgttaaaggtgcacgcaaatttgctgcagtaaatgtaattccgattatcagtattatttgtatggatcttcttgaatgtggatgtggtttgggtgtgtgttcattacgtaattgattcatttatatagtttctccttaaaattatcatatgtttatacttgatttaaatatttctttagagcaaaagtagcttcatcactgataatatgctcaattttgcaggcatctttacttgctgtttgctcattaacattgcaataggcaattaagaattgttttattagctgaaacttagctataattatttggccttgtttacgtccttcatcagtgagatgtatttccccacctaagggcttaacaactaatccggcctcttgcaatatagccacagcattattaatgcttggctttgaaaatcctaaataagcagcaagatcaatcgaacgtaccgagtgtgttttttcagataatttatatatggcttttaaatattcttcttttgaaggactaagttttttctgtgaataacgcctactttgatacatcacttatcctccttgcattaattatagattaaagcgtattggtggcatacactttagtataattcctcatttgtcttatttttttagagcccatcaaatttattgttttccaatttgctattggaaagattcgttggtgtaaatatcggacattcatatggataagaaccaaagagaacgcatgaggataaagaagtatagatagcccataaactcatttcagcagtccataaacctctttcatcagcatcaagtgttttaggtttatgctttctcttacttactttactattatcaaaactcagaaatgactttaataatgttttctttttcatactatttcctcctaacttaattgtgatgaaaaagcgtatagcatacatacacatgtataaaattttaattgaaaaacttaattttgcttattatgaatgagaaaaatttcaattcacgtttggaggcattttgtggttcatatccaactatatttgacacaatagaatggtagttcacatagttaatatgagtttcttgctttgattatagataaagggtgtatggttgccatatgcctggggataattgtttatatattcacttacatattttactattatcagaagtcatatctgacctctgataattttctctttttgatattagcattttctagcttaaattataatgaaaattaacatagcagctatacacttgcgtaaagtatttattcatcaaagttttcattaaaagatttaactttgtttatcatagacgataaaaagtttgacaaaaattctaattcatattcggaagcattttctagctcatcttcaaacatactgtttaaaatagaatgatagtacatatggctgctatgagcttttttacctttttcactcaggctcagcgaatatctagataaattaagattatcaatttcctttacaaccagagcctttctctctagctttttgaggatttcggaaacagacccttttgttactcctagaatatctgctaatccaccaacatgaataccaggatgttcagcaatggcctttattatatgaatttcagagtgaaaaatcggcacatcagttccgaaatagcgcgtctttttatcaagatcgattaaggaaaatgctaaatcaagagaatcatatgcaattttatgtttgttatttatatatctatccatgtcaatagtatatggctgccatacacttttgtcaagtgactgttgaattaacatttcttatatcgtaacaaaatgatatatagtaggctaaaggataaaaaagccacttttgcaaaaaaggcaaaaatgtggctgtgacatcatttctataaatattaagcatgcataagttcgtgtaagtaaatttcatgcatgcttatatttatatattaatagaaatttaatataagtttatatatcagcaattactctgcaagaaagtccagaaaaaccactcatgtttgtaggaaaagtatataccgtaaaagatttttttagtaataaatctaagttaacaagattttcttatagactctattcagaacatatatatggcatgaataaatcagatttaatcctgaatcttcatacttatttcatttttacaattaattatagaaattatgccatagagtagtgtagaaaatatactatatcgatctatatttttagctaatctctcataaattaaataaaaatattgtagcattttaggagaaaatatttttaaaaataggtttacaaatttgctgaaaaataatatttcatacatatagaggaaatattatttaaaggagattgattgatatgagagagagaaaatatgtcaaatttagagttgatatgtatgaggatactaaatttaaaataatagatagaaaacctgaaagagatcttattaactatatttggacaagagttgtaatattggctgggaaagtgaatagagaaggcgatttgtttatgtcaaaaaatattccatatacaattgaaaccttagcaatagagcttaatagggatattgatcaagttgaacttgcactaaaggtgctaatggaattagaaatgatcgaagttatagaacataatgcatatagggtaaagaattttgctaaacataaaaatattaagttgaaggaaaaagttgaaagtaataagatatcaaattcagcagagatagaaaaagaagaagctagaaatgaagaaataaaaagtgaagaaaatttaaaaaatgaaagcacaattgctgtaagtgaacatataaacgctggagataatgtaggtgagaatgagagtaaatatataaaaagtgatgaggtagctaacttggaagatatgcataaggatattaatagtaatgaagaagatacaactaaggaaaaagagtcaagtgatctaaaaaataacatccatattcctgtaaaggttaaaagaggaaggagtaaaggaagaaagaaggaaaaagcctcaataattgaagtttttgaaggagatattattgatgatgaagttagtggctttttcgaagaggagagaccgttaggaaaagatgagcgcattattaaatcattgacattcgattgatgaatgtgttaagggtttaggttttaatcataatatcaatatgtttatatcataaattatttttatagaaatttatgaatctaaaattcacatgataaatatacaaaatataatagaaatatacaatcggtttgaatgtaaattgatataataaggctaaatcgaagatattactcatgggtataaaaataaataatttatttaaggtgggaaattatatgttagaaaaaaatttaaacgaaatcttaaagaaaaggtttaataagatagcaagagaagcgagtaatgaagaaatctatttagcattattagaattaacaaagggaacaatcaagaaaaagagtgttaatagagggaagagaaaattatattatatttctgctgaatttttaattggtaaattactatcaaataacttaattaatttaggtctttatgaagatgttaaagatgttttgactaagaatggtaaggagttagctgaaattgaagaaattgaattagaaccttcactaggaaatggtggacttggaagattagcagcttgttttatagactctattgcaactttaggactaaatggagatggtgtaggactaaactatcactttggattatttaaacaagtttttgaagatcataagcaaaaagctgttaagaatccttggataacaagtgaaagttggttaaataaatctgatattaagtttgaagttccatttgcaggattcacagtcacttcaacactttatgatatagatgtaacaggttatgatgaagaagtctcaaataaacttcgtctatttgatgtagatacaatagatgaaactttagttaaagaaggaattgactttgacaaagaagatattaagaagaatttaacattattcttatatcctgatgacagtgatgaggctggacgcttattaagaatatatcaacaatattttatggttagcaatgctgcacaattaatattacttgaggcagatgaaaatgggtatgatcttcataaattacatgaacatgttgttgttcaaataaatgatacgcatccatctatggttattcctgaattgataaggctgcttggagaaagaggtatcactatgtcagaagccattgaaatagtatctaagacttgtgcttatacaaaccatacaatattagcagaagctttggaaaagtggccaatagcttatttgcaaaaggttgttccacacttattaccaattatcagagaattggacaatcaagttaaacttaaatttaaagatgaaaaagtagctattatagatgaagatatgagagtgcacatggcccatatggatattcactatggatacagcgtaaatggagttgcagctctccatactgatatcttaaaagaagaagagttaaagccattctatgatatatatcctgaaaaattcaataataaaactaatggcataaccttcagaagatggttaattcattgcaataacaaacttgccagctatatttcagaacttatcggagatggatataagaaagatgctgctaagctagaagaattagctaagttcgtaaatgataagatagtgttaagtaaggttggggaaattaaaaaagaaaataagattgcactaaaggaatatttaaaagaaactcaaggagtagaaattgatgaaaattctatctttgatatccaaattaagagacttcacgagtataagagacaacaaatgaatgtactttatattatttataaatatctggatataaagaaggggaataagccaactacaccaataacaatgatattcggagctaaggctgcaccagcctatgtaattgcacaagatataattcatactattctttgtctacaagaaataattaataatgatccagaagttaataaatatctaaaagttgttatggttgaaaactataatgtgactaaggcttctaagttaatacctgcttgtgatgtttcagaacaaatctcgcttgcatctaaggaagcatcaggtactggtaacatgaagttcatgctaaatggtgcattaactttaggaaccgaagatggagctaacgttgaaattcacgaattagttggagatgaaaatatttatatatttggtgaatcttctgaaaaagttatcgaacattataaaaatgcagattatgtttctaaggaattctataaaaagccagaaataaaagaattggttgactttatcataagtgataaaatgataaaagttggggatgaagaaaatcttacaagacttcataaggaattagttaataaggattggttcatgactttactcgatgttgaagattatatcaagactaaagatatagtatttaaagattatgaagatagagaagcttggaataaaaaagtattaattaatatcagcaaagcaggattcttttcttcagatcgtacaattgctcaatacaatgaagacatttggaagttataatttataaataaaataataatttagtttaaatgggatcgataccggttagtactaaattcaactgataagaaagactaaaaacttgaaagttcaagtttttagtcttctttttattagagtgagtttgtttattatccaaaattattgtttctgtattcagaaggtgaaacaccagtaaatgatttaaatactttatggaaatgactttgatcatgaaaacctaaggttaagcctatctctaaaatactactagttgtagttacaagtaacactttagccctatctatccttattttttttgcatatttcataatagtcatgcccatatgtttcttaaaacaatctgatatatagccctcagatagatttaattctctagacaattttttcaatgaaatttggctctcgatattaagatgtaggtgcttcaaaattctatttataacaaagttatcttttacttcaacgtcatttataaggagattaatgtatgtatctatcatttgtatttcaatagtttgtaaatcttctatagtattaagagtaggaattaaagtatagaatttgttatatatgggatgaagatatcttgttaaaatgccattttcaactatttctctagtatacatcgcattccaaataagcaaatcgtttttcttatcttgtatagatatctcatcggaaatttcgtctaagtgctttttcttaactatttctaatatttgtggctttgccctaagttttattaagaatgatatgtcattattaaaaatgttcatatctgatataaatgaattatccaagataatttcctccccatattctaatattataaatgcatattaaatatatacatattatattaaaaatatacaagtataatcaagtattagtaagtaaggaagatgtaattaattaattaaaacatatatggtaaaaaggtgcaattttcgacttggttttatgataaaaattaataatattatagtatatatgtaaagaaattgaactcccagtgcgataataaaaagaatatgtaaattgttattgtaaaaattaagagggaaaataatgtaaatagataacagctttgattaaattaaattgttatttattcaattttatgaaaaggggtaatagtaatgaaaacggaaaagcttagggttaatactattcgcagcaaactagttattagcttaatgggaatttgtgtaattcctttaataatattaggttatggtgctaatatacaagccagatcaattcttaatgaaaaactaaaattaacaagtcagcaaacacttttagaagtaaatgatggaatcagtaattattttgatggatttagtaatatgataattatgatatccacggattataactttgttaacagtgataagagtgaacaagcagcatacataccagagagtctaaagaatttaaaagaaagtaatagtaatattttcagttcatattttgcaactactgatgggaagtttgatatatatcctaacagtaaaatgccagaaggatttaaccccaaagaaaggccttggtacaaacaggctgtagataataaaggaaaggtaataataactttaccatttattgacgctcagacgggaaaaaatgttgtgtctattgcaaagacagtagaaagagatggaaaagtcataggagtttgcgctatgaatgtttccttagagacacttacagaaaaaataagtacgaaaaaaataggaagaactggatacgtttttatttctgacgtagaaggtaaaaatatgatagcacatcccaataaagatttattaggaactgatgcagcatctaaacaatccttttggaatgatgctaaaactaatgaaaaaggatttataacgtatacctttaacaatgcaaagaagtttggagtatatgaaactaataatattacaggttggaaattagtagcgacgttagatgaaaaagagctatcaaatgacacaaattcaatattaactacaactctaattatagtagtagttatatgtttgatttctatagtcttatctttattattaagtaaaggaatagcacataatattaagaaattaaaagaagtatttgaaaaagcttcaagtggagatttaactgtatctatgacttcatccacaaaagatgaatttatggatctagctgattcatttaatgaaatgctaaagaatatttcagatcttatgaacaatgtaactaaatcatcaaaaacagttttggaaacgtcatctaatcttgcaagtatgtctgaggaagtaactgcatctataggagaggttgcaaaagcaatagaagaggtatcagaaggagcaacaaatcaatcgcaaaatgctcaaaatggagttgcagaaatgaatgatttatctaatagattagataaaataagtgtaaattctaatgagatggataaactctctgcaagtaccaaagaattaggtgccaaaggattatctatgatagatacattaatagagaaatcaaagaaaactaagatagctacaggtgaagttgatagcatagttagagatatggacgaaagtactagaaaaataaatacaatatctgaaacaatctcgcaaataacagagcaaactaatttattggcattaaacgcaagtatagaatctgcacgagcaggggaagcaggaaaagggtttgcagttgtagcagaggaaataagaaaactcgcggaacaatcaaaatcatcaacagaagaaatcaaagttattattacaaatatccagagtaagtctgatacagcggttaaagcgattaaatctacagaaagtgtagtgacagagcaagatttagcagtaggaaagacacaggagatatttagcgaaatccttagatcaattgaaacaatgataagcaaggttgatgagataaagacttctattattgatgttgatgagaaaaagaaaaaagcggtattagaaattgagaatatatcactaatatcacaggaaactgcttcagcttcagaagaagtaactgcatcaacagaggaaataacagcagttatggatagattcacaaaatatgcggatgagctacaattattggcggaaaagttagatgaagaaataagtaagtttaaaatgacataggtagaattacaagttgaatttgatgtaagaatctaattcaacttgttctttatttgtaggaataataatgaattagagttaaaagcatcctagataatttaattatttagtggtatcattatatagagaatttgtatattggaggtatgattatgaagagtttaaaaggaagcaaaacagcagtaaatttaatgaaatcattcgcaggggaaagccaagctagaactagatatacttactattctagtattgctaaaaaagaagggtttgtgcaaattgcgaacatattcttagaaacagcagaacaagaaaaagaacatgcaaaaaggttttataaattccttaaggatgattatgttgacgagcagatagaaatacaagcatcttacccagtctcattccacgaaagtacattgaaaaacttacttgcagcagcttcaggagaaaatgaagaatggacagacctttatccaagttttgcaaaaacagctgaagaggaaggatatccagaaattgcagtagtttatagaaagataagtgaagttgaagcacgacatgaggctagatataaaaaactagctaaaaatattgaagatggaacagtatttaagaaggatgaagtaactctttggaagtgtggcaattgcggatttatatatgaaggcaaagaagcaccagttgcatgtcctgcatgtgcacatccacaagcatactttgaagtatttgttgaaaattattaatatagaaatcaaatagacatgcattgagggaacacttatatttaagtttaaattaagtgtttccttttttgcgttggtatttttgaaaatttagacagttcatatttaccgtgttaaaataaaagaagtatataaaaataagacagatggtgagtatatgattaaagctaaattagaaaagaataaaagtggaaaaataatatttaaattaaaaatagatagcgattataaagaaaatattttatttaaaagagctattatggaatcaaaagaaattaagggacgatatcaatatgaagtacctttaagattctttattccaatatgtaaaaatgtaggtagagagaatttagtattagataagagatgcatattatcttatttggaattctcagattattatgatgaaaattattatacagatatagatgctaccgcaaaatatatgaaaaaatggagagaagaaggttgtcctgatatttatagaataactatagataaagatagctatgaaataacaaaggaggtagtctttaagaagcctaaggtagtaattaaggacttcagtttataatatgtattttaaaagaaaaataaaaaggagttatctcaaattagaagtaatttgagatgaagcctttttaatgcattctagtattattgactataaattacgcttgctattatattagtaatttctaatgaattgctagagagtaaaaattcatgtatagaacttaggtttaaggatttaagcaatagcaaatcattagtattagctttgaaaattttattgttaatagtaaatttaaagctaccacttacaacataaaaacaaatggctataagttccttatctaattgaacttgatatttgaatacacacttttttctaggcgtaatatttaaatgaactaattcaccattataattctctcttgtcattaagttaaaaacagaggcttttccataagtttttgttttccaatcacccatgaagctatcttgttcaaaggcttttagtaatttcctatacttatttttatgatcaagggttattttgccttcagtaaccataaatttacgtgaaacatttgtaagatcgctaaaagtagattccggtatatcaattttagctataccaagtctccataagaagttccggcttgcataatcagaatctactggatatgttattaattctgtcgccattccaccagaccaaaatgtcggcttatagctcttttctcttattaattcaacatcgtagttcataaattactctccctttatttatcacatattttatgttcattatattaaaagatatatgtataatcaataaagataagtacaatataaagcataattaattttactactatgtaaggtttactatttttagatatataaagaatagacataagatgttttagtaagtaaaattaaaataataagtaaagtgaatagctagataaaatatctatagatttattaatttgagaacaatataaagttcatgattgatatgaagtataattataggagttgtttgtatggaaagctttattaataagaaaatactaagaaaagaaattttagataagcgaaaaaaaatagatgcaacagaaaaagaaaaaatggatgaaaaaatattagaaacagtttatagtagcgagtattataaattggcaaaaaaaatttttgtttatatatcgtttgacactgaaataaatacaagagattttataaaggaatctttaaataataataaaagaatttatgttccaaggacggaaattaaaactagacttatggatgcagtagaaattaaatcactggataatttgttggagagttcatatggaataccagaaccatctataaatgatccatatattgatccaaacgaacttgatttaattatagttccaggcgtagcttttgacaggcgtgggggaagagttggctatggagcaggtttttatgatagatatttcaagaaaattaacaaggataatataaaaagaattacaaaattagcattagcatatgattttcaagtacttgataaagttccaaccagttatcatgatgtaccagtagattacattataactgagaaagaatttataaagttggaataatgtaatggcggattaaaataaacagggggaatatatggaatacattgaaagtaattttggttacctaaaaggaaccaaaatagaaaagtactacaatgatctgataaaagcagaatttttatgcgagtattatccaatagttacaaagattattgttagaaaagtaatggaaatgcttttaagagatatagcgcaggacagtggaatggatatgaatgtttctgcacttacattactaaatggtattaagttaaagtctaatatttctttttcagaagaaatttataataatatagagattatattggctaacgggtatgagaacatttcaaaaagagatagaaatagaaagatacctaaacatccaatagaaattttaaaaatagctcagaaggttctatattactatttgaaagaaaaagaaaatttgatgctagatataaagaatttaagttttagtgctcctagtactatagaatatatgaagaaagaacttttaaagatcaataacgatattgctcaaagagaaaatttaatcaataatcttaggaaaaagattcttgaggtagatagttctccaaagcgaataagtgaaataaataacatcataatattaataaaagaagaaaaagcttatttagaagaaatccaagatatattaaatagaaaagtagaaatgcaaaataaatgtgtattgaatatggaaacggattataaaacatatgaaaaaaagcttaatgaaatgaaaattaagtttaatgagaatgaagaacttcttctagaaaaagaggggcagcttctgaaggctgagatacaaaatcaagaattgaaaatatcgactgaggagttagatgacgaagatgaatcaataaaaaggatgaaagtatcactggatgaagaattaagaatattaagacacgcatatgaaagtttattaaacttaacagaagaatataatgatattgttgaaacaatagaatttttatatgataatgagctacgaaaagaattagaagctaaaaagaacagtattcaaataaaaataaactttgaagatgctgtatttaatgagaatataattatttacaataaaaatacagtggagtataaaagaaaagcgttaatatttaaagaactagtaaatgaaaatataaaacgagaaattaggcatgaaaaattttatgatggatttttaagactatcaggaaaagagcttaaaatcgtatatacaatcattaataatattacttcaagttttaatttgataagtaaacctaaggaattattgggtagatataatgaagataagtttttagaattactaaatagaaatttagagaatttaaaaaacattaatgataatgaaataaagctaattttatattataaattaataagtttgtcaaatgcgccttatgggaagatatacaatagaagaaaatttgtacagacattggattacatggtagataaagcttatagtcttttagccactaaaaaggattttaaagcaagaacaaaaaagctagatgcaataaatgaatattatatgaatagaactatatcagcattaaaaaataaaggttcaaatacacatattacagaagagcttatagaaaagatttatgatataatcacaaaattaagacaaagaccagaaaataaagagaaaaggctttactatgaaaaactcgatttagatgtcatgacggagtcggccattaaagcagctataaaatctcaaccatatacatttctatatatgatagcagacttagcgagcattgattcatataaggatatgtctagtattatatttcaaattgaaaatttaattgagaaaaggtctttaattaaaaatttttctaatacctattttatggttctattatatttatctagcgatgcaatagttgtaagccaaaatcagcaagaagaattagtaccattagcagtgatgttaataacgagtgtaagtttagtctcagataatgattttataaatctggaaggttataatgatttggtcaagttatggaaacaaaaacagcaaaaatataacgatatctgtatgaagaaagaggaagaggaaagtagcttagcactactaatgagagaaaaattagaattagaaattaaccagaaagaattatcagaagcctatgactcattattgagaaggtatggaagctacgagagtgaatttaaaaatctagttatgaattcagaaaaaagagttctcttgccatcatatttttactatgatgatttgtgcaataagaaaaagttagcagaaaagcatatcaatgaatcaaaaaataaaatcggaacattgaaaagcattttttctatagaggtttggaaggatcaagcgaataagtttattaatgaatccaatatgctagaagctgaaaagttgctaattaaagaagcaaagcaaaagccttactttaaaaaagaatattcagtcttcttagaattagaagatcaaattcaaaaagtgaatgaatctatggaaaaaaataaggagatgctgaaaagcaaagatgcactagttgataatataggaagtaaaattattgacttgcagaagcagttaactactatgaagaatgcgtatatagacatagaaggtggctactaaaaggttaattgtagatatattattatgatttactgaatattatattattttacagaaagaacataagcctaggctctgtaaaaaaaattgtgtaaactaaaaaaatgaggatgccttatttacaagggcatcctcattttttatataaattttataattctttattttctatttctttaacgattctctcgataaacgcatctaatttaacagcgccttcatcgtcattctttctgcttcttacagatacttcattattagcagcttccttttccccaacaactaaaatgtaaggagttctttcaagtctagcttctctaatcttataaccaatcttttcagctctataatcagtttcaactctaatacctttattctttaaggcttttgtaactgcttcagcataatcattgtacttatcagagattggtaatactttggtttgaactggagataaccatgttgggaaagcaccagcgtattcttctataagcatagctaaagttctttcataacatccaattgatgatctatggattatataaggacgtttcttttctccgtctttatctacataactcatatcaaatctttcagctaaagcaaagtcaatttgaactgtgaataaagtatcttctttaccatgaacatttctaaattgtaaatcaagttttggaccatagaaagcagcttcatcatcagcttcaacataattgatatttaaatgatctaggatatttctcattgtatcttgagttttattccaagcatcaggatcattgatgtatttttcggtattatttggatcccatttagagaatctataagttatcttttcagcaattcctaaagttcccattaaatattgaattaattcaagtacacctttaaattcttcttccaattgttcaggtgtaacaattaagtgaccatcagctaaagtgaattgtctaactcttataagaccatgcatttcgcctgaagcttcatttctaaataaagtagaagtttcgccgtatctgattggaagatctctatagctgtgttgttcagcattataaactgtatattggaatgggcaagtcattggtcttaaagcaaatacttcatcatctttttcctcatcacctaatacaaacataccatctttatagtgatcccagtgaccagaaatcttatataaatcactcttagccataagaggagtcttagttaaaagataacctcttttttcttcttcatcttcaacccatctttgaagaagttgaactatttttgctcctttaggcattaataatggaagcccttgacctacattttcatcagttgtaaacaactttaactctctaccaagcttattgtgatctctctttttagcttcttctaaagcttctaggaaagcatctaagtctgctttctttaagaatgcagtaccatagattcttgtaagcatcttatttttttcattacccttccagtaagcaccagcacttctagtaagtttaattgctttaactgattttagtgacataagatgaggaccagcacataagtctgtgaaatcacccattttatagaatgagattatttcattttcaggaagatcgtttattaattcaactttgtaaggttcatccttcattaattctaaagcttcatttcttggaagctcaaatctagatatttctggattttccttaattattttttgcatttctgcttcaagtttttctaagtctgcagcagtgaatgcaatttctctatcgaaatcatagtagaagccagttgcaattgaaggtcctatagctaactttgtttcagggaataatctttttacggcataagctaaaacgtgagatatgctatgtcttagagcatctttaccttcttgagaatcaaatgtgcatatgcttaattcaacatcttcatttatttcttttctaaggtcttcaacctttccattaactatgccgcagcaagcatttctagctaaaccttcactaattgatttcgcaatttcataaatagataaaccagcttctagttctttaattgatccgtcttttaaagttacttttatcattttaaaactcctttcagatttaagaaaattttgattttgtgacttgttaaattttaataataatatcgttaagaaaagttattactaaaatcatacatttttgcaaacaaaaaaacctcatctctaaaaatagagacgaagtaatatccgtggttccactctaattacctagaagaaactgattaaaataggtcaaataaaataaacattaaaaacctttttaaaaaatcagttgaataggtcacttaaatttatcgtaacgtgataattacgggctttattagggccactcagaggtggttttcagtctaaatttatataagaataatcgcaccaacatattctctctctgaaaaataagattttagcttactgtcctcatcaacgtgtttatttattatattaatattcttaattataagcacatgatttttagatgtcaactaattaacaaaaaaaatacaaaagatattaagaatctcagaatatattggatattttaacaaaattataataaggctttaacctagaatttattaaaatcaaataaaatttatgtatattaggttgtatttagtatttttttcaggaggtaaagatgaatagaagtattaaaagtataaaagttaaaattattatgttcctaataccaatgttattaattgcatttatagctttgtcgggaataggatatagatttgcaagtaagtcattaaaagagagtaacttaaatgtaatggaagagatgacgaaaactgctgcatcacgagcggatgatcaaataaaaagtgagattaggaaccttgaagtaattgcaagcaatccgataataacggataagaatgtacaaatagaagaaaaaattcaaatacttaaaccagcattgaaaacagttggacaattagaaatgagtataagtgataaagatggaaattcaatagatactttaggaaataagaaatcaataaagacaacacaaagtttcatgaaatcaataaatggtgaagattcaataaccaatccatatatagatccaatcataaagaaaaaagtcatatcatattcagtacctatcaaggattcttcaaatagtattataggaattattacctcgataaaagattgcaaagattttgcttctttaaacaaagaaactaattttttgaaaactggaaatttattaattgtagatagtaatggtaattttatagtttcagaagatgagagcttagtaaatgagaataaaaatataactaatatgacctctgataaagaaaatttacaagatctaaataacataggaaaaagtatgacaattgggacccaatctggaacaggaaaatatacttatgagggtaaagaaagatatatatcatatagcccgatagggaaaacaggtcttgccataggaatcacagtagaagaaaaagacctgctaagtgcattaaacagtttagctttcattgatattatagtgactgttattatgacgttactaatattaactattataataggctttacaattatagttgtaaacaggttacttggggcaaaatattatgtagatagtattgctaaaggtgatttttatactaaagttgatggtaaatatactaaaggtaatgatgaaataagtgaaatatgcctaagtgtaagtcaagctaaagaatcagtagggaaaatgatagaggcagtaagagaggattcaaatatagttagagaaggttctgtatcattaaatcaaattgcagaagaactatcaattcttacagaggaaatatcagcatccataggagaggtttctaataatactaataaacaaagtcatgactttgtacagataagcactaagcttgaaaactttggtgaagatataactgaagttaagaataatgttcattcaattaatgaagatattgcaataataaatgacaaagctttaaaagggactaaagacatagaagaattaaacggtggaattataagtgttaatgatagtttcgaaaagtttttaatcagcatagagtatatacaaggtgatatgaaaaatgttaatggaattacgaatattatcaatggaatatctgaacaaataaatcttctagcacttaatgcagctattgaagcagctagcgcaggtgatgcaggacgagggtttagcgtaatagcattagaagtgaaaaagctttcagacaaaagtaaggagtctgcacagaatatttataagataataaatagacttataaatataataaataaacttgtagaagagtctaaaaatatggagagtgagttgcatgagcagaaggaaatgatttataatgcatcaagttcattttcagaaatagcactgctagttaaagaaatagcgcctaaagtatctaatatagatagtgtgtttaataatattaatcacagcaaagatttaatagttgaaactgtatatgagttatcaggagaaataacagagacatcgaattccttggaacaagtaacgaattcctcagttcagcttgcacgacttgcagagaaagttaacagcagttctgatattttactagatagagcagatgatttgctgcaaaaagttaatcaatttaaaatcaaagaagaggatttgacaaaagataccgacatatctgaacaaaattcaaaagcaaataatccatatgaagaaaaatcatattctagtgggggcggagagttagacactaagaataagagtttagaaaaaacgaatttattaaataagtttgaagactcaagagatattaatcaatatgaaagaaatctagatcttgatttggaaaaagaattaaaggaattatcaatattaccggaggaagaaattaatttggaatttagtaattatgagacaagtgatctggatttatcactggcagaacactttgttgatttaagtgtatctccgctggaaaagttggaagtagatacatcaactaaagattttggatggggatgttcgaagataacagaaattaaagaatatattaagcaaaaagatgagggagaatgctcggaggatgatttaggaagatataatatatcatagtttcttatataaatatatctaaaaatttgtaataaatgtataaaatttaatattgatttaatatatttaatagatgtataatattggtatgcagatgtggcggaattggcagacgcactagacttaggatctagcgccttttggtgtaagggttcgactcccttcatctgcaccaataagcgggaatgactcaatggtagagtgtcaccttcccaaggtggacgttgcgggttcgagccccgttttccgctccagtaagaatataaagattaaattaaaataacaaatatctaaaacaaaaatttgttttagatatttgttattttaatttacacatggttactaagataaatttaattatataacataataagttaataattgtcttcaattaatttgtctaaagttaagttgacaatcatttcttcagagtaaaatttttcacccattattttaaatattacttctgattttttataaccttctttataaagctttaaatttcttgtaattcttttaagagtgtttcttggtatatttaattctaatgctagctccttaaaagaataataatctttttttagcatatcatataatttattttgaagatctaacttatatctataatcaacttctttggattggtggggaccatattttcctctatgatgggaaggacataaatatttataatttagttctatatcaaagccaccttcacttctgtgaacaatatgatgtatatcagcttcggcattacatatttcacataaagacaatttttaatcctccttagaatctaccctatataaaaatatattaattattaaaatttatttaaattaaaaaaataatagaattcttaatataataatatgataactgtaaataacttgacatttaat

SEQ ID NO: 54 - DNA, 39958 bp, Clostridium beijerinckii
agcaactatttctctccaatttatattttcattattattcatatagataaacctccattgttaaaatctatgctaattttaacaatggaggattgcattttctatccgttaatttttttacgcttacgtttaattaggagtttttaatattttatatgttctttttgcaaaaaaatatatggataaataattgtgaagtaacatacattattttacatagtgagttatttatgtaatcaatgttaaaacaaaggagaaaatgattacatgtagaataatagatactaataagagaaatcttgactcatagtggtcttgatataaaaggtacctaattatatataataggagggtggatgatcatggtaaatcaaaaggaaataaaaaaactagatgatattttaatttctaacaattatgacaagacacaaattattactattatgcaggaaattcagaaggaataccggtacctgccagaagaggcgttatgctatatagcaaaagaacttaagattagtgaagctaaagtatatggagtagcaacattttatgaaaatttctctttagaaccgaaaggaaaatacgtgattagaatttgtgatggaactgcctgtcacgtaaggaaatcagatcctattcttagtgagtttaagagtgaattaggactttcagagaaaaaacttacaaccgatgatatgcattttacagtagaaacagtatcgtgtctaggagcatgtggactagctccagtctgcactgtaaacgatgtagtatatccgtcaatgacaccagagaaagcaagaaagctagtgaagcagttaaaggaggagttgtcaaatgagaattaatacaagagaagagctgaatgatataagttcaaaatataaggctgctttagttagacaacgtaagcaaatattagtatgtgcaggtactggatgtgtagcaggtggatcactaaacatttatagaagatttaaggagataataaaagaaaagggattagaggttacattagaattaaaggaagaaccacatgacaacactataggtttgaaaaagagtggatgtcatggattttgtgaaatgggacctttaatacgaattgaaccagagggatggctatatataaaggtaagtatagatgattgcgaagaaattattgaaaaaagtattattgggaatgaagtagttactggtttaagttataaggatggagataagctttatagtaagcaagaagatattccgttttataaaaagcaaactcgtgtagccttaaataattgtggtcatattaatgcggagtctattgaagaatatttagcagaaggcggctatagtgctactacgaaggctctttttgacatgacttctgaagaaattattaatgaaatgtctgaggcgcatttaagagggcgcggaggcggaggatttcccacaggaaagaaatgggatcaggtattaaagcagacagaatcagaaaaatacattgtatgtaatggtgatgaaggtgatcctggagcatttatggatagaagcatgatggaaggaaatccacacggtgttattgaggggatgattattgcaggaattgcaacaaaagcacacaatggatatatatatgttcgtgcagaatatcctcttgcagtaaaaagattgcgcatagctattgaacaagctatggaaaaaggacttttgggtgataatatattaaattcaggttttgattttcatattcagattaatcagggagcaggagcatttgtatgtggggaaggtagtgcactgacagcttcgattgagggaaatcgaggtatgcctagagttaagcctccaagaactgtagaacaaggcttgtttggtaaaccaacagtactgaataatgtagaaacattttgtaatgtatccccaataattaacaaaggggtacattggtataaaactatgggaactgaaaataattatggaactaaagcatttgctcttacgggaaatgttaataatacaggattaatagaagttcctatggggacaacattgagaaagatcatatttgatattggaggaggagtaaaaggtggagaatttaaggcagtccaaattggtggaccgtctggaggttgtctatgccttcgtgaaaatcatcttgatttaactttggattttgattcgttaaagaaagtaggtgcaatgattgggagtggaggcctagtcgttatgaatgataaaaattgtatggttgaaatggcacgtttctttatgaattttactcaaaatgaatcctgcggtaaatgtataccatgtagagaaggtactagaagaatgttagaaatacttaatgatatagtagagggtaaagggaccttggatgatattgatacattagaagaattagcagagactatttctgatacggcgctttgtgggcttggaaagagcgcagcatttccagttagaagcacattaaggtattttagagatgaatatatagaacatgttgtagataagaagtgttcagggggtgtatgcaagtcactaatttcatatgagattgataaggagaaatgcagaggctgttcaaagtgtgctaagggatgtcctgtagaagctattacaggagaaataaagaaaccatatgtcattgataagtcaaaatgcattaaatgtggtaattgcattgaaggctgcgtatttaaggcgattagagtaatttaaatatttcttctataatattatctcttctcattatatatcatatgaaatttataaattacagaaaggatggtaagaaactatgtcaaaatatatggtgattgatggcaataggatagaatttgataaagaaaagaatatcttagatttagttagaaaagcaggaattgatttacctactctttgttactatacagatttatcagtttatggggcatgcagaatgtgtgtggtcgaggatgaaagaggtagcattttaacatcttgttctacgccaccaaaagatatgatgtcaattagaactaatacaccaaagcttcaaaagtatcgtaaggtaattttagaattgctacttgcaacacattgtagagactgcactatatgtgaaaagaatggaaaatgtaagctccaaaaattagcatcacgttttggtttaacaaatattagatttaaaagcattgagggaaaaaaagatttagatacatcatctaaatcaatcattagagatcctaataaatgcattttatgtggagattgtgttaggatgtgtaatgaaatacagagtgtaggagcaattgattttgctaatagaggttctaatatggtagtaagcccggcatttggaaaaagtcttgcagagacagattgtgtgaattgtggacaatgtgcaactgtatgtcctacaggagcaatagttgtcaaaagtgatattaaaaatgtttggaaagcaatatataaccataagcagagagttatagcacaagttgctcctgcagtgcgagttgctttaggtgaagaattcggtataaaacctggtgaaaatgttatggggaaaattgttgcggctatgagaaaattgggttttgaaaatatttatgatacttctttaagtgctgatttaacggtaattgaagaatcaaaagaattcttaaagaagttagagtctgatgataataaatttccattatttacttcttgttgtccagcatgggtaagatatgtagaaaataaatacactgaattattgccgtatgtatctagttgtaaatcaccaatggagatgtttggctctgttgttaaggcgtatttcaaagaaaaagattctttagagaatagagaaacaatatctgtagcagttatgccatgcacagctaaaaaagcagaggcggctagagaagaatttataagggataatattccggatgttgattatgtaattactacagcggaactatgtgcaatgataaaagaaattggaatacagtttgatgaaattgaggcagaagcatcagatataccactatctctttactcaggcgcaggagtaatatttggtgttacgggaggagtaacggaagctgttatccgtgaagttgttaaagataaatcttcaagagtattaaaggacatagaatttataggtgttcgaggtatgaaaggagtaaaaacatgtgaacttcaagttaaagatgaatccattagaatcggtattgttagtggacttagaaatgcagaagatttaattgaaaaaattaagagtggggaagaacattttgactttatagaagttatggcatgtcctggaggatgtatagctggtgcggggcaaccttttggattaatggaagagaaaaatgaaagggcaaagggactatataagatagataaggttacgcaaattaaaagaagcgaagaaaatctggtggttaaatctttatatgaaggattgctaaagaataggacgaaagaattactacatgttcattatgataaaagtgaacattaaaatatgaattcgcagaaggattaatagaaatatcaacgtatacttgtgaaatataattagggtatattgagattagttaggtattttggcaatcataaaattaaaagctatacatttttttcaaggatggaactgattctaacatagctgattttacttctgtactggaatcaaaaactgcttttccagttaaacgaatccattcacattcaggagaagtcgtggatatttcaaccttaggatttgcaactaactgttcaaaaacagatttagtgttatttgttgcaaaatataatttgtcattatatttcattactgcaccaaaaggtcgtactcttggttgatcaccatccatagttgcaatatagaaggtagggttgttaagtaaaaattctaatacttcattcatcttaattgctccttaaattttaatatgttataatctctttgaacataatataggttattaccgtgattttttcaagtaggattattttaaatacatagtatcataaatatactaaagggagtacatgatggaggaataatataatttatttggcaaatgtccgtttgtaacagcacaaaaaattattgcaggtaaatgggcaatagtaattttacataatttaagtacaaaaacacttcgttttggagaattgcaaagattattgcctgaactaaagcaagctacattaacaaaacagcttcgtagtttagaggagtatgggttggtaaatcgtaagatttttccccaggtaccgcccaaagttgagtattcattaactgagataggaaaagaatttaaattggtgttggatagcatatctatttggggagaaaaatatatcgatcatataaaatcggctgaagtttcagaaagttaaatataattatatattaggaatgttatgatttaatattttaaattataacattcctaatttttttgagtttagctatataccctgaaatatgcgtcttaaatatttagatcatattaaaggttgtaattttattaacattaatgtcaacctaaaacacaataactataaacctaattaaacaagtaaaaaaattaatattcatattaatttgactttttgtatattattagtaagtttaagtttagagaaaacttttttctaggctaacatatgtataataatttagacataactgttggcaagataaaaataccccaaatatagtaaaattggatggtgagaaatatggaaaagaattttcatactgcaagaggatatgaaaatataaatttgacaagaaaattgcttactccttcaatggaagattatttagaaatgatctatagatgcagcatggaagaaaaagtagttaggctaaacaaaatagcacaaatgctgaatgttcgcgattcatcagcatctagaatgatgaaaaagtttggagaattatctcttataaaatatgaaaggtacggagtaataattcttactgaggaaggaataaatataggtaagtatttgcttgaaaggcataatatagtaaagaagtttttggaatatttagagtgtaaacgggatattttagaagaaacagaattgattgagcatattattagcagcgaaactattaataatatagatatgctaaatatgttctttgctgagaacatagacgtgttagaaaggtatagaaattttaaaaagagaaataaagaatagtaaatataattttttgaggtcttataaagtatgagataatttgtaaataaatttatgtatattgagtattaggcattacctagtaagataatataggatgttttgtaaaagaatgaacttgtttaaaaataaatgggtaaataaagcatacattatttattctatacatttgtataatgataacggggtgagacgttattatggaaatgcagaaaaataaacacaaaaaacttttaataggcattatagtttcatgttttactttacttgccatatatttggggctggcaatctattttatgaaccacttttatttcggttctacggttaattgtattaatgtttcgggtaagactgtacacgaagtagatgaagaaatgccaaacgaaataacaaattatactttgaaattaaaggaaagaggaaataatgaagaacaagttaaaggaaatgagataaatcttaagtataatccagatggaaaagttcaggaactaaaagataagcaaaatccatttaattggcttatgtcattattgggaaccaatgattctacgataacaaatgtagttacttatgatgatgagttactaaaaaaaagcattgataatctttcatgttttaatagtaataacgtaaatgaaccacaaaaccctagttttgaatatacagatgatggatataaaattactgatgaggtatatggtaataaaattgataagatggcgctacatgatagtattgtgaatgcaattcttaatgggaaaacaacattagatttggattcgaaggattgttatgaaaagcctcaatatacttcaaaatctcaggaggttattaatactaaagatacccttaataaatatgtatcctctaaaataacatataattttggtgataagaccgaagtaatagatggatctataataaacaaatggattaacgtaaataatagtttagaaattacacttgatgaaccaaaaatcaaagaatatctaaacagcatattgaataattacaatacagttggtaagacaagaaattttgttacatcgctaggtgccactgtgcaagttagcggaggagattacggttggttaattaataataatgatgaggaaaaagaattaatttcaagtataaaagagggacaatctgtaagaaaagagcctaaatatacacaatcagcaatgtctcctgggagtaatgacattggtaatacttatgtagaagtaaatatgagcaagcagcacgtatggttttataagaatggttctttaatagtagagggagatgtggttacaggaaatgtaggcaataatacgtcaacacctactggggtatattcattaaaatacaagcaaagagatgctactttaaaaggtcagggatatagcagcccagttaatttttggatgccctttaatggaggaataggcattcatgatgcaagttggagatcagtatttggaggaagaatttatttgacaaatggttctcatggatgcgtaaattctccatattatctagctaatactatatttaataatattaatgagggaacgcctgtggtttgttattattaaatttctataaaatcatcaatttagaacttaatagactaagattaaaaatgagactagcttttagctggtcttttgcagctgctagaataatatatttaactatagtgattttgtttaaaggagtggctttatttgcctagagaaataaattttattcaaccagataatccaactgatgaagaaaggcatgaaatgttaaggataactttagagcaagcgaatcgtattgaagattttaataatatagttgaattattaagtccaccgcaagatattacaacaattttaccgcctggaagttgctcaggcattaaggttgggataataggaggaggtattgcaggtttagcctcagcctttgaacttagaaaactaggttttgatattactatttttgaaacagaagagaagcgaattggaggtcgggtctatacctattattttgatgaggagaaaagactttatggtgaatttggtgctatgcgtacaccagtaggtcatgaaacaacatggcattatattaatacttttggtataaaaacaaggccatttattcaaaataataaaaatgcattattttatataagacataaacgtgcgaggaatgatcctcaaggtaaaagtgtaatggaaaatatatacccggaatttaacttgactgagagggaacgaaatactccatggcagaaaataattggagatgcattgtcaagtaatttattaaaaatacctccctccataagaaaggaattattagaggtaaaagaaaattattcagatataattaaatatgttggtagtcttggaataagggaagtacttgaaaagatgggtgtaagtgaaggagcaatagagctgatttctggagttgcaccttttctaggttcattttattataatagttattctgaaaatttaattgaggaatatactgtagattatgcatataggtacgaaattgttggtggagcagtaaatctaccactagctttttatgattcgttaatgtctaaaaaaccaaaagaatataataatattagagatgaagaattgggaaaagtatcttgggaaagtggaaagacagtaaaaagcatatataaaattaatgatatagaggataaagtagtgttagaatatgcggatgagaagttatctaagctttatagtcaaactttcgatttcgttgtttgtgcaatacctttttcaagccttagagatgtgaatgtatttcctatgtttagcaatgaaaaaatgcagtcaataagagaagttttttatacatcatctcaaaaaactctttttatgtgtaatgaacgtttttgggaaaaaggaaatgataatgagaagatagttggcggaggatctaatactgatttgccaattcaaaccatatggtatcctagtcatagtattagtactagttatggtggagtaacaaaaaataagatgaatgtttctgttggaagaaaaagaagtgctaaggataatcaaggagttctgatagcgtcatataatttagggttagacggaatacgcgtaggaagcttagatgataatgcacgatttgaattgattaaaaggcaagttgaggatgtccagggtcttccacgaggatatcttgattatatagttgaagatcataaaactgttgactgggatagggaaaaaggattttatggagcattttgctactttatgcctcagcagcaaaaacttttttctaatgcgatggtaaaaccagaatataataatagagtatattttgcaggagaacatgtttctttgacgcatggatggatagaaggttctgtaagtactgcaatgaaagctgcaaataaattagcagagtactgtaaaagtatgtgagagtgagctacctttaaatagaaatgcattttctatttatggtggctttttttggtgaaaaattatatattaataatttagattttttagtataatagtagcgaagggagtagatataatgagaaaaagaagaaataaaagtagtaacaaggttatgccaggggttataatttctctctgtactttgggtgctatatatttaggtatgtcattatattctattaatcattttcactttggaaccgtaattgatggggttaatgttggcgggcagaccgttgagggagcagaagaaaagctagctgcccaaatgcaatcatatgcattggaattagacgaaagaggagatgtaaaagaacaaattaaagctagtgatattggattaaaatataattctgataaaatcaaagaattaaagaagaatcaaagttcatttgcttggcctagtacattttttaagaaaaataattctgaagcatcccagataattatgtatgatgaagaacaactaaaccaaacactaaataagctttcttgtgttagtaacaagaagataacccaaccacaaaatgctagcttaaattataaagatggagaatacgagatagtagatgaagttttaggaaataagataaataaagatgctttacatgataatgtagctaatgcgatccttgatgggaaaacatcaatagatttagattcaagcaattgttatgaaaatcctaaatacacttcaaagtcagatgaagtaactgcagcaagagatacacttaataaatacataggattaaaaattacgtatgattcaaatggcaaaaaagaagttttggatggatctactatacataactggcttggagtagatgacaatatgcaagttacaatcaatgaagataaagttcggaattatgtatataaaatatctagcatttataatacttttggtagcacaagagattttgttacaacaacaaaaaaaacagtacaagtgagtggcggtaattatggatggattgttgataactctaaagaggtaaaagatttaatagaaattataaaaaatggacaagatgtaacaaaagaaccaaaatatgcacaaaatgcatttgtaaaaggaactaatgatataggaaatacttatgtggaagttaatcttactaagcagcatgtatggttttacaaaaatggagctctagttgttgatgatgatgttgttacaggaaatgtaagcaataatacaggtacaccagcagggacatatgttctaaattataaagagaaaaatgcaacattaaagggcgaagattatagttcaccagttgattattggatgccttttaatggaaatatcggtattcatgatgctagttggagaaatggtgtgtttggtaaacagatatatttaacaagcggttcacatggatgcgtaaattcaccttataatttagcgaaaacaatatttgaaaacattgaaccaggaactccaattgtagtatatactgaataatgtattatttaatttatatttgttaataaaattgtaatactattgaaatagtataaataagtaaagttatgctaatataaaagcaggtttatagattaaaaaatcttgaacctgcttttaatttttatattagagaaggtgtatattatggatataaaaattcttatagctgaagatgacaatatatttcgcaatttagtatgcgatatagtgagaaaagaagggtacatgccaatagaagcatgtgatggggaagaagctattaatatgttttttaataataatgacattgatttggtcatattagatgtaatgatgcctgtgtatgacgggtgggaggttcttaaagaaataagagaaaaatctgaagtgccaataattatgttgacagcactaggagatgaaaaacacgaagtgctagggcttaaaaaaggtgcggatgattacattggaaaaccgtttagttatgagatattcgttgcacgcttaaacaacattgtaaagaaagttaagaagaaattctcagacgaaatagctgtaggaaacttaaggatatatcaaagaaatcataaagtagtgatcgatgatgaagaaattaaattaaatcctaaagaatataatcttttactatatttaattggaaatgctaatacagttttaagcagagagcagatattggataaggtatggggatataattttgatggtgatataagaactatagatacgcatataaaaaccttaagggctaaacttttagaacaaggagattgcataaaaactataagaggaagtggatacatgtttgaggtagaaaaatatgaaaacaattaagacaaaattattctgtatatttatgattctcatgatttcactaattttaggtgggataattttgaattcagttttcctagaatcatattatatttataaaaataaaggagtcttagtgtcagtaagtcagaagattaaggatgaatatatggaagcagaaaaagataattatcaatatgcagacacaatacaaagtattgataacattaatacaataattgttgataaaaattatgatataaaatacaattctattcatccaaaatcaaatgatgaagaaaaacgtctatccaaggagattaaacaaactattatggaaaatgaaaaaagactttctaaaaagtatgtttactatattgatgagaaaaataatgatcaaaggacaaaattagtatttgtttcacaaattgagaatggagattttattattctaaagaagtcttttaagagtattcatgagagcgtagtaattgcaaatcaattttatatattggcaggatttatagtaatgcttattggtgctatatttattattattttctctaataaaataacaaagccaattatagaaatgagtaaaattgctgaaaatatatctaatcttaaatttgacaaggttgttaatatagattcgaaagatgaaataggaagactaggaaatagtataaataagatttctgacaagcttaacaaaagtatagatgagcttaaacaagatgtggaacgtaagaaagaacttgtaaggaatatgtctcacgaattaaagacaccaattggtataattaaagggtatgcggaagggctcaaatttggagtggccaatgatagggaaacaatggataaatattgttctatattagtcgaagaatgcgatagaatggatagcttggttaaagaacttttacattattctatgatggaaggtggaatgattaaattaaatattgtatcatttaatgttaatgaatttctaggcaaaattgtagaacgatttaaaccagcaattgatgaaaaaaatattacgtttaccttggagtgtgtgaatgattgtgagatacatgctgatagagacttgcttgagaaggctataaataatttcattacgaatgccatcgaccatgtgaagggcagaagaattattaatataataggcaagaaagaagaaaataaaataaagataggtgttttcaatactggtgatactatatgtgaggaagaaatggataaactttgggatgtatgctataaagtggacagatcgagaacgagaaagtatggaggtcatgggataggcttgtcattagtgagattgattgcacaacttcatgggggaattactaaagtgaaaaatgtggaagaaggggtgactttctatttggaaatacctgaatagattattgaatataaatttatctaaaatataagagaatattaaagtcatgcaaaatatatatgcatgacttttttgatataaaatatatttatatttaaaatacatgaaaaagagcaaggaatttttgcaaaaggtgtatacgatttcgaaaaaaatgtataaattcatggaataatattcttgataacaaggacaatctgctgtataatacatactgttagtatgcgaacaatatgcataaaaataattcgtacatggagggttaatatgaaaaagactatgttagtttgtttagttgtagcactaatgttaagtggttgcggttcgactaataacggaaatacaagcaataattcaaaaactgctgaaactactgcagagcaagctaaaaataaatacataatggctggaaaaatagaagcaaatgatcaagcaaatatagcctcaaaaatttcagcaagagtttcagaagtactagttgatgttgggtcaaaagtaaatgcaggggatactatagttaagttagatactcaagacttgcaagcacaagtgaatcaagcacaggcagcggttgatactgcaaatgcgacgttaactaacgctatgaattctacacgtccagaacaaatatctcaagctcaagcaactttagatagtgcaaatgaagcttatgatgttgctaagaaaaactatgatcgtactaaagctttagttgatgcgggagcaaatactcagcagcaacttgaagctgcacatcaacagcttacaactgcagagtcacaacagaaatctgcacaagagcaattgaatatgcttaataatggagcaacacaaacaagtatagatgtttataaagctcaagtggcacaagcagaagctgctttaaaaactgcacaaacaacattaaataatggaactcttacagcgccgatttcgggtgtagtaaatgctaaaagtattaatgtaggtgagatggcatctccaggtgcaactcttgtttcaatatctaatccggatgctttagtggtaaatgcatatgcacctttagatattgcaggtcagcttcaagaaggacaagatgtggtagttaaagtatcagaagtagataatgttgaatttgacggaaagataactgtaataaattcaaaactaaattcgcaaagtagaaatattttggttaaagttagtttagcagacccaaattcacaattaaagcctggcatgtttgctgaaattggattaaaggaataagggaagaggtgacttgaatatgaaaggaaagcgtaaaatattaattattggaatattgttggtaattgtggtagcattaggtagtataggattctactattggtatgaaaatgcatactatgtttcaactgaagatgcaagagttaatgcagattttgttagtgtaactccacaaatttctggtaaactactagagcttaatgttgatgaaggagataaagtaacaaaaaatgaaatactagcgcgtcaagaaatgaataatcttccagacacaagtgtagaacaatctttagtaagagcacctattgatggaatcatagtaaagaagcagggaactgttggagaacttttatcaacaggtcaaactttaattacgttagtagatccaactaagctttatatttctgctaacatagaagaaacaaaacttgaaaaagtaaaagttggacaaccagttgatattactattgatgaatatgattcacaaaaatttagtggaaaagtaaaaacaataggtgaaatatctaattctgctatatcactattaccatcatcaacaagcggaacctttactaaagtagttcaaagagtaccaataaaaattgaacttgataattttgatgataagattcttccaggaactaatgcagttattaagattcatattaaatgatgaggtgatataatgggagagaataataacgaatcattagcaagtagttggttagcgttagctgtagttattataggtactttcatgtctatacttgatagtagtatagtaaatattgctcttcctaaaatgatggctgtttttggagtatctttagatgatataaagtgggtgttaacagcttatacattggcgcttggtgccattataccacttactggatatttacaagaaattttaggagctaaaagaatatatgtatttgctttagcgatgtttacagttggatctatgttatgtggtctttcttggagcaatacaagtatgatagcatttcgtgtcctccaagccattggaggaggaatgataatgcctgtaggaatgtcaataatatatcaaatatttcctagagaaaagattggattagcacttggattttgggggatagctgcgatggcagcacctgcaataggacctactttgggtggatatattattgagaagatggactggagacttattttcaatgttaatgttccagtagggatagtaggagtaatattggccttgattttattaaaggggacagaaaggaaaccttttaaatcctttgatataattggattcttatcttctactgtaggactagtaagtatactatatgttctaggtgaaggctcatcaattgattggtcaaaacttgagaatccaattttgatgacccttggatgtttaagtcttgtattatttatagtaaatgaattaactcatccggatccattattagatttaagagtttttaaattatttgattttacaattagccaaattataactagtgtattaactctagctatgatgggcggtgtctacgtattaccattatttttacagaatataagaggatatacacctatggaagccggattaataatgttgccgggagctctggtaatgggatttatgatgcctcttagcggtaatttattaaataaagttggcgtaaaagcactggttatacctggacttttaatacttgcaggcgcttcatatgaacttgcaacagctataaatatgaattcgagtaaagactatatcatacttgttaattgtataaggtccattggaataggattaagtatgatgccgattagtactaccgggatgaacgttgttccaacacatttaattagtagagcatcagcactttcaaataccttaagacaggtagcaggttcagttagtgttactttaatgtctactcttatacaaggaagaaatgattataattatgcaaagttatcagaacaaattaatgtatataatccaacttctaatagcacaataagtacattaactaaagcatttatgggaatgggaatggatacaaatactgctagagcttctgcagtatcttatatagtgaaaataattcaaggtcaagcgtatgtagatgctatgtcatattcagttgtaataactgttgttatagtattcgtcactatattcttagctttatttatgggtggaaagaaagagcctaaaaaagaaaataaagaaggtgaaaaaaatgaatctacaggaggggccctcatcgccgaataatgaattatatcaaaaacaagcggatgagattattggtgtatttaggaatattagaagagaattaagctgtaagtttgaaaaaattgcaaaagattgcggatttacagcacctcaattaaatgttatatttcatttatacatgatgccgtcgataactctaaatgaattaagtgatcagataggattaactaaaagtacagtttcaggaatagtagatcgtcttgcaaaacagggagttgttacaagagaaataccaaaggaaaatcgtagaattgtaagattgtcaatttcagcggaatttaggaaaaacaatgatatttgcaaaatgaaaaaagagtttatatcaaatcttatactaaattctataaaaaatacagacccggaagaagtagaaaaaataatttatggattaaaacaattcagtatattactgaataataattagaaaattgtaaagcactttattcatatagaactattttaggatagtttttatgagtgaagtgttttttttaaaagaaattcataaaaggccaaagtaagactgattttctaattcttttatttggattggaatctttttaagtttaatgtccagatgaactgtaatggggcaggtgagaaatgggaaatatgacgttcaatgtagtagccgaaatcttgttatttttattaaaaaaaagaagcaatatatgtgttaatttaataaagttaaagtgaaattatttgtatattttaattgagttagtaatataattaaatgaaggctaattttgtcgaagatgtatacaaaggtaaaagtatattatattattttaatataaaaattaaaataatataagtgggagagaaaagtttatgtctgaaaaaaacaacaaaaaaattgtttggtataccttagcatttatggctttttcaacagtttggggttttggtaacgttatcaatggtttctctgaatataatggacttaagtcagtagtatcttggatcctgatttttgctatttattttgtaccatacgcactaatggtaggagagttaggatcagcgtttaaagaatttggtggtggtgtcagttcatggataaatgaaacaataagtcctagagttgcctattatgcaggatggacatattggattgttcatatgccttatatttcacaaaaaccatcaaactttatgatagcaacaagttgggctatatttcaagataaaagaattagcagtatggatacaaagttactacaaataacatgtttagtaatttttttggttggactttatatagcttccaaaggattaaatccgttaaaaaaattagctacacttgcaggaacatcgatgtttgtaatgtcaattttgtttattgttttaatggtagctgcacctgctattactaatgcgcatttaaattctatagattggtctataaaaacgtttatgcccgcatttgatatgaagttttttacaggtctatctatattaatttttgcggttggcggttgtgaaaagatttcgccatatgtaaacgaaatggatgatcctgaaaagggattctcaaagggtatgattgcattagctgttatggtagctgtatgtgcaattttaggaacaatttctcttggaatgatgtttgattcaaataatgttcctaaagacttaatgacaaatggagcatactatgccttccagaagctaggggaatactatcatctaggtaatttatttgttgtcgtttatgctattactaacatgattggacagtttgcggtattaattatatctattgatgcacctttacgtatgttacttgatagtgcggataagaattttattcctgaaaaaatgtttgtaaaaaataaatatggcacatataaaaatggtcataaattaattttaataattgtttcaattttaataatagttccagcctttggtattgggaacgtagacgagctagtgaaatggctagtaaaattaaatgctgtgtgtatgccacttcgttatttatgggtatttgctgcttatattgcattgaaaaaagcaggagaaaaattcaagccagaatatcaatttgtaaaaaacagaactgttggtattataattggagcatggtgttttgcatttactgcttttgcatgtattagtggtatgtatacagctgataaatttcaattagttcttaatattataactccttttgtattacttgggctaggatttataatgccgtattttgcacgaaagaacaataattaattatacaataaaatatttggctctaagtgttataacttagggctgttttttattgtacaaaaaactatgaatttattaaatgctaaatggcttattatataaggatttagtgatataattgcgtatacatcggggattatgagattataaaaataaacggaagtggagggcggcgtagctagcttttataaatgaataataattaatcagaatctttgaaaagttttaatactaaagcagtgtagattatagtagatagagaatttaaatactttataaataattatggaaagcgtataggattttaaagaggaaaattggtgcattaaaaatatatttaaaaggtcttttaaattgttgtatttttaagtattataataagtgaatgctaacattttaattgtcctccatattatttatcatgcttaacagcgggtgtataacttgggggataaaacttattttttaaaataataaagcgagttaagttggcagggttagaaaatacttttgaaagaacttttaagctgcaagatagtagcagttggaggaaatatgtcagatattagagaattgagtttcaatgatacaaatagttcaacaaaatcactaggggagcaaacttcagaaagaattgttcgattgattatagatagtgattggaaatctggagataagctacctaatgaatatgatcttgcaagtagccttaatgtaggaagaagcactataagagaagctataaaggctttggtttcacggaatgttttagaaattagacgtggagctggaacttttatttctgataaatgtggaattgctgatgatcccctaggattaacgtttgtaaaagataaatataaattagcgcttgatttattggaagtaagatttatgatagaaccatcaatagcatctatagctgctacaaaagctactgatgaagaaatcgaacaaatgtctaacttgtgtgacgaaatagagagtcttatcttaaaagatgaaccatatttagagaaagatatagagtttcatactgcaatagctaagagcagtaagaatttggttgtggttaatttgattccaataattaatagatctattactatatttatcgatattacaaatagaaaattacgtaatgaaacaatagagacacacagggaaattttaaattcgattaaggaacataatgctaatggagcgcatgatgcgatgctcttacacttagtatataatcgaaggaatatcgcaagtattataggcaaggaaagaaattattaattgttttgactttatgaaatacgtctgctcttattttggagagcgatgtatttttttgttattattttaaatacatcagatgaatatgcacgttttttattgatttttatgaaatgataataattaaaacaatgaattcaaaaaaaattgacaaatacatcagatgtgatatcataaatacatcagatgtatttaaacggtgtcaaataaagattaaggagagaaatagtatgattagtcaagaagtaagaaaaattgctccagagatggatccacttcgaagaggaatgggatggacaacagaagatttgtcaaagccacaaattatagtagaaagtacatttggagatagtcatccaggaagtgctcatctattgaaatttgctaacagagcagttgagggaattacacaatcaggtgggaaaggtgctagatactttgcaacagatatttgtgatggaatgtcacaagggcatgatggaataaattactccttagcgtctagagatacattaacgtctttaatagaaatccatgctaatgcaacaccattcgatggaggcgtatttatttcaagttgtgataaagcagttccatcacatcttatgtcaatcggaaggctaaacataccagctattatggttactggaggagtaatggaagcaggtcctgatttattgacactagaacaaataggtgcctatagtgcaatgtgccaaagaggggaaatttcagaagaaaaattaactttttataaagaaaacgcatgcccatcttgtggagcttgttcattcatgggaacagcagctacaatgcaagttatggcagaagcacttggattaatgcttccaggtagctcattgatgccagcaacatgtgaagatttagaagaagtagcgttaaaagcaggaagacaagctgttgaactagctaaaatgaatcttcgtccaaaagatattgttacaattaaatcctttgaaaatgctatattagttcatgcagctatatcggggtctactaactcactgttgcatttacctgctatagctcatgaatttggattgtatatcgatgaagagacttttgatagaatacacaaagatgcacattatttactaaacatacgtcctgctggaaaatggcctgcgcaatatttctattatgcaggtggtgtaccagcaataatggaagagctaaagcacttgcttcatttggatgttatgactgtaactgggaagactttaggtgaaaacttagaagaattaaaaactaacggatattatgagaagtgtaatgagtatcttgaaaaagtaggactaaaaaaagaagatgttattcgtccattcaataatgctattggtactaatggttctgtatcgatattaaagggaaatatagcgccagaaggtgctgtagtaaaacattctgcagttcctaaagaaatgcatgaggctatactaaaagcaaaaccttttgatagtgaagaggaagctattgatgcagtcttaagaaaaataattcgtccaggggatgcggttattataagatatgaaggaccaaaaggtagcggaatgccagaaatgttctatacaacagaagcaattgcttcggatgaagaattatctgctagtatagcgttaataacagatggtagattctcaggagcttctaaaggaccggcaattggacacgtatcaccagaggccgcagtaggaggaccgattgcattaattgaagaagatgatttgattgaaattagtattcctaatagagtattacagatcgttggtataaagggaaaaaaatgcagtaaagaagaagtagagaaagtttttgaagaacgtagaaagaattggaaaccacgaaaatcaaaatacgaatctggaattctaaagattttttcagaacatgcagtatcaccaatgaaaggtggatatatgaaatagattaaaaacaatggaaagataaactgtttattatgtagtatacagattaaaatatttccataataagtgataattttatgatttctattataaattattaaaagggaaagaatggttcatgtgttagtgaattgttctttccctttattacgctagatttaaaagagatattatgtaacacaaggatgtaatgccttttggagtagaaagctgaaaaaataatcagattcctatatagaatttttaaatatacaaatataatgttttagtaatgatgtgtatgaacgtatattagcactaaaaaatatatacctcaataatagtaaatagaattctaaagtgatataattttgaaaaagaactatgttcaaatgatatgttatagcaatttaggaggaaatctattatggagaaaagactctatctatcagcaacagataaaaagttagcaggggtatgcggtgggatagctgaatactttggacttgattcaacattagtcagaattgggtgggcaattttgattgtttgtgcgggatcgggattactcttatatataatttgtgcattaattataccaaagcaaccgctattataagcataagaaaaattaaaatttaaggaagtatactagtgagcaagtttaatataatattaactatctaacttgggaggaaacaaatggataaagtaaatagcttgataaaaaatacgccaatacatttaacaacaaatactatagttttaataatagttgctattattgctctttatatattaattaaagcaatagcaggtatcataagaatagcagctcttataggtgtgtgctggtttatattgatgtctattcaaagtacaaaccttattaatataccaattataagagaagcgtatacaacggtagaaaaaataattccttcaaaggaattatggacagaagctttggataagacagataagataaacaaagtagttaatgatttaaaataataaatgttttttattttccacctagggaaagctaatttcaagatataaaaattgatattttaaaaaattgaaaatacttttgaggagtgaaatgaatgaagacgtcaactcatagaatagctattccttctattttagaggtaggaaaaggaaatataaataatgtaggcaacttgattaagaaagccatgtttaaaagtgttttaatatgctttggcgagggtctagaagaattgtttggagattctatatgcaactctttaaaagaagctaatatagatatttcaagaatagaaacaatatcagatgtaaatttcgaaaagattagtgtaaaagcttttgaaatatcaaacgacgtagaagctttaattggagtaggtggaggaaaggctatagatgctgttaagtacatgagctttttgagaaaattaccgtttattagtattccaacttcaacttctaatgatggtttttcaagtgcaggtgcatctcttttagttaatggcaagaggatgtctctgccagctaaaactccttatggaataattgtagatattgatgttattaagagtgcaccagaaaaatttatatattcggggataggagatttagtatcaaatatcactgcgttgtatgattggaaatttgaagaagaaaatggaaggataattattgatgattttgctactatgatttctaagaaagcagtcaatagttttataagaactgagtttaaaaatattaaagatgatttgtttctgaaggaattagtggattcattaatattgaatggtatttctatggaaatagcaggtgatagctcgccggcctctggttcagagcatctaatatctcatgcattagataaatttttagaaatgcctcagcttcatggaatacaggttggaattgcaacatatattatggcgaaagtacaatatcatagatttgaaagaatatcgaagatattaaaagaaacaaactttttcgagcatgcaaaaactttaaaaatgaaaaagaaagattataaaaaagctattgatattgctccatcaataaaacctaatagatatacgtatattcatgtagatgaaaatagaattcttgctaaaaaaattatagatgaggatgaaattctgaactacatattaatataattttttcagaagaagatggaaataaagaaataaaataaagattggatgcatgaaaaaagtgatgaagaagctatcataaaagctgaataaaaaagtgttcacaggtaatactagatttagagttagtatgagtcgaaagaggaggaactttaatggaaaaattaagaaaaggtgaacatgaaaaagccatggaaaaagcaaaagagatgcttgataaaggttgcggaatgggagatatagtggaggaaacaaaattaagcgaagaaaacgtaatgaaggcaaagagaaaatgggaagatagatcgtaatatttgtttttacataaaattaatagaaaagtatagtttattttataactactaattaggttgctagataagtgcttagttggtagttttatatttttataatttaatataataaaatttgttcaagataaaaaatatatttattagtatttctaaagcaacatagaccgagagctatagttattaaataaaagatacaataataaataaaattgtgaataaatattcgattattatgaatatagtgtataatattattataataatatagaagttggggaagaaatatgaataatattacatatgaatttataaattataaaagtaaagagtttaaagaagtatctgaattaaggtttaaaatactttttaaaccatataataaaattcataaatacgactatgatgaattagattatagcagtatacatttggtaggattagataagggggctgttgttgcatattcaagaatgaccaattataatatgaatagtaaaatgacaaatatagttgttagtgaaaaatatgtgggtaaaggcattggcattgaaatgttaaaaagacataaaattaaggctaaagagtttggagttatatgtttatatttgaatgcaagattagatacaattaatttttataaaaaggcaggattccagtgcaaaggaaatatatttatatcagaaaaaagtggattagcattacagcctatgtattttaaaataaactaatatataataaaattattataatgggatcaaaacttattatcatacaaattcagagttgataaattatataattttaggcaataatcttagtaagattattgccattatttttgcacataaaatatttaaatatcatcctaacaactttttcgtacatgtcttgatttttttatgtctaaataagaatcaccgggaatattctgaatgaatttaagaaatttaactatctttatatctttctttaatgattcaagacttcgatagtgtgttgctaattcacgattcgtgaaaagagcatgaatttgtctatgacaggttgaacataaagagagtgttttaaatttttctccgcctttttctaagggaattaagtgatgtttagtaatgctagaaacatttctattgcataattcacatatatggttttgtgccataaaatcctcctcttatatattagctttacaatttgattatatcaaaataatgagtaaaagcaaaaaagattaaagtaatatcattattattttagtaacaattattccgtaaaattacaaaaatatagaagtccattttagtaagattaacttgtatatttaaatttattagttttcatgaagtagaattgagatatttatagaattactgtttcaaaatacaaatcaaagatttgaaatttgtaataattttgagttaaattaggaaaactttaatcatactaaatcagaatttcttaatatatattaaaatcataaagctatatttataattattataagtcaagtgattaattaaggctaatatgtggaaattaaattgaaatacaggtgtaataacaaagttaaaaataattcattaaaagaagaaatcagtgataattatatatgtattcgtattcatgaggcaaattctacatttttcttcaatatatgcaataattagaatattgcttttgatttcattattacatacaatatttttcgtatgataatatagggggaaaataaatgcttacaaagtttttagatgttttattaggagaacctttatcaaatgaacaaggatgtaatgaaaagtataatattccttttggattagcaattatggcaagtgatgcaatatcatctgttgcctatgctgctcaggagattctttttgttttaatagttctaggtgtagcagcatatcagtggttaacatggacctcttttatgattataggattattaataatattaacaatttcttatattcagattattagggcttatcctcaaggtgggggagcttacaaagtagccaatgaaaatataggaaaaaaatctggcttagcagctggtgcaggtttaataattagttatatacttactgtcgcagttagcgccagtgcaggtgcagatgctattatttctgcatttagcaatttgacagaatataaagttatgtttgttttaataataattatagttttgactgttttaaatttaagaggtataagtgaatcttcaaaaatttttgctatacctacgtatatttttatttttagcatggcttttatgatactttatggtttgtttaagtactttatattaaatattcatccagaaccaatgtattctatcccagcaaatactacagaaaatgtatcgatatttcttattttaagagctttttcatcaggatgttctgccttaactggagtagaggcagtaagtaattccgttccgaattttcaggaaccgagccaaaaaagtgcaaagactgttatgatattattagcagctttaatatttttcatatttggaggaacttcggtacttgctatattctatacagctgtaccaatagcaaatggtcctacagttgtttcacaaatagcatttgctatttttgggaatggcataatgtactatataattcaatttagcactgctgtaattttacttatggcatgcaatacagcatatacaggatttccaatgctaatgtatatagttgggaaggatggttttgcaccacgacaattcactattagaggtaaacgacttagtttttcttttggaatcgttgcattatcatgtatagcttgtatcttagttattatatttaaggcagacactcataggttgattccactatatgctataggcgtatttatatcttttactctagggcaatttggaatggtgaatcattggagaaaagaaaaaggtaatggttgggtgaaacgtgcaataatcaacggtattggttctgttgttactttattaacaacgataataattttaattgaaaaatttagtgaaggtgcatttatagttgcaattttaattccaatcataattgtaattcagctaagaataaaaaaacactatgataaagtggcttgtggtttaagtattagtcaattaaatctgaaaaaggtgaatttaagaaagaaatatactcatattgtgatagttccaattgctagcttaaataaagcaacaataggtgcgttgcaatatgctcaaagtgtaagcgataatgttattgctcttaatatttcaccagacaaggaagctatggaaaaattaaaatctagatggagtgagttagatacagatatattacttgtcgcaaaatattctccatatagagctgtggttactcctttattaaagaatatagaattgattgcaaattcaacagctaaagatgagaagataacagtaatagtgcctcaatttgttactaatgaaagatttggtgaggttttacataatcatacaagtttctttattagagaaaccttattgaagaatgataacataattgtatctacttatccttatcatctgttagatgaggatgtaaagcaaagtaagtaattatagatttaggatataaaaacgtgctatattgtttgattcagcaatatagcatgtttcttaattccattattatcttcttactttagttccaaataattgatcccacatatttaaagcgtccatgaatttagttgtgtctaattgcgtcgaatttggaagtgtattaatagaatcttcataagattgtcttatagctggttttattttatcttgactttcttttggagccatatcaagtgaaacattttttacagaaggtccaggataaaaataaccgctatcgtatgttattgcctgcatctttggcgtcataagccatgccattagttttaaaactacatttttttgttcatcgctaagtccttttggaattgccatatactgagcatctgcaaccaatgtagtattgtttaatacaaatccttgataagtttgtggaataccacctatgattctctgattcatatcccatcctaactgacttgctataatagatctttttccggcttttaattctgtgaatgtagtaccagttttagcaggataataatctatgtattgattcaattctttaagataagcccaagtcttgtcccaagttttaggatctttgggatccttatctccaagaatatatggtaacccttgaagaaaaattctgcctggtcctgaacccgcgggtcttgcatatgtgaacttttcaggattagctttagcgaaagccaaaagctcatcaggcgttttaggtatattttgtacggtatctgggttataagtaaagaatgggccgctaggtgaatacacataagttatcgcataaccctttactaaatcataagtggctttagcaccagaactataattactttctaaatcaggaaatctgctgccatatgtaggcataatattttctataacatctctatcaatacatgtggaaagaccatcaattccagtaaaaatcaaatttgttttcatatcttcagataaaatttgagcttttaataaagatggaacctctaatgcagtagatttttttactacgacatctcctattaaatcagggtttgcagctttaaattgatctatggaatctccgactaattgcatgcttcctgaaacatctattatatttaaagtaataggctgagttgatttggaaacattctttgaaccgcagcctgttaatatagtcgtcatcaaaactattacaagcgtaacatttagaaatttaaaatttttcataattatcctccattttaatttagatataattctctctagtttaaaattgcaaaatatatcttaagttatatataacaacaattataatttaaatttacttacttcgttcatcatagaggttgttaaatttgataaagtttgagctgaagttgctacatcattaaaagatgaatttatttgttgtactgaggctgctatttcttcagatgaagctgcattttcttctgatactccagaaatatctaacgtttttgagattatgagatctttttcaatatttatattttcaatagatttatttatattatcaactctaggcaatatagtatttatagccttaaatattaaagcaaaagattttatagaatcttcaataaggactgattgattatttaagctatctttacctaaatcagtagtcttaaccgctatttgggcttcgttattaatattagtaatcaagccacttatattactggcagatactttagattgttccgcgagttttctgatttcctctgcaactacagagaatccacgccccacttcccctgcgcgagcagactcaattgcagcatttaatgctaataaatcagtttgatcagcaattgaatttataatagtagttatgttatttacttgttcaacatgattatctaattgaacaactttatttcttacagtatcaaaagattcgtttacatctttaatagaattaaataaaaattctaacttagagttactatcttcggccattgaactaatattatgtatatttgagtttacatcattaattgatgaggttatttgatctagtgaatcagcaaaactatccaatgaagtttttacattcattaggtcactagattgttcagtggcagcattagctacttcttgaacagcagcattaatttcctgtgcagaagaagacatttcgtctgaagctcctaataaattagttgcttgtatatttacaacatttgctgaattttgcacttcttcgagcattgaggagatgtttgaaattgttactttgagtgattttttcattctgccaaattcgttttttaaattagtgtttatttcgaaactaaagtcacccgcagcaacattatccaaatcggacattatttcttttatagactttcttataaccaagattatagaagaggaaacaagtatctgaagaataaaaccaatgaagaaagtgataaaaaagattttagtgcttctaatgtataaactcatattgtcattatgtagagcattagcagtatttgaactataagtcactaaattatcaagaaaaagttgcatttcaactcccaattgattaaatttttctaaatctataccatataatttattgcctttttcaagattcttaatttgttcataataagctgaggaatccttcttaaattcagataaattgtttgtttctatagtgctaagcgatagtttttcgtaatcttccaccattttgtttatggcagagtagtcattatctatagctgctacatcatcatcattaaattcagatatagaaattctattgacatttaaccgaatatttaagaatgtttgtctaatttcctcagttttaataattcttgttaatgcaattgtgtacattgatgatgaatttgagttaatcgttttcatgttgttataaccaattattgcgatagataacgatacaaccgttgataagataaccatcaaaataacgctattgataattttaatatttttcagcataatattcccctttcaaacataataaatttccatattgataatatatctaaccaatattatactcaaggtctaaaaaatcggcgtatatatgaaatacgcgcaattatattgcatttttctactgttttctcattattgctaactatattgtaagttgatgcatttcaaaaaataattaaatatttatcttgacattgtaaacggttatgattattattaaaatataactaccatacaagtatggcagtatcgattagtaatagattttttaaaatacttatgataaaatataagtataactaccatacaagtatggtaggacttgaaagtaagggagaatataaaaatggctttagaggtaaataagaatacaacaagtaaaactatatattataaacttagagatgaaattattaatttatatcttgagcctggtactagcatttctgaaaaggaactttcggaaaagtatagtgtgagtagaactccagtaagagaagcacttgttagattagctcaagaggggctagttaatatttatcctcaaaaaggcacagttgtttctttaattgatttatctgcagttgaagaaggaagatttttacgtgaacatttagaaagagcagttgtaaaggaagcttgtaaagaattttcacaagaaaatgtactagctttagaaatgaatttgaaacttcaaaaaatgtatatagaaaataatgattataaaaagttatttgaggcagatgaagaatttcataagataattttcgagggaagtaataaaaaaagagtatggaatagtattaatgatggcagtactgagtttcaaagaattcgtatgcttagattagtaactaattctagctgggacaatatttatcttcagcataaagaaatttttaatgctataaaaaacaagagcccagagatagcagaagactttatgaaggaacatttaaatatggttacttttgataaaaataaaataaaagagaagtatcctaattattttaaataaagattgatttaagttttaatatgatcaaagctgttaaataatcatgtaatactaagattattattttaaattaaaggaggtgaggcttatatataagcagcattaaatttaagtgtattaattttatatatgttttgagatattatatattgaaattataattaaatgaagtgacaggagggacattactatgaaaatgggttttagatggtacggagaaggcaatgataccgttacacttgaacaaataaaacaaattcctggagttggaggaattgtttgggctcttcatgatatggcagcaggtgaagaatggccaatggaaaagatccttgaagtaaaaaaatcagctgacaagtatggatttaatatggatgttgttgaaagcgttaatgttcatgaagacattaaattaggtttaccaacaagagataaatatatagaaaattataaaaagacaatagaaaagttagctaaggttggtgttaaagtaatctgctataatttcatgcctgtatttgactggcttagaacagatttattcaagaaggcagaagatggatcaacagctcttttttatgaaaaagcaaagattaaagatattgatccaatggagttagttaacaaaattgcgtctaatccagatcttacaatgccaggctgggaaccagaaagactaaagaatttatcacaactttttgaagcatataagaatgtaacagaagaagacttatggaataacttaaaatacttcttagaacaaattattcctgtagctgaaataaatgatattaaaatggcagtacatccggatgatccaccttggccaatatttgggttaccaagaatagttaagaacagagatgatttagcaagattattaaagcttgttgataatccatataattgcttaactctttgcagtggtgctataggttcagatccaaataataatgtaccagctatgataagagaattcggtaataggattgcttttgctcatattagaaatgttaagatttatgagaatggtgattttattgaaacatctcatagaacttgtgatggttcattagatatatgtgatatagttaaagcttatcacgaagttggatttactggatatgtaagaccagaccatggaagacatatttggaatgaacaatgcagaccaggttatggactttatgatagagcacttggaattatgtatttatggggaatatgggattctcttgaaagaaataaataaaagagataaactaaaattttgattaaaaaaattttggctcatagaatcttaagatacaaaagataattaatagtattgactttattagcaatagttttaaagaggtgaaaaaaatgaataacgccaaaatagtattaagtaaagaaagtatcaaaaatagtgatttatgggaaaaagctgggattgaaattccaaagtttgattatgataagatgtcagcatcaactaaagaaaatcctacatgggttcattttggagcaggaaatatattcagaggatttatagcaatactacaacaggaacttttaaatactgggaaagcgaaatctggtattgttgctgtagaaggatatgactatgaaattatagatgaaatttattctccttatgataatttaagcttactagtaattatgaaaccagatggtagcctagataaaaaggtagtaggaagtataggcgaaagcttagctggtgattactcaagagaagaagattggaataggttaaaagagatattttcaaatccatctttacaaatagcaagctttacaataacagaaaaaggttatagtgttaagaatttatcacaacaagatacaacagatggtctagagcatcctgtaagtattatagctaaagttgcgtccctagcatatgtaagatatcaaaacggacaacttccaatagcttttgtaagtatggataattgttcaaagaatggtgagaagcttcacaatgcaatggaaacaatgataaagaactgggttgagaatggattagttgataaagggttccttgaatatatcaatgatactaaaaaggtatctttcccttggagtatgatagataaaattacacctagaccatctcaaagtgttaagaatacattagaagcagttggttttgatagcactaagattgtaacaactagcaaaaatacttatattgcaccttttgtaaatgcagaagggcctcaatatcttgtaatagaagataacttcccaaatggacgtatgcctttagaagaagcaggtgtatttttaacaaatagagaaactgtggaaagagttgaaacaatgaaggtaactacgtgtttaaatccactacatacgtctctagcagtttttggatgcttacttggatttgatttaattgcagatgaaatgaaagatccagctttaaagaagttagttgaaaaaattggatatgaagaaggaatgcctgttgttgtaaatccaggaatattaaatccagaagatttcattaaagaggtagttgaagttagacttccaaatccatatatacctgatacaccacaaagaattgcttcagatacatctcaaaaagttggtataagatttggagaaacaattaaagcttatagtaagagagaagatttagatgctaaagaacttaaatacattcctctagttatagcaggctggtgcagatatctaatgggattagatgataatggtaatgttatggagttaagtccagatcctttattagatgaattaagaaaatatgtagcagatataaaattaggttctaaagaatcagtagaaagtagcttaaaatcaatacttataaatgaagaaatttttggagtaaatctttacactataggtttaggcgagaaaattgaaggttatttcaatgaattgatttcaggtgctggtgcagttagagcaactttagaaaaatatttagattgtaaataatcagagataatgctcgaagatgcaaaaaaataaacatttttatcattcttcatttattatattctgccaaataatataagtgaagaacgataaagaatgtttaagaaaattaatatgaagtacattataacataagcaatgctaattaacaactttgcacttatactaaaaggatgatataaaacttttagtattataaggtaaggaagttaaattagcgaatataagaatataagaatataagaatataagaatataagaatataagaatccaaaacataacaataaggttaatatataaaatttaagaaaacgttgtggtaaagtattgagtaaatgcaaattacaataatgtacgtgaatttatatactgcgtgttattaacccaaatattcaatgctttacaaatataaaatatttatttgagagagtaggatgaagaatatgaaaaatttcatggatgagaattttttactatctaatcaaacagctatagatttatatcataattatgctaagaacttgcctattattgattatcactgtcatattgatccaaaagaaatatatgaaaacaaaaaattcagtaatataactgaagcgtggctttatggtgatcattataagtggagagctatgagaagtaatggtatagatgaaaaatgcattacaggagatggaagtgattatgacaaattcttagcttggtcgcaaacgatacctatggctataggaaatcctctttatcattggactcatttagaacttcaaagattctttggaatatatgaaccgcttgatgaagatactgctcctgaaatttggaagagagctaatgaattattaaatggagaaggttttaatgttagagatttaattataaaatcaaacgttgaaactatatgtacaacagatgatcctatagatacattagaatatcatataaaaattaaagaagatgctagctttaatgtaaatgttttacccactcttagaccagataaaggaattgaaatcaatttagatggttttgtttcttgggtaaaagatttagaaaaagtatctgaagtatctataaataattatgatgaatttttaaaagctcttgattcaagaataagatttttccattcagttggatgcagaatagcagatcatggtatagatggtgtagtagtttatgcagattcatcaaaagaagaagcagaagcaatatttgctaaagctttagaaggtaaatctataagcattgatgaagaaaagaagtataaaacttatacattaagacatgtattcaagctttatcatgaattaggttggactatgcagctccatattgcagctcttagaagtaataatacaaaaatgcttgaaaaaataggagtaaatacaggttttgattcaattaatgatgaaagcatagcttatccactttctagacttctagattctgtggacagagaaaattctcttccaaaaacaattttatatacattaaatccaaaggataactatgttcttggaactatgataggaaactttcaaggagatggtattccaggaaaaatgcaatttggtgcagcgtggtggttcaatgataataaggatggaatgattgaacaaatgaaggcattaggaaaccttggattgctaggacgctttattggaatgttaacggattcaagaagcttcttatcatatactaggcatgaatactttagaagaattgcttgtaatttaattggagaatgggtagaaaacggagaagtacctaaaaacgataaattacttaaaagaattgttgaaggtatatgctatagcaatgcaaaagaatattttggatttgataaaaaataattcaggaatatttaattgatgaaagagaggaaaaatttatgtcaaataaaaatagaaaaattacgatagctagaggcgttggttatggactagttgatttaatgggtggtggagcattcactattattggagccttcttactatttttctatacaacatttgcaggattaacaccgatagaaggtgcttctatcatagctatagctcgtatagtggatgcagttgccagtttatttatcggtagtatatctgataatttctataaaactaagcttggaaaactttttggtagacgtcgtttcttcttattaatcggagctccgttaatggcagattacgtgctactatgggtaacaggaagaagttatgcgttctatttagttacttatttgttatttgaaataattgcagccatggtattaattccatgggaaacattacctgctgaaatgacaaaagattttactgacagaactaaattatcagcatcaagaatgtttatttcggcaacaggtacatttttagctacttttgttccaggaagattaatagctttctttggtgacaagagcccacaagcatatttcattaatggattggtttttgctattatatatgcaatatgtatacttatatcacataaagtaacatgggaaagggaccttacacctgaaatggaacaagaactattaaatggttctacaagcaagagctttggagaacaattaatgactattgtaaaggttgctggtgactatgtttctacatttaagatcagagcgtttagacaacatttagcaatttatatatgttcattcactgctaaagatttatttaattcagtatttatatatttctgtgtatttaatttaggtgtttcatctactactgctgctaatgtactttcacttagcatcattggtattcctgtaacaatcttaggtggattcttaatgattaaagttggaccaggtaacttatataagatggcttattctattatgattgtatgtttactagcattttatggactttatgtaggaaatttaggatcgaatattgttttattatttgtaattggtacaatttatcaagtaggaagaagtttattagagtttactccatggaatgtattcccattcattcctgatgttgatgaaatggttacaagacaaagaagagaagggctttttgcagcagttatgacatttactagaaaaagcagtgtggcaatagctacatttgttataggtgttgtattgcaagaaagcggatttgttaaaggacaggcaactcaatcaccacaagttgtatcaactatagctactcttttagctgttggatgtatatctttacttgtaatcgcattaatttgtgcggcaactttcaaacttaataaaagaacacatggtatattagtggatgaagttgaacgtctaaagaataatggttcaaaagaagaagtaactccagaaacaaaaacaattgttgaaaatcttactggatataaatatgaaaatgtttggaaagaaacagtagtataaattaattcttttgactaatagaatattaaaatattagaatagctcaaaatcatcataatctctagatacgtttcaatttagttattatagctgtcttaagatagaaagtaaattgctattttaaggcagctaattttaatttcaactgtattaaaatattattttgatagcttctatattgtctgtaagaatataaaggtatgtcttaaataattaattgtactattaaataaaaaatgttattaatatatgtctataaaaaattaggttaggagaccgaaatatgagtaataaaaataattgtctttattgtgataaggatgaaaaacttgataatttaatgattgaaatatgtaagcttgaagtgtcaactctttatttgttcaaagaacaaagtcataaaggaagatgcattgttgcttatgataaacatgtgaaagaattatttgaattggatgataaggaattagaattatatatgaaagatgtcactagagcggcggctatgattaaaaaaactttttcacctgataaaataaattatggagcatattcagatactcttccacatcttcactttcatttggttcctaagtataaagatggatattcatggggtggtgtatttgaaatgaatcctcagaaaaaatatttaagtgatgaagaatatatgaagagaattaatctcataaaagaaaagttataattatatattttgtgttagctatttcaaaacagaggatagatatctgttttgaagtagctattttacaatgcagatttatgcctttattttgtattgtgtgcattaataactatatatccatattaggtcttgaatataactttctatttatactaatcaagaagaatttataagtacaaggggataattctacagcatatggaaaagaaaatagatttatttgaaacttggattaaaataaaaattttagtaaagtttcttcaatgacaagtttaggaggcatagatatcgaattatcccctatagatatttatgatgcatgttcctttttaagaagatataaagcaaaaagttaaacatatattataa

SEQ ID NO: 55 - DNA, 39473 bp, Clostridium beijerinckii
aattgtctacatcataaaatatttctactaataagttttgcataaaatcccatcctttgttttatttatttggtcgcacttatataataaaacattttgatgggattttttatcccttaaatttttccatcgaactcacgttatttattaatttttggttttatcttaacttgatgcttttgtaattttatagatataaagtatattaagattaaatcaaaactcatattatacatgaaaacatgtttagctaagtctgcatctcctgcccctataacagatattataatttgagatattccaactaaaaatatataaaaatatgcctcttctttgaaaatcatagtatcacagttgatttttctcgcctttatgtatctaacagctgaagaataaaaataccctattatcacaataattgatagtacaatatttcctgtaaatactttttcttttactgtgctatataatgcaaaaaaatatgatttagccccaaattctttgttttcagatttctcgtaattccccattgcattaggtcttatggaatatccattatcaaaagctatttttaacattttaaaaaatgcccttggatttgtaatataataagagattatttttgttgtagtaaattttttataataatcctctataagctgtttatcatataaattaactaaagtcacatcatcatagaaagttgtatcttttaataaggaatactgctcatttaagttaaaaaatttcataacttcatcagggtcttcttcatataataaaatccctctattcattgcatgatatccattaatatattgaaaatccccagttatttgcttatagaacaatattgaacttatcacaaatccaatagctaaaaccatagatagccccttaaataatttttccttatttttaaatcctattctaagacataatactgcaattaaaataccaactggagaaagctgctgttttgaacctaaaaatataaaagatgagattccaaacagcaatacatttagcttgcttaacttattgaattctgccatatttaataaaattcctatgctgagcagaaagaaacttatattaatagcttccccataaaaggaattataataagctaaatatgttgtgtcacaaaatataaaaatggttactaacgttattattaatttatgtttttcttcagtaacttgatttattaatacctttacaattaaataaattccaattgcctctacaaataaaaacatccatgacatgaatcttatatctaaaatgaaatttttattaatcatctggcttatgtaaactgctatcttaataaaaatcccctgagttgatataaagtttttttctatatcattattgtatttataaattccataatgcctataaaaatatccattatataaatcactatcattgggatttaattcatatacaccatttgaacttatcactctatagaaatccccattatcagccatgccaataataggtttaataaataaagtaaatatgcctattattattactaggaaaaaagctgctaatggataattgatatttttaaaaatactgttttttctattcaaaatatttttcatctttctccttcataaataataatttgattttcctttacttataggatgtgaaacaagttataaattattctttaaaatgtaatctatatgtacatatcttccatggtagaatcatcacctttattagttcttaaatatatgttatcattctatatgtatatattttaaattcgaagcattggaaggagattttatgattaaattagttgtaacagatatggatggaactttactagacgagaatggtcacttaccagatggatttactgatatcttggaccgtttaagagcaaaaaacataaaacttgttgctgctagcggaagaccttattatacgctacaaactaactttggccctgtaggaagatatttatcttttatttgtgaaaatggagctttagttgttgataataatgagataatttataaaagtgttttagctaaagatatggttcaaaatgtaatcagtgaagctaaaaaagtcaaagcaaatgcattagtagtatgctctccaaattgtgcatatattgaaaattattctgaagaatatttgactgaaataaagaaatattatacaacattagaaattgtagatgatttaagtaaaattgatgatgatataattaaaattagtatttgtaatttggaaggcactaataatataactgacagtgaattaaccaatgatcttaatatagtttcaactgcagcaatctggactgacatttcaaataaaggcgttaacaaaggcgttgctttaaagagtcttatggatactgataatatatcaaaagaagaaactatggtattcggagattattacaatgatatagaaatgcttgctgaagctgagtatagctttgtcatggaaaatgctccagaagacatgaagcaatatggtaaatacatagctgcaagtaatgtagaacatggcgttttaagagcaattcttgaatatgctctttaagcacaatcgtaaggcattagtattgtgcagaacttaaagtgaagcgataaacacccgaaatagaatacatatatgtattctatttctttgtttggctatcactttaagttatttcacatatacctttgattatttcgcgcctagataacgagtgtaaagttaaacactatcttatatattgtagtatatgccagaaaggaaggtcatgcttttgtggaagtgttgcattgaatatttaaccgcagacatttccttagtagaagttgtattatttttgcttgtcacgagcttgtctcgggagcatgcaaaaataggacaacttctgctattggaaattcacggttaaatattctggcaaccggaacaaatgcatgaccttcctttcgttgtttatatacctaactatagcatctagcgcgaacttcattatagcaaactcatttgctgtacttctgtttctttgaatgaagatatgctgactccaataagccttacttcttcttttaattcctcactatctaatagttcttctgcaactttatatatttcaatctgagtaccaatataataatttaatgttttacttcttgtatgattttcaaaatccttagttttaaatttaagtgttacagtttttccactaacattttttctatttaaaatctcttcaatttcaaaagaaaattctttaatgtattctctcaattcttctttatttttagtatcgaattttaaagtcctttcttttcctatagatttcctttcacgaattaactcaacttttctaccatcaattcctcttattctatcgtatatctcaataccattcttgcctagatactctatataaaattctttaggcatcttatataattcttcaatataatatatccccatattatttagctttgctactgatactttacctaaaccatgaaccttagatataggaagaggaaataatatatcaggaatcatttcctttcttatttctttaattccatttggtttattccattctgaagcaagctttgctaagaatttattataagatataccaatagataaagttaaaccaacttccttaaatactctatttttaatataccttgctgcttcgattccatcttttatttttccttgagacaaatctaagaaaccttcatcaatggatacaggttcgactagtggagtaacttcattaaatatttcaaatatctcctgagatactttagcatactttccatatctcccagatacaaagattccatttggacatttctctctagccatgaacatcggcatagctgaatgaacgccgtattttcttgcttcataagagcaagttgatactactcccctttcacttatcccgcctactataacgggcttacctttaatatctggattgtctctttgctcaacagatgcaaaaaaagcatccatatctacgtgcaatattacattatccatttttataaaatcacctctttatgattaactaattttcaatatttaattgatcatgcatatagatatccaaatttgaaactagatttatgtggtaacttaccgaaatcataaatattttgttccgaaaagctatgaaaatatcgctgaaggttctaagcagcaggttatatccaatttagcatgctccaactttcagtttgacaagctaaattggaacaacctaaagctaagaacctttaacagctcattttcaaatgttttcttcacaaatatatttatgatttctagtaacgatatgagcttaaaattctagcaattttgtaaatctgttcatctaataagtcgaattcttaaattggatacctatatagataacccgactgagacctgaacttatacatataactcgccgaaatgaataacatacttttgttccagttgggataatatttcatggtattaaatctagtttatctataaacaaattgcactcgttttctttatatagcttataaaaaaatctgtatattattatacaaaataatctataagtattttaacatacaaatcatcagttaatgaaacaataatatatggtataaatcttacgtttatattaattgctatacatatatattgcaaaaataatacttcatcataattctagaaatgttacaagaattttagctgtaattgtgaattgtgaaatgtgcattgtgaattgcaacatatacatattaaaaagttacctaattttatttgacatatggtataataataaagtattttaagtataatagcgttattagcgatatttttatgtaaaggagtaattattatgggtcttaaagaaaaaataggtagtaaattcagtaactatttccaaaatgcttatatggaaaagtatggtgacagaattacaagcatatctggaactgttttatctgtaaagcttattgaaaaaagttatgttatcttcaatagattaatggttgaaatggttataaagcctgaagttgggaaaaaagttgttaagtgttggtataaaaagaatagatggtttaagaaacctgaatttattgctgtaaagcagggtaacaaagttattgttatgggtgttacaggtgataaggatagtaagaaggaaaattctcaagaagttcaaatatttaacctattaaatcttacaactaagaaagacttagtaccaatagatcatagccaaataaaaaaatcacgtcaacaagcaaacaatatgatgagaagataaaaaaagggctaagccctttttttattttgtctttattaataaatatacactgttaataaatgctattatccctgaaaagaataagactataagccattgattaagagataatgctactgtatgaaatacattttgtaaaaatggtacatataaaactgagcacattagtgatatagatattaaaacagctccaactaaataaggatttgtaaataatttaatttggaatatggagtatctttctgatctacattcaaatacgtgtatcaattgagataaaactaatgtacataatgctaaagttcggcatgtttctaaattcattttataatatcttcctaccataaatgatagcaacgtacacaatcctattaatgttcctcttattactattttttcaactaatcctcttgcaaatatactttcctttttttctcttggagattgtctcattatatcttgctctggcggatcaactccaagtgctatagctggaagaccatctgtagctagatttacaagtaatatttgtattgggcttaatggattaggtagatagaataaagttgccaaaaacattgttaacacttctccaaggttacaagatagtaagtatcttataaattttcttatgttatcatatattattcttccttcttctacagctgcaactatagttgagaaattatcatccataagaatcatagatgatgcttccttcgttacatctgtacccgaaattcccattgcaactcctatatctgattccttaatagcaggtgcatcatttacaccatcgcctgtcattgcaacgatatttccttttttcttaaaagcccttacaattcttaacttatggttaggtgaaacccgcgcaaaaactcttactttttttattcttccctctaattctaaatcacttatagcctcaatttcatcacctgtcattacctgatctgctgtattacatatattcaaagattttgctattgcaagtgcagtattctgatgatctcctgttatcattataggttttattcctgcaagtttgcattttaaaactgcatctctagcttcttctcttggtggatcaatacttcctgctatacctataaaaattaaattctgctctaacttatcactttttgttagattatcttccttatatgctgctgctatacatctaagtgctctagatgacattgctgtaataaaatcactaacttgctttttcttttgatatgtgaatggttttattttgttattctctagtataaattcacatctatctattactctttcaggagctcccttaacgtaacatgtttcatttgctccctccttagcgccttccttgattataaccgacatcatctttctatttgaatcaaatggtatatcatatatcctatttgcatcatttataaaatcttctaaatcattaacatcattgaaaaacatatttattagtgcagtttctgttggatcaccatgaagtgcttcactcatttttttctttgtaaaatcataattacagtcattacaatatacaagagctttcatgaactttgtataattacttagcttttctttttcaagttcatgaattctgccatttaaatatacctcttttacagtcatcttattttgagttaatgttcctgtcttatcagaacatattacagatgtacatccaagtgtctctacagctggaagttttcttacgagtgcatttttcttaagcattctagacacacctagagccagtgaaacagtaacaatagcagctaaaccttctggaattgcagcaactgctaagctaacgccaagtaagaacatctctgttatatcatttcctctaattattcccattgcagtaacaattgcacatatcacaaggcaaattacaactagtactttccctagagagtctaatcttttatttaaaggggatttttcttcttcaatattttgaattaggtctgcaatcttccccatttcggtgttcattcctatacaatcaactttaaataatccttttccttttactacagtagttcccataaatccttcgttattcttctttgtctttttaccatcagctttatatggattggcttctttgtttacaccaactgactcacctgttaatagtgattcatcaacgactactgatgaactttctataaagaatccgtcagcaggtatcctatctccagcctccaaaataacaatatcccctattgttaagtagatagaatttataatctgtatacttgaatccctcaaaactttacatgtaggtgccgctaattctttcaacgcttctaaagatttctctgttttaaattcttggacaaatcctagtattgcattaataactattattataagtattgtaatggcatctgccttatctccaattatcccggaaattatagtagatgcaattaacacccaaacaatgaagtcattaaattgagatagaaatattttgaatgctgatgctttattatggtgcttcaattcattaagtccaaagttcttaatcctcttttccgcttccttagtgctaagaccagatgtcaactctttttcctgtaccacaacttttcctcctaaatatagaactttatataatatatatattttccattacaaaagttatgcacctaaaaaaaagaaaagtgcgtaagcacttataaattcttttcacatttaaaaataaaagtgctaatgcacttataaattcctatcacctaaaaaaaaaaaagtgcgtaagcacttataaagtctttccacacaaaaaagaaaagtactgtggttcttactaatccttttcacattaaataaaaatattctggagcatactaaatatacaaataaatatcagaacctcaatccaccatattgattcctaagtatttcacacctagataccgaatcaaaagtaaaacatatatttttaattattgtattcaccagaaaggaaggtcttgcttttgtggaagtgttgcattgagtatttagctgtagatatttccttagtagaagttgttccgtttattgcttgtcacgagcttgcctcgggaacatgcagaaatgggtacaacttctactgttagaaattcacagctaaatcctcagtaacgcgaacaaatgcatgaccttcatttcggtatttacatatgtaactttaagcttactttaggtatctagctcataatacctttattgtttaaaaaaaagaaaaaatcccctaaaggattttttctttttaaaaattatctatttcattgagttaactacatttgtaagtggtggtattacctgtttctttcttgatagaacccctggtaaaaatgccattgaatctactaattgaatattaaatgtcttttcaacataatcatgtctttcaccagcaactagaacttgtgaaccttcttttaatatatctgttaaaagtaacattactacagcataacctttgctatctgcttcgctcttcatgtaacttaacatttcatcttttaatggcataaatccatcgatgtccattgtgtttacttgagctactccaactcttgattctcccatattaaaaggcttaaagtcttgattaaatatttgagatacagtctttccttttaaggaagttccagctttaaacatctcttttgcaaattcttctaaacttgaaataccagctatttcagccaacttatgacatatgtctttatcttgttctgtacaagttggactcttgaataataaagtatctgaaattattgcaccacataataatccagcaacttctttaggtggtgttatattacgttcaaaaaagctttttccaactatagttgaagagcttcctagtggttcatttctaaagaatatagggttacttgtttgtatatcagcaactctatggtgatctataatttcaagtacttcagcatcttctaatccatcaactgattggcctctttcattatgatctacttgaataacttttttcttatgctttgaaataaggtgatatcttgagactgttcctattactcttccatcttcatcagttacaggataactgtgatatctagtttcagccataacatctttgatatcatcaactaaatcgtctttagaaaatgatattaaatctttagtagccataacatgacttacaggtatactttgaattaataatcttgaagctgtgaaagaatcatgaggtgtacttattatagtaactcctttttctctagctttagaaagtaaattctcagcaagcttatgtgctcctgtaattattattaatgatgtattaatatcaattaaagcttcttgtacatctggtctatctcctacaatagcaatatcatctttatctacaatttcttttaaactatctggctgcattgctgtaactgcaatttttccagggaatgttttgcaattttcatttatatatacactagtagcagaaagcgtatctaatatattttcaattgatgtattactttttcctaatatattattatcccatatatccataaatgatgaagttaagtttgaaatcgaaagaattcccactaatctactatcatttccaactacaggtagtgatttcaaatgattgtctctcattatattccatgctgcttttaaagaaatattagaagttataggtccaattgtatcaatatctaaatcttctacttttaatctaactgtttctaaaagtcttggagccttaacaccaaaatgatctaatataaattgtgtttctgcatttacatttcctaatctcacaggtatagccggaatattaccagtcttatttttaaactctgcgtaaccatatgcagcacaaatagagtctgaatcaggatttttatgtccagttacgtaaactacattttccaaaataattcctcctaaattttttgttttactttagtacattaggcacataaaataatgaatttgctattttcatgtgccttatatatagataaccaactaagacctgaacttatgcatataactcaccgaaatgaataacatacttttgttccagtttctaggtaattatgatgggtgattctaaggctataaagttgcactcaaagtgctagcctcaaagaacaagctgtgaactagcacatttggaacaacttatagccaaagaatcacatccatcaaaattaccaatgaaacattccacaaaaatatattacccatttctagttgggatatatttcatagtataaatctaacttataattggcttatatataaattgacatattagaacaagtatattacttaattcacacatatttattttacttataaagttaattattgtaaagcgttaattgtatttacaatattatttacaaaaaaatactctgtgaataactttctgcaaattaaaaaaattagatatacttgttgaatatattggaaattatactcttcctcttcagcaaacatatatctaatttatctaaaactcatattattattattttaattatctcatattatttatcatactccaaagatcatccgctgtagttacagcctttgaactaagttgaaaagctctttgtgtaagtactatatctgaaaatgtttctcctgcatctacatttgaaccttctaacataccttgttctatattatagttactacttagtgcaacctgtgcatctgagcttggaacaaaataactgtttccaataggtataaagctcttatcacctatagctgtaaagacaggaattgtacctattttagttgtttgtccatcaacttccatagatattcctccatctttatctatagacatcttctccctatctaaagctggatttccctctgaaaatccattctcatattgaacataaactttagttccatttgagtctactaaagctccattcgaatctattttaaaattaccatctctagtatatactatgcttccatcttcctttgaaagtgcaaaatatccttttccatctatagcaagatctgttttttgacctgttgttaagagattcccttgtttgttattagcataatttactcctaatttaactccagttccagtaatcgcctttttttccacaagtggtgttcctcttctatcaagtgattcagttaacaaatctttaaagttaacatctgtactcttataacctgttgttgaaatattaactaggtcattagaaagataatctagcttctcttgatacgcattcattccactctttgctgtagcaaaaatattaaacataattttcctcctttacattaggcaaaatcaataaatttctcttaaccactttaaacattttattttctctaatttgccttatactattatactcgacctaattcacttgccgccttttgtactgtttcatcctgcatttttacaaatttttggtttgtttcaaattgtctttttatttccataagttttactagttctgttgatggatcaacatttgagctttcaagaaagttctgtcttacatttacttttgcattataaataggattgtccatagtactatagttatcaccaattggttccaaagtattatagttttgaaaatctgctgttaataacttatctgcagctccaactccatctatattaatattgttgtcaccgtctattgaaaactttgaatcgccaacatatattggttctcttgcacctgtagagttatttattcccaatacttgtgatccatcatttgttattagatagccttcattattgattttgaaatttccgtctcttgtataaacttctttatttccattttgagctacaaaaaatcctctaccatctatagcaaaatccgtcatactatctgttgatttaaatgctccttgtgtaaaaactgtttcaacatcattaacttttacgcccatatttaaatttccaatgtcatttttaacgtatttatctcctacaagcttttgtctgttagatatcatcacgtcttcaaagctactttttgtaagctcacgttttttatatcctgtattattaacattagctatattattagttactacttcctgatcattttgaagcgctattaatcctgaaacagaagtatagaatcctcttatcactttaattgtcccctttcaaaatagatttacgttcgctttcataaatcatacctaaagctctagccttttcctctatctggctatccgaaagactagcagtatatttatatccaaacataaatataactcctaaaaccaatcctattcctatacccaataagatcttcctatccatgagaaatataaatttattttttattttttgaataagccttttactaataatacttcccccttactcacagataattcgcgacatatttcatcttctgttaaccctgcatttaaaagtctttttatgctctgagtcttgttactatccgcactttctgaaaaattaatttcagatatcactccaatttcttcgtctatatcagtatctgttaaagattcagtatattcatcatccagatccattatactatcatccacaatgtacagtcttttagattttttatgatcttctctatcttcgccataatttatactgtcatctatatcatatttatctagaaaatcttcaatttctagatcttctttattttcgtatccttcttcgccattcttaagctcttttaaatcactttttattttaataatttcttcctgtaattcagttagactttctgcaatatctcttcttaaaagtcctatttccattttataatcatttaattcctctttactatcttgtaacacactttgaaatgatatatttaatgcatcattttctttatttatattattttctctcttgataacacgataattataaactattaaactgaatcctattatcagtaatattaatggcataaaacacctctgttcaatgcacaatgcttaatgctcaattcacatttcacaatgcacaattatttgttaaattcacactgctcagttcacaatgcatagttatttattgaatgcataatacacatttattcatttgcagttttcagtccacaatttattatgccacacttcatgttatattttcacacttcgaaaatatatttaattttttaagccatagcaaaatgtaattccaactttttatattccagtgcttaaatttttaacgattatctacaactcacaatctcttttaacctaatcaacacatatatctctgtctaatcttaattatgtaatttgaattgtgaattgtacactgtgaattatatattaatcaatataatgcaattttctcatgcactctctcaagctactaatagctctactatgtaattggcaaactctagattcggaaacgcttaatactgttcctatctcttttaaagttaatccctcataataataaagatttaatactattctatctttttccttaaggagatcaattgcctttgttaaaatctctaattgctccttatcttgtaagtaagcatcaggacttggactatttttatcttctataattccaataaggtttacatcttcatcatccgaaaaaattacattttccagtgataccattgaaatataatttatgtaattttcaatttctcctacttcacttatagatatcccaagatattttgcaatctcatcattagtaggttcccttaatagttctagctgcaatgtgtctatagctttattgtatctatttagtttgtccattgcccctttagatataggtctatttttcctcagctcatctatcatagcaccttttattcttatagacgcatatgatgaaaatttcattcctttcgtattgtcaaacttatttaacgcatccataagcccaaccataccataactaactaagtcctcatattccatatatttgttctttccaaacataaccctcgaggcaatatactttactaacgggatatattcttgtatgatctgctcttttccatcaacgtcttttaatgcgtgcatatccttattacctccccataaactcatttctcaatttatattcacaaactctttcaatttttacttttaagctattggagcaaaactcgccttaaaaatccaaaatttaattcactaaatttacatattagctctttgccttctcattatttcgaaaagctcttgaatcattttttcactttgagctggagtaatatcaataaatcttaatccacacaatttttctttatctggagtgttttcaattcttacaatatcacacttaatttcgacttcaattttgcttaattttaagctaaccaatatcaaatcttctttagtaatttcttcatttattttaaattttaatccaccagcactcaaatcaaccattaatccatctttataaggtatcttaggaatatcttcctcatcgatcccagtaatttttttatattgaactggattcaataacccgactctgaaaaaattccttctttgtatttttacaatattaaatggtgttgagattttataatatattatgcttccttctttacctcttgaaattacttcgcatgaaaaattaaaacatccattttcacttaagtaagtattcatttcgatcttttctcctgcgtgaagcattaaataatcaccatcacaaacaggaacattcatttttaaaaagtcatcctctacatccattattagagctttatatgctttttctcctattattacttccactctatcattaacttttaagttaaaattaagcaccttaaaatcctcctatgaaaatatattaaataatctcttaaacattccttttgctccatctgatgaatccacttcttgtcccaaaagtttcgaagctattttttctatatctttagatgcatcacaattaggatataatataacaaaaggtttttgctgcctaacactttgcactaattttttatcttctaatatgcatcccaaatattcaacatctatctttaaaaatttagtaactgccctattaaatttattataagtttcttcaccttcttctttagtaaaggctttatttacaattatttttgccttagtcttaagattatagtgatctgttgctttaattaaactatatccgtctgttaacgacgtaggctcaggagtagttacaataattaattcttctgaagctgctataaaagataagacatctttattaactccagctcctgtatccattaatatataatcatactcatccaatgtctcgagtttttctataaataatttcttttgatcttcttctaattcttgagctttacttaaagcagaccctgctggaattaaatcaacgccattggttcctgttataattatatcttttatttccaatccagtaaatataatatcaaatatattgtgcttgggatataatcccattaatacatcatcatttcccatacccaaatcagcatcaaaaatcaaaactttctttcctttattttgaagtaatattgctaggttcacaacaaaattactttttccaactccgccttttccagacgttactgttattatttttgtagttgtcttatttatttcttgttcttcattgttaatcaattttcgtaatgattcagcctgatctagcatagaatctcctcccctaggataaaattagcaatttcttcctttgtaggtaccattatatcatctggaacattttgccctatagttacaaagctaactggcttgttagcaattttagcaatattatataaagaaccatacacagtagtctcatcaagtttagtaataataatattatcatattcaagccctgaatagcctgtaagtatggattttatatcactatttttagtagttgcacttattaccatatttacatggtcagggtttgctttttgtacaaatgctctaagctctgaaatttgcatcgcatttttgctgcttcttcctgtagtatctataagaacaacgtcacagttactcattgcttcaatagcatcttccatttccttcattgtaattacaactttaaaaggtatattcattatttctgcatatgttttaagttgctcaatagctccaattctatatgtatctactgtaattaatcctaccttctttttttcgataagtgcaagtcttccagcaagctttgctattgtggttgttttccctacaccagttggccctactaatacaacgcgcccattcaagctcttagtggatactaagatatctctctcaaaaacttctcttaaaacttctacttcatttaaagcctctccagaatttatattctctactgactctataactccatcctgcaattcttcatcaatatccaaactttttaatctttcttttataaagcttactgatacatcttcgttggacgtattttttataaccttgcttaataaactctttaattcattaacttctttatgtattgattctatattcgcctcattatttatggccttatctatataatccattcccttttgttctttactgctattttccatttttgtagaactacttttaatttcctgtttattaatattttcttcgtatatattattactagacgcttccttttcaagattagcattatgttctaatatcttatctcttatggtatcagccttaggaatttctctcaaatcttttgaaactgatacttcatcctgcattaactttttaatactttctaatgaattttgaaactcttcatccattttgttgtacttactgctgtacttattagaactactattgtcatcactttgtgaattttcaatagcagctgtaacctctatcactttcttagaaaataagccttttagtcctggttttctaacctttctctgacttattataatagcatcttttcctagttcatatctaatccgagtcaaaccttcgttcatatttgctacaagatatttttttataatcatctatattcttacgactccttcactattaatttgaacatcattaggtacttcatttaaagaaattaccataatgtgaggaaataccatttcgattaactttctaaatacaggtcttatatttggtgaaacaagtataagaggttgattgttgtaaaaataaactgattctatagtattctttattcctgtaagtattttggtagttgtatccggatctactgttgggaatgacccttgcactgatttctgagtattatttgctattatctcttctatacttgtatccaaagttactacagtaattgttctattttcatcaaccacttgattacaaatcgttctagctaatgagaatctaacatattctgttagaacctctaaatctctagtatttttagcgttatctgctagagattccattatcgtaacaatatccttaattggaactttttctctaagtaaattttgtagtactttttgaagttctccgatacttagtaggtctggaataagttcttcaacaactgcgctatatttttctttcgcattatcaacaataagtttaacctcttgtcttccaagcaattcatatgaatggctctttatagtttcagttaagtgagttaccattaccgttgttggatcaactacagttaatcccttaatttcggcctcttccctttgatctttatttatccatactgctggaagtccaaaagtcggctcaattgtttttatacctggcatctctgaattttctcctgttggatccatgcaaagaagcatactcggcattaattctgaagaaacaaccatggttcctctaatttttactatgtactcatttgtctttaattgaagattatctctgattcttataggttgaacaacgatacccatttctatagcacattgtcttctaacagatgcaattctttgaagtaaatctccgccagatgcctcatctgcaagtggtataagtccatatccaatttcaacctccattggctctactgaaattaaattcataacattttctggctctttacgctctgcttggatgatttcttcttcttccgatacaaattcttgtatctctttggcagctgcatctttataaagtaggtatgttaacgtccccattgctaaagatgctgtaaaaaatggaattttaggcatgctaggtataatgcctaaaaacaacattatagcgctggcaattcctgtagctactggaaaagctgtcaattgagcagacaatgtatttcctaaattctcttcacttcctgaacgtgttaccaaaatacctgaagccgtagatactagtagcgctggaacttggctcacaagaccgtctccaacagataaaatggtatatgtttgagcggcagtcgcagccgtcatatttttttgaagtactccaatgataattccacctattatatttataatagtaattacaataccagctattgcatcacctttaacgaacttagatgcaccatccatagccccataaaaatcagcttctgattgcaagtcttttcttttcttttttgccatagcttcatctattattccagagtttaaatcagcatcaatactcatttgcttacctggcattgcatcaagtgtaaatcttgcagatacttctgcaactcttcctgcaccgttagtaataaccataaattgaattactactataatcaaaaatattataataccaactacataattaccacgtataacaaagtttccaaatgccgttataatagttcctgcatctgcttctgtaagtattagtcttgttgatgatatgttaagtgccaatctaaataatgttgtaaccagcaataatgtagggaagactgaaagctgcaatacattagttgtgaacattgtaattaaaattatgattattgaaattgttatatttaaagctaaaagtaaatctattacctgtttaggtaaaggtattattatcataagaactatcgctataacaccaaatgcaattaatacatctagattatcttttacctttaattttctattgccaaactccaaaaatcaaacctccctttttgatcaattcacaatgcacaattacgactaaaattcttgcaatatttttagaaatattatgaagaattatttttccaatatatattagaaattctgtaagaatttcaactcaaattgtgaattgtacattgtgcattgtgcattgcgtatttaaattttatttcttcttgagcttcattactactaccaatatttccgctacagcttgatataaatcttgtggtatgtcttcatctatttccaccctatcgtacatcagccttgcaagaggcttattttcgataaccgggacttcattttctttcgcaatactttttattttaaatgccacataatcagcacccttcgctacaattttaggtgcctccatatcttttccttcttcatattttatagcaattgctaagtgagtaggatttgttattacaaccgtagcatctgcaacagattgcatcattctcttcattcctaattctctttgtctttgcttaattttcccttttagcttaggatctccttcagattgtttgtactcatctttaatttcctgcttagtcattctcatctctttattatgcattctaacttgtaaaaagtaatcaatagctgcaatgattaccaatacaatgcatatctgcttaaatattcccacaactaaatttttaacttcgtcgcttagggaaggtagatataaatttgaaattcccagtatactttggtaatttcctgatatgtatttataacaaataattgatattatagttattataattaaatttttagataagtctaccatgcttctttttgatatcatattctttaggccatttaaaggatttaactttccaaatgatggttttaaaggttcagcagttattataaaacctgtttgcagcaaacttgcaataattcctccaaccattataggtaatgcaaagggtaataaataacttcctatctttataacagtagtaattgctaaattagaaatagttgcattatcaaaatcttttatcatgggaaaattcaaaaaatagattaaaacatctttaaatccacttgttaacatcccccataaagatgatattaataacgtacaaataaccattgtaattgctacagatacatccttacttcttgctatttgtcctttatttctagattctgactttttcttaggtgttgcttcttcagtcttatcatcaccagcaaaaattagaactaaaggtaccgcaggtatcaaattaactatttcccggaaaatacttggtagattgtatatagctgttccaattaacttcaacattaatggaagcaatataatatatgtaataagtcctaataaattttttataggcattccaaaaatcatgattggaattgttggtactgttctagaaatcaatcccaaacacacgtcagttataacaattatcaaaactattggtattgctattttcacacctaaagcaaaatagtcaaaaatagtcttcataacccccattaaggtttcttgatagactatagttttaccaataggtactatctttgtgctttccaccagcatatttataacaacatgatgtccatcaactataaaaaagaatgctaaagaaacaaaatatgataaatttccaagtaaagtcgatgtagtctgagttgttggatctagcactgataccattgagaaacctgcatggatatccatccattctcccgcaagctttaccacttggaaaattaaattagttatatatcctaatattaagccagacattatctcacttatggcataaaacaccagcatgtagccactatttaaagcactcaatgtagaatgatctatccctgctacaattccaaatgataatataagtgaaaatactccttgcataatttgtggtgttccagttggaaaaaatatttgaacagatataaaatatgaggttatcctcaaaaaaattagaaacaatgcaagaaagtaggatatatccaccatactgtcctcccccctatgtaataacttttgaaatcaaatcaaaaatcctatttgtgaaagacataattgtttcaagcatccaactccccaaaaatattccaacaattgctgctgctattaatttaggaacaaaagttaatgtctgctcttgtatttgagttgtagcttgtataatacttattgctaaccccaatactagaactactattaatataggagctgatactttcgccgctgttattattgtatccttaactacagcattaagcattgtctgcgtcatcttatttcacctcacataaaactctgtatcaaagatttcaccagtaaataccatccatctaccattacaaataatatcaatttaaaaggcaatgataccattgtaggaggtagcatgaacatacccatagacatcagaacactagatactaccatgtctataactaaaaatggtaaatatattaaaaatcctatttgaaaggctgtctttaattcacttatcgcaaaggctgggattaacgttgtaaatgaaacattctcttttgttaaattctctttatctactccacctatttcaacaaataactctaaatccttttccctcgtttgtttgagcataaatgattttagaggtttagatgcctcttcaaaagcttgatcctgagttattttattttctaaatatggctgtattgctttagtatttacctcattataaacaggattcataataaacaaagttaaaaatatagcaagtcctgtcaatatttgatttggaacagcttgttgtactcccattgcactcttaagaaatgaaaacaccaccactattctggtaaaagatgtcatcattatcactattgatggcaataatgctagaatcgtaaaaaatattaatattttaatactcgatacataatcctgcggtgtgctatttccgtctccaaaagatacatttagttgcggcacgcttgtactacttggagctgcatatgcacttatagtgcaaaacatcataattccaagagccatcatgaaggtaaatgcaattctcttcttattatttttcatgcttctcttcctttgattttatattctttgtaatcttagaaaagttctttttcgattttaatactaaattagtataatattctgccatttcctgcgatgctttcttcttatcttcttcaatattatcaatttcttctcttgataactctgataatttttccatatgccctgcagtactagtcattatatatcctttttctccgattttaactattaatatagaattatcttttgttacttgtactctttcaataaccttaatatatttattattattaataacattaaattttgaatttgctaacttaaaacttaaaaatattaatcctaaagtaactcccaaggccaaaataagctgtacaatcattcctaaaaatccaaaattcatatctcttacctactgaattatcatacttttaaatctaacatcagtaatcttgccttttgttaaatccttattaatagaatcaattaattgtctttttatagcatccctattcgctacattatttaaataatcagccttttggctcttaaagaaaaatataatatcatctcttacaaccacttgattagctgtcaattcttcctttagtttagtcttagtcttatcatagcctaaagcaagttctcccttaaaaaatcttttaccaccttcatcacctaaatttactgtgaattcagctaaatccatatactcattttcaacaacaacttcttgagcatctactgtatttttagttttcataaataaatacactccaccgaaagctgctgatcctaatactaataatcctaaaataaataaaactatcataagaccttttccacttttacctgacttttcacctttttctttttccttgtccttaccttttcctaaagccactattaccactcctcaccacttgcaacaattaaagtattaacctttttattattagctttattttaataaagtccctataattatattttataagtaaaaattttgtttttgtattttataaccgcctgcctaacttcttctacgctttcaagtactatatattttcttccattggttaatgtaattattgtttcaggcacttcttctatcttttctatatgatctgcatttaatatgaagtgctcatggttcattccagttacatctatcataaaattctccccctttaataataaactgtacagttcacaatacacacttaattattattatattcactatattatttaaagtatataggttttttataatacaataacttaccaattgtgcattgtgaattgtgcactatagaaaaatattacttataaataaaatcccctaatagcatttagttgcaagctgggctttcacccaacctgctttaatgtaatattaactatctttattatctaggttatctcataagcccagtaattgtttgtagaatttcatctcctgtagttaccatctttgatgcagcttggaaacttctagttgctgtgatcatatctgtaaattgttctgttaaatctacatttgaaccttcaagagctccttgaattaatgatccgaaaccgccttgattccctgttgcagtagttgttgaagatgatgtactagtatctatctttccagttttataaactataggccctgagttagaagaatttatgcacatattaccaccaagatcagtcaatccttctggatttttaaaacttgccatagcaatttgaccaattgcagctctcttaccatctcctaatacagcagtaataataccatcttttccgatttcaaatttcttaacaggctgtgttacagcacctgatgcacctggagttcctgaaatagtgacactatctggtattactaaaggtctcattgtattatcagatacttttaaatctttagaatctgcatttacatagttagcacctataacattatttgttgaatcataagctaaacttttagcactagcagttccaccatcatttgtagcgctagttaaataatatcccataattctatgcccatcagatgttaataaatttccttgataatccaatgtaagatttccatcccttgtaaacaaagtttctgaaatttgtccagtggcatcagaggctgccgcatttggtgcacctgtagcttgatcagcaccaattccagaattcaaatcgcctttagatactactaggtatccatcaccatcaatacatacatcaaggcttctacctgttgataatgcattaccttgtcccataactttgttaatacttgaaagttgtgctcctaaccctatctgcttagcatttgtacctccaagtactgaagtaggtgctgttgcctcagaagaattttgataaagcatatccttaaatcttgcacttgaagatttaaaagctgttgttcctacgtttgctatattattacctataacatccaatttagtttggttaaccttcattccgcttatcccagaatacatacatcttaacataaacatacctcccaatcttttttcaatttatataacttgcttctgtcgatccacaagttcaggcttccgtaaccaattcacaattatcaattcctaatccacaatgattgtacattgtgaattgtgcattgtgaattatgcattgtctaaaggtccagcctataaaattactacgctatctacgttcgtaaatatattatctttcgctctatccttttctacagctgttattagagtcttgttttcaacactagcaattaatgcaatatctttatataacataactgtatttttagaatttttatcctgagctattttaaaacccttttgtatttgttccatatcttctttagtaaaattaatctcatttaatcttgaagcagcatgctttgatacagtaaaactctgatctctatttttaacaccatctagtacatcctgaaattttgcttccttctgcttgctattaggactatcacctatagccttttgagaatttgcaaattgcccaatattccctacagaataagcttgtccattaataattctataactcatttatacacctgctattttagctagaattgcattttctgcatctgtcgaatcattagttgcacttgaaattgtatttattgttccatttgaagatgcattcgtagtatcacctgctgttcctgtattagtattagtgtctgtagaaccagaatcagaagttgttccgctgccactagaattactgttacttgaaccatttgtacctgtttcacttgtactttcattagcagtattgttatttaaattcactttcatatcatcatctgccagatctccagctcttactatatctccataatcgtaagtcttattttctcctgttggcttaccgttatcatccaaaacatcaacttttatctttacagtagcaccactgacagtatcaatataagcaccagtaatctttccttttattaaaacagtcttctttttatcatctaaagtcgcaatcacaactttttcttgtttatctgctaaagctgaggcggctaagaaatcagaattaagagcagttctactatttgcattagtattagaatcagttgtttgtacagttccaattatattttcaactgcaatttttgcttctttcccattaattaacattcctaaatatgttccaccagattctttcaatacctgagttacatacccctgtatataagagccattgtcgtctttttcattggttattactgttctaccaatcatttgctggtatgctgagtctgacatagtagtatttaaattctgcatttgttccattgatgcgaattgagccatctgacttacatatgcacttgaatcttgattttgggttggatctaaattacttaattgagcagataatatctttaaaaatgaatttttatccatagtattatcatttttctttaagatcttagttccattcgcagttgtacctgaacttgcaacatttactgtcgaatcatttaatggacttaatgtagtactcatacttatacctcctatgcaaaaaattctatattattatcattagcttcaatattctccactaaatcttcttcactagatgctaaattatttgctgcattactatttctagtattgtttcttctttgctcttctgaaagctgtccgccaaaactttgttcactaaaaaatgtagtatcatcttgataaagttcaatatttacatctgctatttttaaattttgctctccaagctgctttttaatatcagataaattttgagaaattaaagcagttgtatcttttgaattagcttttaaattcgcttttattactccatcctcttgaaccagctttatagttatctcacctaaatttccaggattgacttttactgttaattccttaagtgaattagtgttcataaacttaacgtcttttattaaatcatcaacaaaagtagccttattgattgtaagtcctctagtattatttacgccttgattctgtattgttgaagttctagatgcaaacaaattgattttatttaatgagtcatctttattatcatcaactaaagaatttaagaacttctcctcttttgaagctgtcggagtattattttttgatgctgaagaattatcactttcactattatcttgagaataacttttacttaacatatcttcaagtgttaaaactttattacctgcattctgattattttctagcaaatcagatatttcagacattattccttttaaactacttttagtagattctgtagcattttctttaatagtaccatttaaatttcctaaaagcttttccattaagtttagtgaattagaatctaacttactttttacagaatcattttttagtaattccattattttttccataataccatttaaactactattagatagtgtactgttagctccatcaattccaactttagaattaattgctccattggcatttatgctatcttgttttattcccaatttagcaagtaagcttaacaattctgataatatgtccttcagtttatccttagatgctgtcttactttccttttctagttcctcaagcttttcatttaattcttttgtatccttatcagtatctttaacttcagttgaattttgtttttgatttgcagaagatacatatccattatcctcatgatccttataatcactttttgattttaatacatttttaaaatcatctttcctagaagtgtatgaattattcagcgtcttagtaacttctgaagtagatttgcttgcaaaatttgtattagaagtaaatgacttcaccatactatctaagctgtttgacgaactatttgaatcttttgtagctgtaaccattattttcacctcccttcaagcagtttaattctatttagatgaaattcaattaagattaactgcatctcaacctccaaatcatagattaatattttttaatttttttgatttcttacatatgcataaagagctaactcatcaatattgatttgttctattctatcctgctcttttacatattcagaatacttcttttcttttaaggtctgaaccgtctttctttccatctgtttagccgttaaatcttttcttctattttcaatctcttgatttttgaccgctaaatccttctccgtagattttattccactttgaacaccttgaatgtaatatctttttaatttctgatatacaacatcctcattaggagatataccgttatatttttgataatttgccttaagttcttctaacttttcttcaatcttctttttctctctctgactttcagtaaataatcttttactttcttcttctttttccattctcatttcaaggagcttttctaagccaaacttaaatctctcagccaaaataaaacctcctttatttaaacattgatattaaagaattttgtgtaccttcaaaagaagttttttcatcaattccctgacatagaaaatcatttaatgattcattatagttaattgccatatcaatctttttattgcttcctttaacataagcccctatatttattaaatcctcagagtccttataagttgctaaaagatctcttgccatagatgcagcttctttatgttctttaggtgctattgtgttcataagtctgctgacactatttaaaatatcaatggctgggtaatgatttttatgagctaaagatcttgataaaactatatgaccatctaatattcctctaacagcatctgctataggctcattaaaatcatctccatcaacaagcactgtataaaaggcagttattgaaccatcgatagatgttccagatctctccataagtttaggtaatttagcaaatactgaaggcgtatatcctttagtagctggtggctcccctatagcaagtccaacttctctttgtgccattgcaaatcttgtaactgaatccatcataagaattacttttttacctttatctctgaaatattcagcaatagctgtagctgttaatgctcctttgagtcttattaatgccggtttatctgatgtagcacacactacaacagattttttcataccttctggtcctagatctttttctataaattctagaacctctctacctctttcacctattagtgaaataacattaacatcagcttttgcctctctcgctatcattcctagtgtagtactttttccaactccactacctgcaaagatgccaattctctgcccatctccacaagttaagaaaccatctattgctctaactccagtaggcattatttcttttattctttttctctttaatggatctggtgcatcattttctaatggatactcttctccatccatagatatactgtcgcagtctaaaggatttccaagtccatctattatatgtccaagtagcttatctgaacattttacactcagcggcttacgttgcggtacaactctgcatccaggtgaaattcctataagctcatcaagaggcattaatattacaaattcatctctaaagccaacaacttcacaatttacaggaacatttttctcattatatattatgcaaagttcacctacaaaagccttaataccttgtacttcaatagtaagtcctattactttcttaacaacgccttcactatatattgtcgaagtatcacttgcttttttaataagtttatcgaaatccaagtctaaatccagcacttataactactcctttacagtttccaatgcacagtgcacaattcacaattattgataacccactgaaattgtttttaaaaatttttcaaactctatagaaacttgctctcaattgtgaatcgtgaattatgaattgtgaattatttatccaaatattgcttttcgtatttgttccattccaatatccacgcccacttttactatgccactgtttttttccaaaactgcatttcccggttccataaaatcatctgcaagcacaaaaatttcattttttatattgtatgataccttccatctttccacctgcgattttaattcttcaatatgggctgaattcacctttaaaataacattttcttctccttttgagatcttaaaagcttcttcaataatattattcatcgcttcattggtactcagtgttttctttgtaatattttccgcaatttctaacgctaattgtactatctcgcttttcttactttctagatatctttcatagttctcatgcgcagatttcagcatcaattctgctttattaacaatctctgccgcctctgctcttgcactttcaattgtttcatcataagctttcctatatccatcatcatatccattttctaatccttgagcatatcctttttcatatgcttttttctctgaagcattggcatccatttgtgctctcaaaacaataatctgcttttcgtttttagcatcctgtattatcctttgtccaatatcttcatacctttttaaaagttcttcaggatcaatctgtggagcttttactacaatttcttcttcctctttttcctcttctatttcttcagatgctgcctttttactaacatactctgttgaaataactttacttgttcctgactttgcaaagtccttttttattaatctatacgatgattgcatcttctccacctcttgcaatgatgatttcattagcatcatctaaccttctaataacagaaacaatcttttgttgtgccttttcaacatccataagccttactggtcctaagaattccatatcttcctttaatgaagcagcggctctcttagattgattcctgtatatagaatttgcaacttcatcagaacatcccttaagtgcaagtgcaagatctccaacttccacttctcgaagaattctttggatagatacatcatcaagagatataatatcttcaaatacaaacattgaactcttaactttatctgcaagttctgcatcttctctttctaggccttctgtaatattcttttctgttgttctatcaactgcatttaatatgctaactaaagtttctacgccacctaaagtcgtcatttcagttcttactacagaagacaacttgctctcaagtacagcttcaatttctttaattaccattggtgacgtattgctcatagttgctattctataagcaacctcgctttgagtttcttctggtaattcagccataacttgtgcagctttatctggctgcaagtaacataaaattaaagctatagtttgaggctgctctgatataattacatttaacaattgatgagaatctgcctttcttgcaattgaaaaaggtctatattgagctgtagcttctgataccttatctaatatttcactagctctttgagttcctaacgcttttgataataatgttttagcataatccataccgccctcaattatataatctcgggctttattcatctgataaaactcatttaatatttcttctctttgttctggtgtaacagacgtaatattagcaatttcataagttattttttgtatatctgcctctggtagttttttcaatatccccgatgaggcttcaggtccaagagttataaataatattgctgccttatgcacccctgtcaattgatttggttcttttgacatagccatcacctctcattttcagtcaaccatgacttgattatttctactacttgctctggtttttctgttgcatatttctttatctcttcttctaagtgtgattttttagttttagcctcaaattctattggttcaaaaacatcatctgttggttctttaggtaatatagtatcatcaattaaagtatttaataattgttcattttcttctttcttcttctttcttctctttgcgacgaagtaaataataatacctaaaagcaatgctcccaaaattcctgcaacaatcatcatcttattcttgctagctgtagctgtctctgcattcatagcatcaatttctgccttagcttgatcctgagctgttgtgtcaaatgccattccaagcaccgaaactttatctcctctaagtgtatccaatccaattgcatttccaactgtattttcaagtgtctgttgcgtcgcagcatctaaatttccatcaatcacaactgatgctgtaagtcttttaacttctcctggtgcactaataactttagattcacttttgcccacttcataatttgtcttctgatcttccttacttgaagtcgaagggttattatttgtagctgtagttgtattactcatattattatcaacaggactttgacttgtagttgttgatcctgagttattcgattcctttgaattttcttgacttacaattactttattcggatctactactgtttgtgtcttttgttttgaatcaaaatccaagtttacattaacagtagccttaactttccctttaccaacgattggctctaataaactaacaattgccttttgcatcctatcttcatatgccttttcagcatcttgttgctttgatattgtttcagaacttactgaattattttgatctgaatttatatccttagtaagtaaattcatattatcatctataacatctatgttttctctaggtatgttttcagttgccccagatactaatgctactattgatttaacctgatcctcactaatagttgtccctttttttaatttcagataaactgctgcctttccaggttctttatccttcacaaaaacagaatccttagcctcagttatatgtactctcgcttcttctacttgtggaaaactttttattgtcttttccaactcaccttgctgcattctaactttttttattttaaattcttcatccgtcattccaaaggaacttccactatccattaattcatagcctttacttccagatgtcaaagttggtgctagctccaaccttaatttatccacttgatccttaggaacccaaatcgtatttgtgttactatctattttagtatcaacttttttttcatttaaactattaacgacagtttgagcatcagctgcatcaagatcagaaaatagtacttgatatttgttagaagatgagtaaaaaatcccacttataattgcaataataactgccacgattgctactattatagcagcttttatcttcttattcttggatttaaacttttccaaaagccccttaactttttctaaaagttttttcattattaagctctcctcaccttactacaattgcaacctcgataattgattatatccgtccaataacttgtctctagtttgtgctaaaaactgaagactcaaactagcctcctgattcttaaccataacttcatcaatattaacatcatcacctttaataaactttgttgcagtttcatcagcttgtgtcatcttaccgttggtatcatctactgccttttttaagacatctccaaaattaactgagttattgctttcattattgctcttatcactattgatatctttaaatttattattaaatataatttcattttgtgcaaacttatcttctattctcatttttcatccccctacttaccaatttctaaagcctttgaaaacatgctctttaaagcattaaaagtatcaacatttgcctcgtaagatctagttgctaccatcatatctgccatttcatttaatacattcacatttggcattgtaacgtatccattgctatctgcatctggatgcgttgggtcatatacctttcttaaaggtgatggatcattttcaattttaactgctttaactcctgccatatccttattagcatcaagagcctcttgaaatacagctacttttcttacatatgggcctttgccatctgcacttcttgttgtacttgcattcgccatattagaagttatagtatccattcttaatctttctgctgaaagacccgttgcacttatttgcatggaagtaaatgcattcatttataatcctcctttatctaatcaataattccaaatttcatagcttgtctaaatataattcctaattatgtattgtttatcactatttaataacagtttttaaattattaaatttattatttatgtcagttattaacgcattatatttaagagtatttgctgcttgatttaccttttctatatctaaatcaacattatttccatcacttctcatgctagtactcttatcctgttcaattgatatattatcaccgctatttgaaccactacttgaaaagtgacgtggattagtgcgttttaactctaattttgaaaaatctccctgattctttaaattttcctcaaatactacattaaatctcttataatctttcgtattgacatttgccatattattagcaattgttttagctctaacatttgatgctttaatgccttgtttaatcaaatcataagtagcatctgaactaatagattgtattgccataaattcacatccttacatttcgccttctacttgcataaatatctaaaactttcagtacaaatattttattttacacattattagaaatatgtaaaataaaatgcttttttcctcacaatttttacctgagtaaaatattacaatttattttgaccaattaataatttaattatagaataactatgcaattttatctataattttttgaaaaatgttttccaatttatttactaattccgattttttttggttttattgtaatattcccccacataataaatcttctaaaataaattaaatgccatttttagactttctgccgtatttatccgtactgtggcctaccatatatctaaaaaataaaaggtgtctataaattataggcaccaaaaatatttaaagcaaaataaatataaactttattaatatgttgcaattcacaatacacatttctcaattcataattacagctaaaattcttgcaatatttttagaattatcatgaagaattattttggcaacatatatataattatcttatgcctagttttgtaatactcgcatgttaacaaataataaaacaaatcaaacaaaatgaaagatcttactttccaatattcttcattaatattcgagataacaataacacgacattaaataagtccaattagtcttcaatataaattttttcatgaagctaagaactaagtttcactttatattttggcaacctgacaatcctagaaaataaaattctccttagactcatggctttgcggccttatttttcaataagtgtgctagtatcaatataatttgtccttttaaattataatgtattttggtttatttaaccacagttatttttaattttcgataaaatcatctaataaattataaatttcattataatttatccaataattttcgataatagaattttgtataaatataaatctaatatttcacaaaattatccattaaaattgtttaaatcatttattttagtttcaaaaaaataaactatagtaaactctgataatcagaatttattatagtttattttaaaataatcctcatctctgtattatttaacattagctaaaatatttaagcaatccttaggaaagttattactctgtgccattaatccaattgaagaattaactaataactgactctttgaatatttcatcatttcttctgcaatatctgcatcaccaattctactttgagcagtttgtacattaatatctttattgcttaaataatcagacgttccttccaatctattttgtatggaaccatatttacttcttatctttgcaaccatttgagttgctttatctatagatcgaagtgattcatcaatattatttatatccaaatcactaacccctaaatttgatgcacttacatcaaatataggtatgtcaacattttcatcatccatattccctatagcactctttatgatttttgttggatttaaatttaaacttgaagcacttggttcagataatttaataccattaaactctgtattattcgttaaatcatttatatcggctttaatactgttaatttcattttgaataatttttttatctgaatctgttagagtatctgaaccagcactaactgctaattctttcaacctacataaattatcatttatttcttgaagagaaccatcaaaagtttgtagcatagaattagtatcttgaatattcttacttgcagcatcgttagtcagtacctgtatctttaaagtttcatttttccctacctttcccggattatctttagcagaatttaacctgcttccagtactcacattatttagcgccttagcattatcctcaattctatttttatatgttttatatatgcttaatgagaacatattatgagaaagtctcaatttatataacctcctttttcattttacttgtatcattttgtattattttatataactactgcgattcacatcagcaatactaaataaataatagaaaaaatttttaatataaatttcttttcttgtatttattatcgtaaggattaaaactatctttagttttaacataaaacatatcatattaaagttttttattcattacttaattataactaaaacaggttttataagcttctataaaatttttattaaaacttattattaactatatataactaattatattaaaaaatatctacagtcatctttttcagctttacgtaagcgtaaaaaaattaacggatagataaatgtaaacctccattgttaaaattaacatagattttaacaatggaggtttacttatatgaataataatgaaaatataaagtggagagaaattgttgctggcttttcttcttacgaaggaacgttaggaaatttctgcaatgcaaatcacattactaaaagtcaattttattactataaaaagaaatttaaggatgaaaataataatttacagtttcatgcaatttccatgagagaagaaagagtaagaactgaaatcactgtggttccagctgatagacctaatataataatagaaataggaacagctaaaatatatgtaccggctaatgaaatagccgttttgagtaatttacttaaggatctgattgcaaatgttcaatcttaataaagttaatacagtttatcttgcatgtggaataacagatttgagaaaaagcattgatggactagtagtgattgtgcaaacgcagctaaagctggatccgtttgaaaaagccttgtttgttttttgtaatagacaaatgaatagaattaagattctccactttgatgaaggattctggctatactattttcgacttgaaaatagtatattgaaatggccgatgactccagacgaagctcttaaaattaacaaagaagaattgaaatggctccttatgggatatgaagttagaactaagtctaaatttaagccaattgaagtaagaaacagcttttaaagtaaatattgctataagcccttaattttgaacttttacaagtttcggaattaagggttttgtggtaatatatgcctacatttgttgtgaggtatgaaaatggatattttagatttagaagatcagcttgatgaaaaaacaaaattattgatttataaaatggaagaacaaattgaatcaaaggataaagaaattgataatttaaaaaaggaatcagcttttcttaaaggacaaattctaaataaaaacagaaaaatttttggacaatctagtgagcaagttgattcaagacaaatctcactttttaatgatgctgaaaaaaacagtgatcttaaaataaatgagcctctcattgaagaaattacatatacaagaaaaaaatcatcttctcatttaggaaagaaagataatttatccggcctagatagagttacaattgagcataaacttgatgaatcagaagcagtttgtgatagatgtggaaataatttagttgtaattggcaaaaaatcaaaagaaattttaaaatataagccagcagaactttacatagaagaacatatttcatatacatatgcttgcaaaaattgcgaagcggatgctgataaaaccaatataatttctgcaaaaataccaaatactttcttatataaaagtatggcttcaaatgaattgttagctcacgttgtgagtatgaaatatcaatatgcaatgccattatatagaatggaatcatactttaagatgatggatgttaatctttcaagccagacattatctaactggataataggttgtgcaaatgaacttcagcctgtttttgattatatgaaagaggatctcttaaaaagaaattatattcatgctgacgaaacatatgtcaaggttattgaagaaaatggaaaagattctaattcaaaaagattcatgtggctatatcgctccggaggcattgaaaatccagtaattctatatgattatcagaaaacaagatctggttcttgtgctgaagaatttcttgaaggattctcaggctatcttcaaacagatggatatgatggatataataaagttaaaaacataaaaagtctatattgtatggcacatattagaagaaaattctttgaaataatatcactcttaagccccgaagctttaaagcaatcacatgcgctagaagggtttaattattgcgaacaactttatgaaattgaaaaagaactgagggaacaatatatagatagtgataattattatgatgagcgacatgcaataagacttaagaaatctttacctattcttaagaaatttcaagaatatgtagatgttgaaattgttaatgctcttcctaaaagccatttaggcaaggcgcttgcatatgctcaaaaactattaccttatacgagaacctttctgacaaatggatgtcttgagattgataataattcagctgaaagagctataaagccatttgtaatcggcagaaaaaattggatgttttccaagacagcaaaaggtgcaaaatcaagtgcacttctttatagtattgttgaaactgctaaagccaatggcttagcagtagaaaagtatttagtatatttgtttgaaatgcttgcaaatgcagaatttaaagaacgtgatatattagaaaaatgtatgccgtgggcagaaagcactccagatgaactgcacattaagattagcaaatgatcatttctatatagggggtgctttaaaaccccctatatttatatgtagtattccaaaatatagtaatttgtaaaatggcgtagaatgaccctcaattttttatcaaggttcattacaaaaaatgccatattaataacgcactcagcagtttcttttaaatctgcaaatattctggctaaaccatatctagttttaccagtaccaaac

SEQ ID NO: 56 - DNA, 38798 bp, Clostridium beijerinckii
agatataacacttataaaataaaagtgataataataatatgaatattatagtcatttatcataattgtagcagctttaatgattcaacatatattatattagataactataataatagttaagtcatttgaaaacaaaagaaaattaaggagatgacaaaatgcctagtgtaattcttagtccaattgcggatgcatatatatcattgttaaatccaaacacgaactttggattctcaagtcttttatttacaggaagatttgttcagcctaatgacctatttagaagtttattaaaatttgatttaactggttctgttccatccggaagttctatagcaaatgcttctttaaatttatttgtttttagaaaagatcttcctgatgctgttttgtctccacagactgtcagcgtatttacaaatgcaagcgacttttctgaaaatacagttacgtggaataatgcaccggcaataaatccgacaatttattctataaatgtaactgatgcagatattggtatgtatataagtattgatataactaatttagtaatagattgggcaaacaacccagcaacaaattttggtgtaacattaactggtattgaaaatgtaattgatacaattataggttacttctcaaaagagtgggcagttgaaacacaaagaccattccttagcatagaattctcatctggaggaactggcgctactggtgctacaggtcctacaggccctactggacctactggacctactggacctactggacctactggtgccactggagaaactggacctgcaggaaatactggcagcgcagttactggcgccaccggacctacaggtgatactggtgtaaccggacctactggcgatactggtgtaactggacctactggtgatactggcgttactggacctacaggtgatactggcgttacaggacctactggagacactggagcaacaggacctactggcgatactggtgtaactggacctactggagacactggagtaacaggatctactggagacacaggagtaactggagctacaggtgatactggagttaccggtgatactggagtaactggatctacaggtgacactggagtcacaggttctactggtgcgactggaattaccggccctactggaggcattggaattaccggacctacaggtgacactggagttacaggatctactggagagactggaattaccggccctactggagacacaggagtaacaggacctactggtgatactggaataactggagctacaggagctactggagtcacaggacctacaggtgatactggcgtaacaggacctactggcgatactggagtaacaggacctacaggtgacactggagttacaggttctactggtgcgactggaataaccggacctacaggagataccggagtaacaggatctactggagacaccggagttactggacctacaggcgacacaggagttactggagctacaggtgatactggagttactggtcctactggcgatactggagtaacaggaactacaggtgatactggaattaccggccctactggagacactggagcaacaggaactacaggtgatactggaattaccggtcctactggcgatactggagcaacaggccctacaggtgacactggaataaccggtcctactggcgatactggagttaccggacctaccggtgatactggagttaccggacctaccggtgataccggagcaaccggcgatactggacttactggacctacaggtgatactggagttaccggacctactggagacacaggagcaaccggacctactggtgataccggagtaacaggatctactggtacgactggaattaccggagctacaggagatactggaataaccggacctactggagacacaggagtaactggagctacaggtgatactggagttaccggtcctactggcgatactggagcaacaggatctacaggtgataccggagtaacaggacctactggtgatactggaataactggagctacaggagttactggacctacaggcgacaccggagttactggagctacaggtgatactggagtcacaggttctactggtgcgactggaataaccggacctactggagacactggagttactggacctactggcgatactggagtaactggatctacaggtgacacaggagtaacaggacctactggcgatactggtgtaacaggatctactggagacacaggagcaacaggccctacaggtgataccggagtaacaggacctaccggcaacacaggagcaaccggaactacaggtgacactggaataaccggacctacaggcgacaccggagtaactggagtcacaggttctactggtgcgactggaataaccggatctactggtgcaaccggagctaccggaattacaggttccactggatctactggcgcaactggagctactggagttacaggttccactggatctactggcgcaaccggagctaccggaattacaggttccactggatctactggtgcaaccggagctaccggagttacaggttctaccggatctactggcgcaaccggagctactggagttaccggtgtaactggacctactggcgcaccgcaactagccttcaccgatgctggcggtacacttgctgcttctattactattggcactgaaacctcagtagtaagtacaaatataagtacgacaactggtcagaatgttaaagttgattttgcagttggcattcaggtagttactactgcaaattcttccatagtcttccaattaagactatacagtaatggtactttggttgcgtccagagaagttgagcgagtaatttcaagtgctggaactcagcgtttccctgttagtaacacttacgttgacacagcaacgacaacaggaacaacgacctatgacgtaagacttgtttttctaacagctactaatgtcgcttctgccactgcaattaatagatatttaaactgtatagctttctaatgattttttaatttttataaggatgctcttcttgagcatcctttcctctgtttgttttttaataaaacagaatcttttttccttttatatagaaatatattatttcacatatattaaagcaaggtagattaactactactgctgaccaaaaagtaaaattagactctttattagcaattcaatctgtatcaaaatatttttactaccatattatatagtgtaaaactttaaagaaggtggttatttgataactattagtctctgtatgatagttaaaaatgaagaagatgtaattgcaaactgcttggaatcagtaaaagatatagtcgatgaaatgataattgttgatactggctctgatgataagacaaaaaaaattgttaaaagatatacagataaaatttatgattttaaatggattgatgatttttctgccgcaagaaattttgcttttagtaaagctaccaaagattatattctttggttagatgctgatgatgttgtattgcctgaagatggcgagaaattcaaagatttaaaagaaactttagatcctactgttgattctgtaactgccaagtataatacagcatttgatgaatacggaaatgtcactgcaagttacaggcgtaatcgcctagttaagaggagtaataattttcaatggtttggcttcgttcatgaatatctagcagttgggggaaatataatcaatagtgaaattgcaataactcataggaagttaaaacaaactccaaaacgaaatctagaaatttatcagaataaattaaaagaaggagttgtatttacaccaagagatattctctactacggtaatgaattatatgaccatagaatgtttgatgaagcattgcaatactataataaatttttggattcaaagcaaggctggtttgaagataatatcagagtctgtgaaaaaatatgtgattattatcaatcaatagataaggtagaagatgggagaagatatgcatttaggagcttcgaatatgacactcctagagctgaagcttgctgtaaaataggcttttcttttttacatgaaaagaagtataagcagtcagctttttggtacgaacaggctacaaaactagaaaaaccaaaagacagctggggatttttcaatgatgcatgttggacatggttacctcatttacaactatgtgtttgctatgatagacttggagatcacaacttagcatatgagcataatgaaattgctgccaaatttaggcctaatgattcacgcatactatacaatagaaactattttaaaagtataggaattggttaaaaaagtacagagtatctttatgttactctgtacttttttattaaacttcaagtaacaatagcattatgaaattcataaaatatattaattttaaattgtctattataaataaaccgaatattttaaagaacctatttaatattataaatagctgctacagatgtaataaaaaaacaaatgaatttaagttattattgccaaattgaaaggtggcttatggttaatgcatgtccaaaaagttttaacaaatattacttgtaaagaatattgtacttctcataattataaatattctgttataaaagaagcacatcctcagaaaatatacttgccaaattatagtgataataccgaagagattgcgtctatagatagtaaatttcctgaaatttatacagctgaattatctaatgtaaatttaattggtgctaaccctataatttttgatgataaaaatttttgtatctatgatttagcatttaagaatcatgagaataaatttgattttagaggcaataacatttttgacatgagaaatcgtcaagcttttattggttatactgaatcatctaaaattattaaggaaggaataatgcttacttccagtgcctcttctaattattcccactttcaaattgaagtagcttctaaattattacttgtaaatgaaatttccgaatataaccacattccaatattagttgatgcgatttgtcttactatacctcagttaaaagaagaattggaaatgttaaataagcaaggaagagagattatccctttaattagcggttatagttataaagtaaataaactaatatacgtttcggatttagcgatttatcccttaaatctaaaaccgggctttttagtaaaatatgaagatattatcattgatgatctggctattaaacctctaaataaaaatttatcaatgcaaaataataatcttcatagaaaattatatatttcaagaagaaaatctcccataccaaggttagaaaatcaaattgaagtggaaaatatttttaaatcctttggtttcgaaattatatttcctcaagatatgtcttttcatgatcaattgcagactttttctgaagcagaattcatagctggtgcatctggtgctggacttacaaatgtaatatttgcaaataaaaatgcaaatataatatttatacagccaaaaaacattcaatcaccatggtactcaactatagctggtatatctgaattaaaatactattttctagatggaggtctttcagggcactccaatatgccatattatcaaggtacttttatattaaatgaagaatatttaagaaattttctaaacactctcttaaaaactaactagataaactcttttattatattaatatgataaaagtagttttaagtaactaagctgttagggaaggtgcagtatcaaatggtaataaatataaatgaaaataaaatcgcatttattacgtgcgtagatgatgaagcttcatatgaaagaagtctatcgtatgttaataaacttccagtacctagtggtattgaaattgaaataatagccataagaaatgccaaaagtatagcttctgcatataatgaagcaattcaaaaaagtgactctaaatataaggtttatcttcatcaagatgtttatatacaaaatagcaattttataaatgaaatattaaatatatttaaaaaagattcaaatatagggcttattggtatggttggagcaaaaatcattccagtatcaggaatatggtgggaggattcaaaaaaagtaggaaaagtctacgacagtcatagtggaaccatggacttattaatttttaatgaaattaatgatttatattccgaagtaaaaggaatagatggatttatgatgataacacaatatgatcttctctggatagaagatatttttgatggatggcatttttatgatgcctcacagagcattgaatttataaaaaagggctttaaggtagtagttcctaatcaaaaatttccgtggtgcattcatgattgcggaattgtaaatacaacaaacggctttgaagaatatcgcaataagttcttggatacttactctaaagacatatttcctttagtcagcatattaattcctgcttacaatcagactaaatatctaaagtctgcacttgactccgcactaaaccaaacataccgaaatactgaaattattatatgtgatgatagtactaccaatgatgtacaagctttgattgaacaatatatgttaaaaaacaataaaattaagtattttaataatggcggtccacttggtcatagaggtaagcttaacgttaataagtgttttagagagtcatcaggtgaatatataaactatttattacacgatgatctttgggactttaataaaatagctaaaatgattgattattttctttatgatgataccctctctctagtaacaagttatagaaaaatgattgatgagaatggtaattattataacgataattttagaactgtctgtcaatattcttatgatactctcttaaccggagaagaagctgggaaaaaacttcttttatcaatgattaactatattggtgaactgactactgctatgtttaaaagaaaagccttggaatttgactgtgaaaaccataatttaatcgactatgataaataccaaatatactgtttaggtgatatatccttgtggcttaaattattgcaaaaaggaaatatgatgtatatttctgaacctttaagtaattttagaattcataattctcagagcattcaagataccactttagctttctgggcttcacttgatttttttaagctgattatttcttcatatgaagatggattttttcttaaagataaaagagagcttctacaaagtcttttagcatggtataaagaatataatggagacctcattagatttattgaacaatataataatgaagctgaaaataatgaagaagtaatgaaacttaaagatgaatatatacgttgttacactaaatttataaatatattattagagtaattgcatcatttactaaacttaagcttatatcaatcgaagtttaatataagatactatcaaataataaataacaagtccacttgcaaggctatttgggactcgttatttatttgatagtgccttacttcaatgttttgatataagcttaagtccaataattgtttaaattatttatattgataggtaattttatcttataaataaagtatatattgatcatatgccacagctgatgcaccgaaaccttccttttgatttattaatccttcatttagatatcttcccttgttttcatttgatataccaaaatcaaaatattctttgtccttataaatttcattaattaacttatcaaaaataatatctaaagcacctattgctttaccatcttctgatgccgatatatattgaacatgaacattttccttattttcataaactactactccgcctaataaagtattatatttgtaagaacaaaacaactttatattattaggaaagatactagcaagacttttaatttcatttactgtatgaacaggtcttgattcatgtttttccatgagattctgctctaaaatcacccaatatttatcatagtccttagtttctaaaaaaattatattattttttaaggccttatttatctgtcttttccttctggtttcataatcattccttctatctaattttattgaagatgaaatatttctaatatgcagtttagcattatttataaataatgcatatagatcctcctgtgaaggaatctcgtgataaatatacggaataggcttatataggactgttttaatatttttccctttacaaaaatcaattaataaattgaacatttctaacatagtagttgttttcattttcttatctaatataaagccaccataggttaacccttcatggcttataagctcattaccttctatatttgctggaagtatccctatcaaatttttcttattgtcgtaaaacataagagacatatcagtaaatctatctttatgataatccatatattctctcataataagaaatgtagcgtttttacttttccttacaaattcattccaaatgctttttttatcttcactatacacttctaaatccattaaataattacgcctccaaaattgcatagccaaagcctgtcttaccatgcctgtttccattataaaacatgtaagttttattattgaattttactatattaggataacaaatcatttctgaatcccagccactttccgatttttcaattcctgcttcttcatctagccttgtccaatcaagcccattttttgatgttgcaaatccaattttatatggttcattggtgcttcttattgaataccacattttatacatatcattttcctttataacccatggccttccgaaaccatattcatattcattcttgaagcttatacatgtatgattttcactaatccattcaattccatcatatgaataggcatattttataacatatttaggatagcttttatcatttactagaatccagtttatagcagaaacataccagcatttaaaaatattatcttctactattatgctggttgcagaacgcaaatacggttcttctttcgttctatcaagaacgggtaccatagaggctttagtaaaattctccccatcttcgcttgtagctaaacctgcaaaaagcatatacggtactctttcacatctttgccacccataataatataaatattttttgttatccactgttaagatgcaggatggattaaccccagaatcgtcaaaggtcccaatatctcctatatctaagactggcttctcacttatattttttatattttttaagtttaacatgtccacatcaatataaccgattctaccatacatttttctatccagtgtggcaaaataaattcttatagtgtcattacttataatatctgcagttggtatgagtgcatagctctgcatccactcaaattcacctttaggtgaaaatattaacccttgcttattccatttcataaaatcattcctttaaagaattctttgttctttcagataaaaattccacatcagatgctttaccttttacaattttaccactctcaatatcctttaaaactaaagcacctgccccaataatacagtcacttcctatattaatattatttattatcgttgcattaacccctataaaacaattatcgcctatattgcaaaatccggatacaactgcatgagatgctacaaagcaattatctccaaaccttgaatgatggccaatatgatttccactccataagacagtattattccccaattcaacaaatggctgcaccacattattttcaaatataaagcagtgttctcccatctttacatttttccatacaaaagcatgtgaactaatatatgaagctaatttatatcctttattcttgcattccttcattaacctcgtccttaatctatttaatttcttatagactgtcgcaacaaaaacatagtgattctctgggtcatacaacttttctatatcttcaagaggaataactggtaatccaagcatttctttatcttttaaataatttttttcaacagaaaaggctacaacctcataatcagaatcataagtaaaatattcatatgctatttgcgcaaatgcgctatcaccaataattattaattttttatttttatccatttatttatcctcctaattaaggttttataattaatatatcttctctcctgtttgccattggaagctttttatcctgaggaagtatataactgtcaaatcctgctagcctacacctttgaataattgacattacaactgagtcatccatattttttgcctcaatattgttgaattttactataggttgctctttagtacctgtgaaattttgatgatactttataccttgatttgaagaaaaaaatctttttctttttgatatattagggatatctccaataagcattactcctaattcttttaaaagagtaagtgaagtatcaataaaattgaatatactttgttcagtaaatgcatattgaattacgctgtaagttataatacaatcaatttttcctatataattttctataaatttttcacatgatttaggataatatcctttgacttttaatataaaatcatattccggcagatgattcagcatttcttctgaatcaatgagtattaacttatgcttatttgtcttgcagtattcaattaacattaaagttaagttactacaaccgcatccaatatctaaaattgttttatttttttcatcttccattccaagtttagttattatgtcatcaaatataattttttccttattctgtctatattcaattggaaaaccaactttttcaatatcatttaatttatcattttgggctaattccttaaatttttcataactcaaatcctcaaatatatctgattttaagtccacattatacctctccttaaatatttatcatatattgcaaaaatgattcttcatcataatattaaatgtatttcaagaattttagtcgtgattgtgaattgcaacatatatatcatactttctaatttatgttttttatcacaattatagaccatccaataattttttattaaaaatgctattaatataaaatcaaataaaaaacaagtttatattctaaaatttgcttttaaatttattctatgtaagctttaagtacactttcttactatcagcatagaatatatagatgagctaatttttttatgatatggagatgaataaatgtataattgttccatgtttaaatttttaagtataaatagcaactatggaaatctaacgcctattgaggaggtatttgatgttccttttgacataaaacgaatttattatattactaatgtcccacatggtgtatcaagaggttttcatgctcatagaagacttcatcaggtgctcatatgtataaacggctctgtaaaaataaaattaaaaaatcctaaggaagaatcagaagttatattaaacgactcatctgatggattatatattggtccttacgtttggagagaaatgtatgattttagtgagggtgcgattctcttagtacttgcatctgattattataatgaaaatgattatatacgaaatattgatttttatatgaatgaagctgcaactagatattaggaagtgattttatgaaaataccttttttaaaacttgaacaaatgcatgctgaaataagaaatgaaattttatctgctttcgaaaaaatatatgataaaaatatctttattttaggagatagtgtaactgcttttgaaagagaatttgctaaatactgcaatgtcgcccattgtataagttgtggaaatggattagatgcactttcaataattttacaaggatatgatattggagaaggtgatgaaattattgtaccttctaacacttacattgcaacttcacttgctgtttcttatgttggtgctaaagttgttctggtagaacctgatattaaaacctttaatatcgatgtaaataaaattgaagctgctattacttcaagaacgaaagcagttattgcagttcacttatatggtagacctgcagaaacagataaaataaaattattatgcgagaaatacaacttaaagctaattgaagatgctgctcaggctcatggtgctatatatggtggaaagaaggcaggcaatcttggtgatgcagctggttttagtttctatcccggaaaaaatttaggtgcattaggtgatggtggagctatcttaacaaatgatgatattttggctaagaaggtccaagctataagaaattatggatcaacaattaaatattataacgaatataaaggagttaattccaggctagatgaaatacaagctggatttttgagcataaagcttaagtatcttgataaatggaattttgataggcaaaaaactgctaaactttatttagagggaattaataataataaaataattcttccatatgtagactctgttcaagaatccatatggcatgtctttcctataagaacagaatttagagatgatctacaaagttatttgaaaactaatggaattggcactttaattcattatccagtacctattcatcttcaaaaggcctataaagatttaggatataaaccaggcgattttaaagtggcagaagatatatcaaataccgaattaagcttgcctttgtggtatggaatgaataaaaatgaaattaattatataatagatactttaaacaagtggtaaatatcgcgagaataaaatttttttctttagtaatatactagcaaatgctcaaaaggacctacatttttattttgtagatccttttatataaatacttaattattttctttatttaatttaccttttatttgttttgcgatttcatttgcagcaatcataccagtttgaagggcaccttgttgacttacatgcttttgtgatatatgctcccctgcaaaaaatactcgattttccatttcaggaaccgttacatcataagaaaacagtgttttgtcttcaggctttgataatgctcctgccgtccatatatactgtacatctgaccaaatcaatgatttgtaatcaattactttgtcatcaaggtaatgaggagtaaggccatgaactttttctatataccttattacatcatcaattaatagttctggactttcatttccaagtctcattgcttcctgacaccaagtataactagctaataatacgccttcttcatttggagttactccaggttttaatacccatttaccatatttattaactacagctttagagtgatcagaaggatagtaaattgaagttaatggaagatcggtaaacgagcatcctcctattatcttttttgatgcatttcccatttcccaaaatctttccttaagaaatagatatatcttatgtgatgtctcattgttcatttcatttatagcttgtattttttttgttgtaaaaagaggttctatttcaattcttcttaagctagaaaatggtattgcacatattacataatcaaattcttcagatgtttttctattatctctattatctatatatttaagtataattttatcttttgtagaatcattatatattccacaaatagggaatcccatttttatttcaattttccctaattgttctttactaatgccattataagcttcttcatttctatcacaaagcgcttcatataaagaatgaggtaaatttatcattccttcagtaatacgataattatattcaaaatcagctgtataatattgctgaagcatctcagtaagacttaaattaaaaaattgttctttacctcccaagcagccaagcattgttataaaatcctgactgacatccatattcttacacgcatttctataacttaatttatctatgtctattatactatctgagtattctgcttttacttgaattaattcccttcttacttctgtagggagcgatttcaaatatttttcatatatctttccataaaattcaaaccatatttgttttttctctgtttcactcagattaaatttagaatatatattattttctacactttttcctttagcatcatttactgctcgttcatttctaacatataacaaagcattatcattattatttacaaagggacttgtatgaagtttaaagagatttatataatgccaagtagtttcatgagatataggtatactcattggccctaattcaccataatattttttatttctatcaaaataatgggtgtatactcttcctcctatcctctgacttgcttcaaataaagtaatgttacatcctgtctttctaagttcaaaggcagcagctaaaccagcttctccagcaccaattactgctacctttgtatctttagctattcctattggacaaatatttgttatctcttctggagggctcattaaatcaattatattctctagatcatctaatctattttgtaacttgagtatatattcaagcatggtatgtctttcgcactcaccaggattatctatttggtaaggagagtttgaattattataagaattcataactttcacatcctaatatctttattacatatataattatatatgtaccgcttctttagtctgatgttatcctgttttataaattctcattattgccactaatagtttttctatatcatcaaatgtattaaaatatccaggactaactcttactgtgccggcatattctgtaccaataagttcatgtattaatggtgcgcaatggtaacctgttcgtacagcaattccctcttcattcaattggtcaccaacaatagaagcatcaattccatctatattgaatgaaattactgatcctcttctctttacagaatcacttccatagatctttatataagaaagttttttcagttcttccaataagtatgatattaattccttttcagatttttgtatgttatctattccaattcgattaatgaatttaataccttctccaagaccagcaataccaggtgtatttaatgttccactttcaaactgatctggcatgaagtctggttgaatcataaaatgagaattgcttcctgttccaccttctttaaaattttttaattttattccttctcttataaataggccgcctgttccttgaggtcccaacaatcccttatgtcctgaaaaagccaataaatcaatattattttcttctacatcaattggaatggctccaacactttgagatgcgtctagcataaatataattccttttgactttaaaaggtttcctatgtttttgatatcttgaacactcccaagtacattggatacatgattaataatgaccatttttgtatttttatttatcacctctttaatatccctaatattaacataaccagctttatcagcacttactaatgttacttcaaccccattttcacttagagagtgcagtggccttaaaacggaattatgttcgatcactgtgcttataacatgatctcctttttctaaaactcctttaattcctatatttaaagcttctgttgcattgcttgtgaaaatcaaattaaatggactaggcatattaaataacttacatatttcttctcttgtttccataattttcgaagccgcttttatagccatgtcatatgaacttcttccaggattagcagcatagcttttcatacattttagtacttcattataaacttctgatggttttggaaatgacgtagccgcattatctaaataaatcatataaagctccttattaaatataagtgttataccaattcaattgttctaatagactctattaatatttaacacaataaattgtaatgaaattagactcaataataaaaaggatgattgaaattttagagtttactttatattaagtaatcatttgtataatgtaataatgcatagttctatacaaaatagaagaaacatctaaaagtaaaatttctaatttcgaaataataacaatcatccttgtagacaaagctcttacaaatgattctgaaaatcacaatttaattttctttaaaagaacttaaaaggtctattttctaatatttgttatagaacaaggtttaatagagctaaaagaaacttttagaagattatcatttaaaagaaatatttgctaattgttctcgtcagcattatcatcacaatctgggaacaatggctctaagttttgatcaggatagaacttaggaattggagctcgtacaaatttttcacatgggtcttcctctggttcttctttacatggctcttttggtactggacaataatcataagcaggaatgagaagttgtacaataagttcacattttacaacaatgtagtaacctaaagttatatctaaaacactgtcacaattttcatcttcaactatttcaccatttaaagcttgagcaaccatttcaagttttattatattagaatctaaatcttgtgcatctataactggtacataacttgcagaaatttgtgctacagaatcaggacaatagaacttaccaattacatccgttctattaatttcatataattcacttttgttcacaccattgcagtcaatataatctgcataaaaagaaataatgtaagaaatgactattttcttaaagccaggttttcctttaattggaatcttatctaccgatattaattttacattgaagtctctacttccaatatatctctttggatctattagtggatcgcttcttaattcgcaatctgtagtatttgtatcaggaccttcgcagtatacaagacatctttttattaagcattgatcaaagattttaggtatttcaacgcaaactaactcagaaggatctggtaaacgtccttgtttatttacaataccaggacgtggtgagaattttttgaagttaatggacataaattttcctcctcttgaaagattatgataaatgtaaatttatttagtatttatagtacatcatatgtgtgaacataaaagtggtgacatttaaaaaaaaatttttttcatttaattaataacattactcatataaaaataactatttaatcatctgatatagataaaagatatataacttagggctatgcagtggctttaagttaatatcttcactagaaattataaatattttttcagaataaaaatatttataatttcggtaagttcaaaaatgagtattattcttaaattacatatatatatgccgcaatgcataatacacatctcacaattacggctaaaattcttgcaatatttttataattatcctgaagaattatttttgcaatatatataagtttaaattatacctctttaaatcatatattataatctggatatttactcaagtctaactcatttaacattgaattagctttatccttttcagataaaatcacattttctatattttctaaaggccaattaacatttatatccggatcgttccacataattccgcattcatactcttttgcataataatctgtacatttataatttaatatagcttcgttggaaattactaaaaaaccatgggcaaaaccttctggaacatagaactgtttcttgttttcttcactcaaaacgattccttcccagttaccataagttttggagccatttcttaaatcaacggccacatcaaaaacttcaccttttgttactcttataagcttaccttgactatgctctctttgaaaatgaagccctcttagaacccctttaactgacttagattcattatcttgaacaaaattcatattaaagccagctgcttcaaattgttttttattgtaattttccataaagtaacctctattgtccccaaaaactttaggctctattatataaaggccttttattttgctttcgtaaaaactgaaatttcccatattcacacctctaactttgtaatacacttgttattatattcatgaacttcgccttcctctaccatatccattaaatattttccatatcctgtcttcattaatgatttagcaagttctataactttttctgatgttatccagccttttctataagcaatttcttcaagacacgctatatatattccttgggtattctgaattgcatcaacgaaattagatgcttgaagcatagatgaatgtgttcctgtgtctagccaagccattcctcttcctagtagatcaactttcaattttccttcattcatataggctttatttagatctgttatttctagttctcctctggcagaaggttctaactctttagcctttttgactactgtattatcataaaaatagagacctggtacagcatattttgattttggattttctggtttttcttctaatgaaatgactttgccgttagcatcaaattcaaccactccaaaggcctttggattttgaacatagtaaccaaatatatatgctccactatctagattagccgctttcattaaatgttctgaaaagctttgtccatagaaaatattatctccaagtatcattgctacattatcattaccaataaacttttcaccgataatgaatgcctctgcaaggccattgggtttttcttgaatagcataatcaatatttaatcctaattcttttccatcattaaataattctctaaaattttttatatctcttggagttgatataattaaaatgtctttaattcccgaaagcattaatactgacattggataataaatcattggtttgtcatatattggcaccatttgtttagatatcgattttgtcactggatagagacgagtcccagaaccgcctgctaaaataattcctttcattttaatcccccataatattctgattaattgtctaacttcagaataaattcgtttattaattatgttatgaaaaagtatattatatagttactttctaaaatcataaaatttaagttgtaattaatgcaatatcccccatttgtaacaaaatataatacaaatcatactatgtaatagcatggcatacaatgctatgtttgtttataaagggggttaaaaaaattgtgggatacgatgatttttttgatgagaatatagataacaaaagaaaatattcttctattgataaaaaaaatgacgatagatatgacttagaatgcttaatgggattaatagattttgataactgtaagagaggacctcaagggccacaaggaccacaaggtgctcaaggcgcacaaggagctcaaggaccacgaggattccaaggaccacaaggagcacaaggagctcaaggaccacgaggattccaaggaccacaaggagctcaaggtgctcaaggtgcacaaggatctcaaggcgcacaaggtgctcagggatctcaaggacctcaaggtgcacaaggagctcagggatctcaaggtgctcaaggattccaaggaccacaaggtgctcaaggagctcaaggtgctcaaggattccaaggaccacaaggtactcaaggacctcaaggtgcacaaggtgctcagggatctcaaggtactcaaggtgctcaaggtactcaaggtgctcaaggattccaaggacctcaaggtgctcaaggagttcaaggtgctcaaggagttcaaggtgctcaaggagctcaaggattccaaggaccacaaggtactcaaggacctcaaggtgctcaaggtgcacaaggagttcagggagctcaaggtgctcaaggcgcacaaggtgcacaaggtgctcagggatcacaaggagctcaaggacctcaaggtgcacaaggtgctcagggagctcaaggtactcaaggagctcaaggtactcaaggtgctcaaggattccaaggaccacaaggtgctcaaggagctcaaggattccaaggaccacaaggtactcaaggacctcaaggtgctcaaggtgcacaaggagttcagggagctcaaggggctcaaggcgcacaaggtgctcagggatcacaaggagctcaaggacctcaaggtgcacaaggtgctcagggagctcaaggtactcaaggagctcaaggggctcaaggatcacaaggagctcaaggacttcaaggtactcaaggacctcaaggtgctcaaggattccaaggaccacaaggatctcaaggacctcaaggtgctcaaggcgcacaaggagctcaaggtgcacaaggagctcaaggtactcaaggtgctcaaggatctcaaggaccacaagggactcaaggtgcacaaggacctcaaggatctcaaggattacaaggaactcaaggaccacgaggattccaaggtgctcaaggaccacaagggccacaaggtgctcaaggtgctcaaggaccacaaggtactcagggattacaaggaactcaaggacttcaaggtactcaaggagctcaaggaccacaaggtggacaaggattacaaggaactcagggacctcaaggattccaaggcgcacaaggaccacagggatcacaaggtgctcaaggattccaaggacctcaaggtgctcaaggatcacaaggagctcaaggaccacaaggaactcaaggagctcaaggagctcaaggaccacaaggtggacaaggattacaaggaactcagggacctcaaggattccaaggagctcaaggaccacaaggaactcaaggacttcaaggtgctcaaggacctcaagggcctcaaggattacaaggaactcaaggacctcaaggattccaaggtgctcaaggacctcaaggctcgagagtaattaatatttatcttagttcacaacaatcaattcctaataattatttctttggaataggtatagactcgattgatttccaagcaagcagtgtagttgtacctcaaaacgctacaattactgggctaatttttagtattaggaatgagcctttggatttaaatcaatctgtaagtgcagagatatatagaagcacaaattgtggtgttaattctacagcaacaggaatcatagcaacagtaacaggaccaaatcctacaaattgttgtgcatctgtccctgctaatttatctgtaaatcaatgcgatttattaagtgttagaatttctagagttggtaacactgctgatttaattaacggagttacagctactattatattaactttaccataaatatcaaagtcctaattaattaaaaatagagtgttgataataaaatcaacactctattcttaattgtttaatttagggacaaaaaacaatgtactaagtagctctgctaattttgcagataattttattattctggaattacaaccaatttctcgttgcatgaggagcaaaattttgcgtacttaatacatgtttccagcgaatccgttggttccataggccaccaacgaattgatcccataggtgccttagaagcaaaaagctcaatttcctcaggaatacgcccgacaaccaatacctcaatatctttaaagttagtttctaatcctttttttagtgtatctatcaattttttatttacatttacaggagatgagtatggaattggaaagattattgaaagtttattagaattctcatcaattatattcgctgattttaaagctaagtctccttcttccctctcccatacacgattatatgatataaattcctgtaatccaagctcttcaactcttttgtgaattctctcactataatatttatacagttctcctattaaaatttgaatctgtttgtttctggtaaaagttgaattatctccattttcatttctatattgtatatatagcaaatcaggaatacatatatattttgtgcaaagaaatgttcgaactaatatatcgtaatcatctgcaactaatagttcttctctatgccctccaagcatgtgatagcagtctttggtccatgcccgaggatgatttggtaatccagctaaatgaagtatggttgttccatttattactgtatttcttaatacattttgccatctgtgcatttcatgaacccagactcgataatatacaccatatccatatccacaatcccatccataccaatttgagatattgcttccgacatatggttcagtgcaatctccatatacaaatccacaatcaggatgacgtttaaatgcagctacaattttttctaagcaatcatgtgttaattcatcatcatgatctacttctaataagatctcaccagtgcatataccagcagcatagcgttttgtggcacctatataaccattgcggtgatcttgcctatatcttcttacacgaggatcatctagaattagtaagtcctgattgtaagtggtatcattatcaccagaatcgtctacaattatccattcccaatttgaataggtttgattcagaagtgagttatatacgcgtttaattttatccttagatttatatgcggctgtaaaaattgatactaatggaacatcagaagaaaacttagtaattggtatttttttattttctggaaggagatctgtacattttagccagcaatagaataaatgagatggttgaatatcctttattgaatcataatgcagccagcgttttctttcatgatatggtaatgcatatagtgttgtaaactggtctgcatcgcctcctattgaaacatatacacgtggggctttagggtttatttttaaggttgtattttctactttgtataattcaacttttattccactttcaataatttctttcaacattttttcaagttcatctaatgaaatttttttatcaacaaacatatggactgttaataatggaacatcattaaagtgcatttttatcctccttttatttattaagttaaacttgccaagatcttttgtgaatttatagatatccaacgtatatttagacttatgttaatcaaacaaaattcaatacatttttattaagacatctattttaaatgatttgtttccagattatataataattactacttgcttttatcaatgtaaagggattctgttatattattttgcttaagaattcaattaattatataatattatatttttatgaataagttacagcatcgttgtatttcttattaatattaaacacaaaaatagtctatgtatattctattaggataatcttttataattatctttcataaagtacacagactattcaattgcgttattataataataatcgcatgatattcttatataagaaaagtcatataattatattagatatttctaaaacgtatatacttaattgtatttttacagttattatttgtagcagattgagcctagtgtaaacactacaacaaattcaattttatctccacatttatttatagccttaaaatgtaagatatcagatggataaccacaattaagcaacttttttagattgtgttttggcataaatattatacctgaactaactactttataatatcctaggcgtccacaaataaaaacttcatcacaaatacattttttattgcagccagtgtatattatttcaagtgtatcacagtttgaagaacatattgcactagctgtgaaatattgtaatttgtttggataaacataaattattttattttcatttccaatgctagcttctagattacaatttattttcattactggagcttcacacttattatcacatgatttatcagtttctttctcttcaataatctctttttcttcaatacccataattttcctcctagaacttagagtataactgtttatttctataaattgtttttcctaatttcatcactttatttataactgttatattttattatataaacaatttttttaattgttacacttaatcaatctactttgttataaactgctcattggattttaataatttcatttaaatttaggttttttaacaataacgtctacataaattacacgagaatattgcaacaaaatcataagactcatgactacacttatctgtggctgtgaaatgtaagatatctttttttttaggatctaatttggaataagtttcagctataatcccagagtgcactattttatatactgcaagatttccacgaattccattatttgaagaacatccattatatctaatagttacatctccacaacattttgatacatcaactgtaaaaaattgagattcgcctggaactaaataaagcattttatttattgtatcgaaatccacttttagattacaactagcataaatcttaggttcgcttccttggcaacaagtgtcatgttttttattttcctctttcccccaattttctacattttctttttcgttcaaacaatagtcacattctatatcaaaaaaatcatcatctacaaaattctcgtcatcacatatttttttagattcatttttattgtatgtctctttttcattatccattctacttcctccaattactggtattaatgatttagcttattctttagaaatttataataaagtaaaatctgtggacacttataaaaaaggatacttaattaggttctgtacagaaagagaataaaaaatatacacctataaaaagagcacgaagtgtaattaatatcaattcacctataaaaagaacacgaagtgcaattaatatcaattcgcctattaaaagagcattaaggcaattaaagacttactgcatgcagtcgcctgcgattttattatattctcttatataataatgtattaaatattattagaaatggtacaaaaggtaatataaaaacataatatgtattaaaataaaactttttattacattgtagactaaattaattttaaatttatagaattaatatttagtagcgatttattttctttagtgaaaggaagtgggattttgaaggataacgaaactaaaaaagaaaattatgaatttaatgtacatccttgtaacttcaaagttaatattaaagaaataaagcctttttatgtacactcacgaaattatatttttttagacttacaagtattagattgttatagtgctaaaagccgtttaaggataaaatcatgtcctcacaatggtaagctatattcagttgaaccctctattcttgtatataagccaacagctggattttgtggttatgatttaatacaagtactgattgaagatgagtttggtggaagccatatagaaaatatcataattcgtgtaataaattaaagagtgagattttaaattaatctcactctttaactacaaagatataaataaaattttattcatttgattcataattagttatttcttttattgtattatcatcattcataaaaacaactgaaggcttatattttctagcttcatcctcattcatttgtgcgtaagctattataataactttatcaccaggttgtactaaccttgctgcagcaccatttaaacaaataactcctgattcccttttacccggaatcacatatgtttcaagccttgcaccattatttatatcaactatttgaactttttcgttttctaagatacctgctgcttccattaatgttttgtctattgtaatgcttcctacataatttaattctgcctgtgtaactgtagctctgtgtatttttccttttaacattgtaagtatcattaaaatttcctcctgaaaatctgtttatttatctgttcataataatcaaattagtatatattccttttcggtatcttcatagatactctcattaaattgaacttatcttttgaagtatattccatatcagaaatgaaggtcatgcttttgtggaagcgttacattagaggatttagctgtagatatttctttagtggaagttgttccatttttgcttgtcctgaactcgtttcaggatcatgcagaaatggtgcaactcctgctattagaaattcacagcttaatcctcagtaacctgaacaaatgcatgatctttatttcggtggattttacgcataagtacattttcacctcagatatctatattattatatttcaaatgtaaaattatctattaatcttgtttttcctatataaactgcaattggaatcaatacatttctctcaatgatttcaacgctttttagtgaatcactatctacgatttctacataatctatttttgctaatggttctgaatttagtacctcttttattgaatttttaatattattagcatttctttcaccttttcttaatgcatctttagctatttctaaacttctacttaatactaatgctgcttttctttcatctttagaaagataagtattccttgaactttttgctagtccgtcttcttcacgaattataggacaagcaactatttctacatcaatatttaaatctctaaccattctttttataacagccacttgttgagcatctttttctccaaaataagctttgtccggagtaactatatttaaaaattttgaaacaactaaacatactccatcgaaatgccctggtcttttagcaccgcaaagtacacttgtaagacccgatacactaacacttgtagatttatctccataatacatttcacttggttctggattgaacactattgctgcgcctgcattaatacaaagttccaaatctttatttatgtttcttgggtaactatcaaaatcttcatttggaccaaattgtgttggatttacaaatacgcttacaacgaccttatcattttcttcaacagctctttttataagactctcatgaccttcatgcaaagctcccattgttggaacataccctacagaaagcccctctctcttccatgccttaatcaagcttctaagctctttaatctctttaactaacattactgatcccccttctcatcctaatactaaaatttaggttcattatcacataagtataaacttacagttgaatatctatatagatactacaatcttaaactatacttagatcatgaaatatcttccaaacaaaagtatattattcatttcgtgagttatcgcataaatctaagatttagtacaatttctttaattcattttcatctattttaaaagtgtgtttttcttctgggaaatctccagcttgtacttctttaacataggagctaattgcatctctcataaccgtacctacatttgcatattgttttacgaattttggcacaaagtcattaaacatgcctaacatatcttgataaactaaaatttgaccatcgcaatattttccggctcctattcctattgttggaattgaaactgcatttgttataagctctgcaactttttctggaattccctcaagaacaattgaaaatgcccctgctttctcaataagtacagcatcatttataagctgttttgccgctgcttcactcttcccttgaactttaaatcctccaaaagcatttactgattgaggagttaatcctatgtgtcccataactggtatttgagcatctacaatagctttaatttgagctgcaacattagctccaccctcaagtttaacagcattagctccaccttctttaattaatcttcctgcatttaaaactgcttgttcgatagatacatgataagataagaaaggcatatcacttacaataagagcatttttagcacctctcttaacagcttttgtatgataaatgatttcatccatagtaacagctaatgtatcttcttcacctttaataaccatgccaagagaatctccaattaaaatcccgttaacaccactctcatcaatgatttttgccattgagtaatcatatgctgtaagcatacttaatttgcttttttgttctttggcttgcttaaaagttaatactgtatttttcactaatttacgcctcctaaaaacttataaatttccaaatgcttttttgaattacttaatacattttctatttgactcttattttccatgctatagaaacattcttctatattttctgtaatatctgcattatttttatctctcaaagccacaagttttaatagattaaaagataatatcttatataaatctttatctttgtcctctaaaacagaaatatgcttctcaattgttgtaatatctccccttgctataggacctgttaaagaattaacaaacccttttgcataaatactatcaatattaccctttattaaaggttttaaagcatttaaagcttcttcatcatctaacccaagtttttttaaataactcgttcctatatcaagcaaagataatgccaaattagatacaaaaacgctagctaaatgatatgttgaggaatcttctgcttttctaacaaagtacttatttccaataagcttaagtacactaataatagatgaatcttctaaaatatcaccttcaattgaaaaatatatatcttccaattcttttaattttgtttctttactagagaatgcaaatattggatgtagagaataaatcattgcaccagaatgtttcgcattacataatacatttgatttgagtgaaccacttgtgtggcaaatagatttgttatttagatcaaattttgataattcaatatctataattgaaatgatgtcatcaggagttgtaataaataatatatcactatctttaataatatcttgaatgttgttataaaatttagattttgtaatatttgctgcatctatggtatttaagtcatcttttccataaaagccgcttaattctatccctttatgagtaaagtagcgtcctaaactcacgcctaccttccctggaccaataaatccaattttaatggtatcacctccatatacgtgtgagtgatacaacatcctaatttcaatctcattcattatagatatgagttgtattatatataattaatgctaaaaaatttggtgtaactctttttcgatactacccactgatattctaccactatgttttgattttaacaatgataaatttttttattctttaggaatttatattcctgtaaaatctatgggtaacttaaaaaaggttgattggatagtttgagtatttaaaaaagaataaaaagaaaatcttattcgcctgccagatttttctcacatgcattcgaaaaggcagatgcgtgaaaaaaatctcctgctccacagtcgcctgcgatttttttatttaaatacaaaaaaaagcaagattactttttaattcttgctttctcgtatttttataaaaatttacataatttcctctattgtaattacattttcaaggctatgaagctttaaaatgtactctgaatgattaattttttcaggtaatgttaaagtcattttaagcccaattatatgattgtcaagctctttcgctttcttaagttctagattagaaatttttgttccatctaattttattgcattcataaagttcgtaacgcctgctatatgcttgagttcagcatatatatccaattcgttagacttagccctataatgtaaatctgctttatgaagtactgttaatacacctaataagaaaaagcatgaaataatagcgccttcataaaaaccaattccaatggcaagtcccatacatgcgcaggcccaaagacctgcggcagttgtaaggcctttaacttcattacgcccaactacgataatagtacctgctcctaggaatccaataccacttataacttgagcacccattctgcttacatcatcctgaatgtgtaatatatctctcatgtattgtcctgttatcataattaaagttgcaccaatacaaactaatatatgagttctaagaccagccggccttttttttcttcctctttcaagcccaataatccctgcacaaattgtagcaagagtaagccttaaaattatagatgcagtattaacttccctcaagtagtttgtcagttcatttattgtattatccatataaccaccttcataattgctggtatcttattgttaattataattaaataattctaaaatttcattttcatttaacgaatgtatgaattctcctacggataaatcatcacctaaaatcttatttattagctctcttttggaatcctgtaattccactattttttcttctatagttccttgggcaattaacttaatcacttctaccacatttttttgaccaattctatgtgctctatcagttgcttgatcttcaacagcaggattccaccatggatcaaaatgtatcactatatccgcgcttgttaaattcagccccgtaccaccagctttcaaggatactaagaatacagtgttttcaccattattaaattcgtcgaccatcttcattctattgattgatgaaactgatccatctaaatatgaaaataagaaatttttttctttaagtattttgcttatattctttaatacagaagtaaattgcgagaatactaatattttatgtccctcatctatactttgttccaataattcaattaatgcatcaatttttccactacttcctaagtaattatccatagttacagacggatctaaacatatctgacgaagcttagttatataagccaaaatttctattttgctcttactaaactcaaaatcttcgactttcttttgaattaaatctttagtatagttagcataggtttcatatacgactttttgctcatcacttaaaggaacaagaagtcttttttcaattttatcaggtaattctttaattacattcttcttataccttctaagaataaatggttttacaagtctatttaactcttcaagaatttctggtccttcttcaagcctcctatgatatctagttacaaatttcttctcattatataaataccctggcattataaaatcaaatattgaccataattccattaatgaattttctattggtgttccagtcaacgcaaatcttattcttgcttttatttccttgactgacttagaacttaaagaagattgattctttatgttttgagcctcatctaagatacagtaatcaaaattcatattatataattctatgtcacgtctcaataaattataggtagtcaagattacatcatattctttatagttattaatcaattcttctctttcttcttttaccccattgcaaatagcaattttcattgatggagcaaatttattaaattcatttttccaattatagattaaagaagtaggtgcaataataagagtttttgaatctggctttgaaagcaataatgttattgtttgcagtgtctttccaagtcccatttcatcaccaagtattccaccaaaccctaagtaatctaaagttctaagccaattatagccttctttttgatactttctaagtttagcttgaagtccatatggaggttgaaaggctttatctttaatgttacttaatctttctttaagatccttaatttcatcacaactatttatataccttaactctttgtcttctaaataatcttcaagataagctcccttgttaattggaacattaatgagattctcatttaatttctcttctaaaagtaaattatctataagggtcaatgattctttcaatacttcatcttctaggtctaagaattctccattctcaagcttataatatttcaagttatctctaaagcttctaagtatttttgcagtttcttctggagatatatcagaaattttaaattcaaactcaaaatagttgaatttaccttttctaacttctccaacaaaatctgatttcttaatatcttttattcccttaaatctctcagaataaaatacctcaccatatctttggagcttttctatttcatatttaaagaatttaaaagcctcatcatcatctcttaaaaagaataatcttccattgacttcttcaaatccaagactttttaatactcctaaaacttcatattctttattagtatctctgtaaataattttatctttgtattcttcaaaaaaattaaattcatgtccttcatatgataccttaaataacaacgaaatgtccttatctttatcaaaataaaacctgaagattacaggcgcgattacaactttttctctaatatccttagataaaactaaatcatttgttactttttgaatcgaaggtattaattcttttaaaattctactttcattgatcttattgaaactaactttgttagtagcattaaatatttttaaatatggcgataatctctcacattgttctattgatggaatgtatatggaagtaccaaataagaatacatcttcatcttgagttaatgattctggtattccattaggagcttctaaaattatattgttattcttactcaataaagcaaatggaataggcatatccccttctattatttcagattctaatattctataaaagaatccatcgcctaaaaaaactctattcttttttataatgtataaaaattctttaaacatcatatcaggaattgtaagggtctttccttctattaacttatcctgataacgtctaaaatttctatcatgatctgctaaattttttatattattcatgaattttattaatcttctatcttcataagaaagactttgagtttttatatcaaaaataaattctttcccgtacttaattggtactttattataaacgcatgtcaaaaattgattaatatctttaactatatacattttattgctttttcttaatcctattttaaactcgatttgaagtttagaggaccaattgtttttattaataataacttcgaattttagcttttccttatccgtatccccaacaagtaaagataataaatcatcattagaattctccttaattctagctttattatctttaagagataaattattatttaacttggttcttaactcttcatcttcatcaatatttcttaagaatgtataaaaagtagctattatatgtttacaacagtaattatcacgagaaaattcgtttttctcaaagtctagacaactacaatgggttcctataatttctttagtcatattatcaatttcaagcttacacgaatattcacttagaaggctttctgaaactacagttgagtttatttttatataatctttatctactttaacatttatttctcttaacaaatcattttttagaacacgttgaccttttgtaagagatgaatttgttatgttcttattaaaaccctctagtaaaatttgttttatcaatgtttatcacctgcatttttatttttaacttctttaattcttttaattaaatctacactgatatattgggatttagaaaccccttttctaaaatatcttatttgcttatagtcacggccttcaatatttatatctaatatatcaattctttcagcattaaatatagtaggttcattttttccttttaaatatatatgtatttccatttcattaggtgagattatttaaattagtaatttaaatataatcccaatatcctccttttaaaattatatttagttattatttttgaattcttcaattgcttcagcaatttcatttagatattcccatcgttcgtatttattatctagttcactttgtacgtcttctttttcatgcatcaattcatttagtttcccatagtttgaagagttctttgccatttccttttctaaagaattgattttttcttcaagcttagcaatatcttcatctatagtttcatattctttttgttctttaaaagtaaacttaggtttattgtctttagttttttctttaactcccttccctttatctgctgcaaattcattgctacttttctcacttgactcaacagatttaattttctcaatttcttttgaaatcaaaaagtcgctatagttaccgttatactctttgatatacccatttccttcgtaagagaatatcttcgtacaaattctatctaagaaatatctatcatgggatacaacaatgattacacccataaatttatctaaaaagtcttctaatatttttaaggtttcgatatctaaatcattagtaggctcatctaatatcaaaaagttaggtgattccattaacactcttaaaagatgaagtcttcttctttccccaccagataatttttcaatcggagtatactgcatagtgctatcgaatagaaatctttcacacatagtagaagccattatcttagttccatcttctactggtatatattctccgccttctttaacataatcaattactcttagtttaggatccatgttactattatcttgtgcaaaacatcctattttaactgtatcaccaatttcaatttttccgctgtctattggaagtttatttctaagaatattaactaaagttgtttttccagcaccattttctccaatgataccaattctatcatttctcaaaaatatatagttaaagtctttaattataactttatttccaaatgacttagagatatcgtataattcaactacttttttccccagcctagaaccaacaaatgatatatctacatcttcctgtcttttaatgctttcttcgcttactaactcgtcaaatctttgaagtcttgccttttgcttagtagttctggctttagcaccacgtctaacccactttaattcgttccttataagagcgtttttcttttcttcttgtgattgttctacttcaattctttcaatctttttttcaaggaaggcagtataatttccaggataagtatataaattacctctgtccaattcaataattctatttgtaactctgtctaagaaatatctatcatgagtaatcattaaaagagcgcctttcctagaatttaagaattcttcaagccattcaatggaatctgaatctagatgattggtaggctcatctaatataagaagatcacatggtgttataagtgaacaagcaagtgctattcttttcttttgtcctccagataagtttccaaccttttctgaataattctttattccaagtttatttaaaattgtctttgcgtcactctccatatcccataagcttaaggagtcaatttcactttgaaccttaagtaattcattatttaaagaatcaaagttttcaccactgcaactattaatcttatctaataactcctcatatctttttaaaagtttcatttctttagtgtcacctttaaaaatttgttctaaaacagttgcatcttcatcaaataaaggattctgatcaagatattcaattctaacatttttaccctttactatatttccatcaaaaaattcctctcggccagaaaccacttttaaaaatgttgatttaccagcaccatttattccaattaaaccaattttatctccatcattaattcctagtgaaacattatttaataatattttatcactataatttttgcttatattttccaaagtaattatattcattaattttaaactcctttatgtgattatatacatactattttaacataggatgctcataaacagaaatttagattgaatttaaacaaaaaaagactacctattataatatagatagtctaaaagtaacatatcttgtttcgaataattactgtatatattaatgattcacttatttttttttagattttgacttgagatttcatatctttcttcattatcttctgtattataaaaagcattacaaccaatcaataaagcacaaacaaaaattactattcctagcataattattccccctttaatatggatttgattatatatttattatagcacaattcgtatgtaaacgatatactattttgtttttttttatttctatttacatcaatttcttgattactattttcttaatttatgattttgcagaattttcaaaaaattattgacaaagcttatatcttttgactataatttatataaacctatataatttaaaaactgtgaaaaggaagagtacatatattattgaaataaagagagagaatatttgctggaaattctcatgatgtatatatggaatgtagccttggagtttttaatcgaaatcttaattgttagagagtagaattaaacggattgtccaccgttaaaagggcaataatatcggttatttaacccgtattattaataagtgtgtatttgattatacaaaattaggtggtaccgcggtgattatctcttcgtcctatattatttataggattgggagtttttttttacacaaaaataatatttattcttatatcaaatattaaaaaatagtaaaatcgaactttttatctaatcaataaacgttaatgaaatattctaagatatttatgtaaggagtgatttctttgaaatataatggtgctgaaatagttattaaattattagagaacgaaggagtagaatatatatcaggcattccaggaggattcaatctcccactttatgatgctttatacaaaagcaaaaaaatcaaacatatattagcacgtcacgaacaaggcgctggatttattgcacaaggcatttcaagaagtacaaataaagttggagtatgctttgcaacttctggcccaggagtaactaatcttctaactgccattgcagatgctaaacttgattcaattcctcttgttgctataacaggccaggttcctctatcagcaataggtactgatgcttttcaagaagttgatgcttatggattaacaattccaattactaagcacaatttcttaattaggaacatacatgaactttttacagttataaaagaagctttcaaaatagctttagaaggaagacctggaccagtacttgttgatattcctaagaatattcagaatgaatttatagacttagaagactttccttctgaaattgcatctgaaaatttgcctaaaagagattcaataaaaagctctacgctttattgcatagctgaattaatcaatgattcaaagaagcctataatttatgcaggtggaggtgtagtgaattcaaatgcttcatctaacttatataaaattgcaaagaaaaataatataccagtttctttaagtcttatgggacttggtgcttttccttgtgatgatgaattgagtattggaatgcttggaatgcatggtgcaccatatacaaattatcttctaaacgaagctgacttaattttggccctaggagtaaggtttgatgatagagcaacaggtaatatagaaaagttttgtcctaacgcttctataatccatattgatattgatccttctgaaataaataaagttaaaaccagtagtttatctatgattgcaaatgttgatgacttcttagaagatatacttccacatattgaaagtaaaagtcgaaacacttggagggaaagagttaaatgctttaaatctaaatatccactcccttcttataaaaacatactgcatcctgctaatataattccttttgtaggaaacatagttcctagtgatgcagttattactactgatgttgggcagcatcaaatgtgggtagctcaaagatacccttttaaattaccaaaggctttactaacttctagtggtcttggaactatgggatttggacttccagtagccataggtgctgcattggccaataaagataagactataatctctttctgtggtgatggatctattttaatgaatattcaggaactagctacccttgctgactttaatttgaatataaaagtaattattttaaataatcatcatttaggcctagtacgtcagcagcaacagttgttttataatgagcactatatagcatcaaaatttatatcaaatcctaacttcaaaatgatagcagaaggctttggaatacaatcttgtgatttatgtaatgaggaaaaacctttagaaaaattaaaagaattgttaactacagatggaccatgtgtaattaatatacctattgaagaaactgaaaatgtacttcctatggttcctcctggtaaatcaaatatagatatgattggtggtgaaaatttaaatgattaatactaaattttatcttatagagctacatgttagaaaccattctggtgttatgagccacataactgggctttttgcaagacgtgcatttaatttagaaggaattttatgtgcacaaataggtgatggttctacaagtaaaatgtatttacttgtcaaaaatgattctgtgcttgatcaaataataaagcaattagaaaaactctatgatgttatcgaagtttcagtacaccaagattatgatcaatctgtatttgaaaacttaaacaaagtactaaaacttaaacaagaggatatttgagatttgattctataacttaagcttagaataataaataaaacttagttttaattcagaaataaaaataaggataataaacaatatctctactgtttattatcctcattaaatgaaccgctctataagaaagtttgtaattatctagtttagttcttctatttctattttaattaaatgaacctaataaatacatacccaaaaaaataaaaatagctactaatactccagccagcgataagcgcaatggggttacttttttaatttcactagaatcatcattctctccttccttttgtaggaaacatagttcctagtgatgcagttattactactgatgttgggcagcatcaaatgtgggtagctcaaagatacccttttaaattaccaaaggctttactaacttctagtggtct

SEQ ID NO: 57 - DNA, 38510 bp, Clostridium beijerinckii
ttttagaattataatgaattgtgaaatgtgcattatgaattgaaaaatatatatttataaaatttggaatataatcactgatatttttataatttattgtatcagggggtgattatatgggcgttaaagaaataattgagaaatacaggggtaaaaatgcagatatgcaaaacattatcgcaaaccttgttctcgcagtggcagatttaaatgccaaaaacaaaatcttagtggatatactaaagaagaatgaaatagagattcatataactaataagaaatatcaaaaatatttaagtgattcgctggagagtatattatcgaagatttacaaagactagccaaagaagattttataaatggaggatatagaatgatatttaaacctgaattaattaagggaatagcgaaaacaagccatccatatggatgtagaaaagaagtactaaaccaaatcgaatactgtaagaatgcaaagcaatttcatggccctaaaaaagtgcttattattggagcatcatcaggttttggccttgctacaagaatttctttagcctttggtggagcgaaggctgatacaattggagtttcgtttgaaacaggaattacagataggagaacagggactgcaggttggtataataatatattttttaaagagtttgcagaaaaagaaggacttattgcaaaaaactttataggagatgcattttcagatgaagttaaagaaaatgttataaaatatataaaggatgagtttggaaagattgatttacttatttatagtttagcatctccaagaagaaaagagcctaagacaggtaatatatacgattcaactttaaaaactacatctggagaatttcagggaccgacaattgatatggagaaagatgaacttgttacgactaaagttaattcagcaactgataaagagatagaagcaacgaaaaaagtaatgggaggtgaagattggagcgagtggtgtaaactacttcttgaaaatgattgcctctctgataaggctataacaatttcgtattcatatattggagcatcaagaacatataaaatttatagggaaggtacaataggagaggctaaacgccatcttgaaaatactgcaattcaaatagataaagattggaaaaagaagattaatggaaaggcttttgtttctgtaaataaagcaattgtaactaaggcaagtgcatatataccttctttctcattgtatgcagcggtattatataaagtaatgaaagaaaagaatttacatgaaaactgcattatgcagatgcaaagaatgtttgctgataaaatatatgcagaaaatccacttgaatttgatgatagtggaagattaagaatggatgattgggaacttagggaagatgtacaaagtgaagttaatgaattgtgggaaaaaataacttcagataattttaaaatattatcggattatgacggatataaaaaggaatttatgcagttaaatggatttgaaattgatggagtcaattatagtgaagacattgatatagaagcattaaaaaggctagaaccatagattaatgaatgtttatgttaagaagtatcaaaagggtacttcttatttttttataaatatattttagagagataataatatttcaaaaaatattgtacctgtggtataattatccgggtatgcaataaatcaaatagctatgtatattatggtcgtatttgattttagtgttaataaatataattaactagggagaagtgttttgaaatgagaataaaatataaacttatcgttagctatttgatcttaattgtatttgctgtaagtgtattggggttgttaattgggaataaatctaacaaagcagtttttaaagaggttaacgaaaaaagtcaacgtttaacagaatcaattattacaactttgagtgtaagaaatgatttgcttactgagaaatcttatggagatttaaattttgcaaataacgtattaaacaatttagctgatatgagagttgattacaatgaaatcataaaagttggagattttaacttaccagttttatattcaggaaatcaaagaatatccttagataatactatagttgataaactaaaacaatcaacaggtagtatagcaacaatgttcttattacaagatgataaactaattagggtttctactaccgtatttaataatggtaataggatattaggtacatatatttcaagcgatactgaggcttataaaaagacactaaataatgaagaatatattggtgatattagaatagaaggaattggatatttaacgagaatgaagccaatattagataaagataaaaaagtaataggggcaatagggttaggcaataaaattagtaatgattatttagacaagacattaagtaatattaaattagggaagactggatatgcgtacatactagactctgaaggaaatgtaattcttcatccatctgatagtggaaagaatgtaagtgactacgattttgttcaaaaaatgcataatgaaaaaagtggaatgattgagtacacttataacggagttaagaaattaggatattatcagtattttgaagcttggcattggtatgtagttactacagcagattatgaggaattaaactcttcagcaaaatcaattttgacgaccacaatagctacagggggaataattattgttttaggcggaattatagcgttatttttagctaatacattagttaagcctattaacaagttgaaatcttgtatggagatagcgagtaaaggtgatttaacaatacgatgtaatatagatagtaaagatgagataggagttttagcaaatagttttaatgatatgctggcagaaaataaaagattactagaagaaactgtgcagtatgaaaaattaaaaacggaatttattgctaatatgtcacatgaattaaggactcctttaaatattatattttcaacagctcagttatttaatgtacttataaatagggatgaggatttaaatactgagaaaatgaagaattatacaaatagtataaagcaaaactgttataggttagtaagattggtgaataatcttatagatataacaaagattgattcaggttatatgaaactagaattgaaaaatggcaatatagtacaagttgtagaggatataacacaatcgactgctgagtatgtagagtatatgtctagaacaataatatttgatacagataatgaagaaaaaattatggcttttgatgaggaaaaattagaaagaattttgcttaatctaatttccaatgctactaaattcactgaaccaggagacaaaataagtgttaatttatatgatatggatgattatatagttatctctgtaaaagatacaggaagaggaattccagaggaaaaagtatcgcagcttttccaacgatttaagcaggtagaacgattattaaatagaagtcatgaaggaagtggaattgggttatccatagttaaagccttagttgagatgcatgaaggaacaatagaagtaaaaagtgtatatggagaaggtacagagtttattatatgccttcctgttaagatagttccagaagatgaaggtaagaaaaacaaaaatggttattcaaaccaatctaaggttgaaaatataaatattgagttttcagacatatatagctaaagaagatggtaaattttcattgacattcttacatttagagtataaaatttagacgagtactaggggagccagaatggctgagatgagttttcagaccctttgaacctgcactgggtaatgccagcgaagggaagttataagataatataaagctaaatctaaaggtagtagatttacaatttaattagattattaactcttttcaatggtattttagtactgtttggaaggagtttttttatgcaattttcacaaagattattattgaaaggtaaacctatttgggaagcatgcttggagcatccttttcttaaggaacttagtgaggggactttaaaggaagataagttttgcttttacgttaaacaggattatgtttatctaatagattatataaagctttttgcattaggtatggttaaagcagattcattagaagatatacaagcctttgctaaatgtgcaaatgctatagtaaatattgaaatggatgcacatactgaatatgctaagaagtttggaataactagggaagaattagaggccacaaagccaaatgcaagcaatttgtcatacacaaagtttatgttacaggtatcatcagaaggatcgttagctgaactagtagcagcgctgcttccatgtatgtggagctatgcatttattgggaaaaccttagcaaagaatagtaaggcattagagcatccactttacagtgaatggatacttacatatgcaaccgaagaatataacaaggaaaatgattggtgcgtaaaacttatggataaactagcagaagggcttccagaaagacaacttcaaaaattagaagaaattttcattatatcttcaaaatatgaatatatgttttgggatgggtgctacaaaaaggaaagttgggttatttagatgaaagcattggaaattaataatttatcctttggatataaggattcggataaattaatagtagatgatttatcttttgatataaataaaaatgaatttgtcacaattattgcacctagtggcacaggcaaaagtaccctttttcgattaattttaggactattaaagccacaaaagggtaaaatagatatattaaaagatggtaataaaaatattataggatatatgcctcaaaaagattctttaatgccttggagaaatattcttgacaatacagcaattggacttgaattaaatggttatagtaagaaagaagccagaaaagtggcagctacatactttgagggttttggacttaagggaactgaaaaatattatccacatgaattatcaggtggtatgaggcagagagcttcatttttaagagcaatagtaaataatccttccataatcttattggatgagccattttcttctctagatgcgttaacaagaagaaagatgcagtcatggcttttagatctttgccaaagacaaagtaatactgtgttcatgataactcatgatatagaggaagctttacttttatcagatagaattcttatttgtacggagcttccatatagaaatctaaaatctatagatgtaaatattgaaagaccaaggaattatgagaccacactttctagtgagtttattgagctaaaaagagatattttaaatgttcttgactccttagaagaaaataaaggggggatatagaatgaaaaaaattaaagactatatatttcctttaatatttttgataattataattttggcctgggaattcataataccatattttaaggtgccgaattttattttgcctagattttctgaaatcataaaggctttagtagatcaaaaagatttaatatataaacattctcttatcacactaggggaagcactattagggcttattgcgtccgtaattataggtatatcttgcgcactttccatatacctttggagaaatgtttcgaaaactttatatccaattataattttttcgcaaacaattccgactatagctttatctccaattatggttatgtggtttggatatactatatggtcaaaggttgcagtggtaatattattttgttttttccctatagtaataagtacattagatggattaaatagtgtagatagagatttagaggatgttttaaaagctcttggaggaaatagatttcaaatattttttaaactccatatgaattccgtattacctaattttttgagcagttttaaaatagctgcaacctacagtatttcaggggctaccattggagaatggctaggtgctgaaaagggattaggtatatatattaagagagcagcaggaatgcttcaggcagattctgttttcgcaggagtgttagttttatcatttctaggattaattctattttccgtaggattcttgctagaaaagattttattaaaatacagaagaggattgaaggaggacaatcatgaaattaaaaaagcttagtatatttttactatttattatgttagttagtttagtatttagcgggtgctctagtgcttccaataataaggaagacaagagtgctaccaaagaacttaaagaagttaatgttcttttagactggtatccaaatgcagtacattcattcttatatgcagcagaagagcaaggatactttaaagaagcaggattaaaggttaacttaattacacctgcaggtacagatgatggaattaaattagtagcagcaggaaaagctgatttagcaataagctatcctaaacaaattatcttagcaagaggcgaaaatattcctattaaatctgttggagcaatagttagaagttcattaaaccaactaatggttcgtaaagattcaggcgttaaaacattaaaggatttagaaggaaaaaaagttggatatgcatcttttgatattgataaagaaactgttaaagcaatggtagcacaagctggtggagatccatcaaaggttgaatttgtagatgttggatatgacttaatgcctggaattgaaacaaaacaagttgatgcaattataggtggatatataaaccatgaaaaaatattattagagaaaaaaggtattgaattagaaacttttgcgccatcagattttggcgtgccaaataactacgaattagcatttgttgcaagtgatgatacaattaagaataataatgatacaatacaagcgttcttaggagctgctaaaaaaggatttgaatatactcaaaagaatcctgataaggctttagatttaatattgaaggctcaaaatgaaagtttcccattagatgaagagacagaaaagaagagcttagagatacttttacctcttatggaaaatgaaagtggtaaattcttaagtcaagataaagaaaattggaataacaatattaaatggttaaaagataagaatttacttcaagctgatgtagatagtaaagatgtgtttcaataatttatctttgatataggaaatagtatagataaactaactataatctatacttatgcgtatacatcaccgaaatgaataatatacttttgttccagtttctaggcaattatgatgggtgattctaaggctataaagttgcacccaaagtgctagcctcaaagaacaagctttgaactagcacatttggaacaacttatagacaaagaatcacatccatcaaaattaccaatgaaacattccatattatgacccttgtggttacaaaagtatatcactcatttctggttggaagatattgcacagtctaagtatattttatgattatgttatccatatttagataaaaacagataaattatattaaaaaagatactgaatatatatattgcaaaaataatcattaatcataattctaagaatattacaagaattttagacgtaattgtgaattgtgaaatgtgcattgtgaattgcaacatatagattataattcggtatctttttttattctctaggaatttatattcaagttaaatttgtggacattgtgccccttgagggtataagttatgaaaaatactgattcagaaagttacagttcgtaaagagaataaaaaagaaatcttattcgcctgcataaaatgttcttatatgcacaatacggaacttaaccacagtctcctgcgatttttttattgttttataaatactatgtgatattagagtagttctgaggaaaagctaattttactatatgaaattttttattatgatttatattttagccggtacagttggactcttgaaagaataatattgtaattatataggttgagagaaaagcaacaaattatatgttttgaatttgttgctttttccttaaagtttacattgtaacatgtattattttaaacttggaggataatactatgaaaaaaataattaaaaacattttatttaacacagtatttaagagtcacaataaatcgaatgtacaagtaatagtaggggcatcaagacaacttaattacgaaattcaagttatagctgaaaatttatacgtaccatgggcaatagatataagtgatgaaggaaaaatatattttacggagcggtctggagcaattagagttattgaagacggcaaacttaatcctaatccaataataaaatttaatgaaccttttgtcagtcaaggggaaggtggtttgatggggattgctctagattcaaattattcgaaaaatcattatatgtatgttatgcatacatatggagaaggagatgtaatttataatcgtgttgtgagagtgattgagagcaataatagggcggttattgataaagttcttatagataaaatacctgggggacgaattcataatggaggcagaataaagataggcccagataaaaaattatatattacaacaggagatgcaggaaattcagcattggcgcaagatcctaaaagtttagcaggaaaaatactacgaatagaattagatggcagtattccagaagataatccaatttctaattcagcactttatagcttaggtcatcgaaatcctcaaggattagcttggaattcaaaaaatgttttgtatgagtcagagcatggacagtcagctaatgatgaaataaacataattaagccaggaagcaattatgggtggcctctttttcaaggagatgaggaatctactgaaattcagataaaaaagccattaatacacagcggacaagatacatgggcgccttctggtattgcttttgcaacccaaggaccattgcagggaaaacttctagttgctaatttacgtggacagcaactgcttgttatctcactaaatagagatggaagcgtagttaataatgtagaatcgtggttcaaaaacgaatatggacgtttacgtgaggttattcaggctaaagatggatcaatttacattacaacgagtaatagagatggaagaggaaatattaatacaggtgatgataaaattattaggcttattttaaaataaaaaaatattcaataaactaattaaatctaaggctctcattgaataaaagtcttagatttaattagttttatttgttaattgacaaaatatatttatagagatataatttatttcgaaagcgaaatattcgtacacgaaatgtttggaagcgaaatataaaaagaggtgggaattatatggagattattaatgaaagtatagaggtatcgagattatttcaagaagtaatgagtttatttagattaaatatgaaaaaaataattgagcggactggaatgacagctcctcaaggtatggttattggactattacataaaaataagaagatgaaagtgactgaattaagcaagcagctacatttacctaatagtacagtatcaggtattattgataaacttgaagaacaggatgctgttataagagaaagaagtgaagatgataagagagttgtatatgtaagtatatctccaaagtttattgaaattcataagaattttaataaacaaattgaacataatattgagagtatactaaatcaaggaacacaagaagagcttaataagatttctgagggactaataatattcaaaagacttttaagtgaaaataacgctaattaaggagagtgcgctaatgattaaattgtttagatttttaaaacagtacacagttaatataataataattgttttattagtttttacacaagtaattgcaaacttatatctgcctacattaatggctgacatagttgataaaggaattgttcaaaaagatgtggttcaaactatatcgtttcttggttataacggtgagtatagtggagttgattatattctaagaataggaggattaatgctgcttgtatctcttggaggtgcaatttgttcaattatagcatcatttttatcttcaagaactgcaataggctttgctaaaataattcgtaataaattatttacaaaagttgaaagtttttctttaaatgaatttgataaatttggaacagctactttaataacaagaactacaaatgatgttacacaggttcaatcagttacaataatgatgttttcaattgcacttttcgcaccattgacagcattaggcggagttgttatggctttaagagagaatgtaactctaacatggatatttgcgttagtaattccactacttgcagttataatagggcttactttaaaatttgcaatgcctttatttaaattgatgcaagttaagatagataaattaaacttagtactacgtgaaagccttacaggaataagagtagttcgtgctttcaaccgtataaatactgaaaaggttagatttgacgatgcaaataaagatttaatgaataatgctataaaagtaaataaaattatggcaattttaatgccaataatgatgtttatcatgaatgctacaactgttgcagtaatttggtttggaagtataagaatagattcagggaatatggaagtagggtcattaatagcctttatgcaatatggaatgcagattttatttggtttcttaatgcttggtatggtatttataatgattccaagagctcaagcttcagcagtaagaattaatgaagtactagatatggaatctgaaattgtagatcctaaaaacccattattaaatgaaaatgaaggcggttatgttgaatttaaagatgtaagcttcagctatccaggtgcagagcaagaagctattagtaatatatcatttagtgcgaaacctggagaagtaacagctataattggtggtactggttcaggaaaatcgacattaattaatatgataccgcgtttttacgatgtaactaatggttcagttcttgttgatggtattgatgtaagggaaatgagtcaggaaagtataagagctaaaataggttttgtacctcaaaaaactgttcttttctctggaactattgctgaaaatataaaatacggtaaagacgaggctagtatggaagaaattaagcatgcggcagaagtagctcaagcaacagatttcataaatggaatggatgatggatatgagcatttaattgctcaaggaggaactaacgtatcaggaggacaaaagcaacgtttatcaatagcacgtgctcttgttagaaaaccagagatatacatctttgatgatagtttttcagcccttgattttaaaacagatgcaagacttcgtgcagcattaaaaaaggaaacagtaaaatcaactgtaattcttgtagcgcaaagagttgcaactgtcatggatgcagatagaattatagttttagatgaaggacaaattgcaggtattggaactcataaagagctattaaacagttgtaaggtatattctgagattgtatcatcacaactttcagaggaggaattatcatgagtgaaaatcgtaatagagtaaataaaagatcaggtggcggttttggcggtggtccaatgggatcttttgctggcccaaaagtaaaagctaaggattttaaagggacattaaaaagacttttaaattatttgaaaccacaaagaatgaatttcattttagtttttatatttgctatagcgagtactatatttaatatagtaggacctaaaatttcaggtaaagctataactagattagttgaaggattagtaggaaaatttactgtaatgtctcaaaatgctgcattacttaaagcaggaaaaccaggtaatataccagtgcctgggattgattttcaatatataggagatattcttttattactacttggcttatatgtaatcagtacactttttggcttccttcaacaatatattatggcaggggttgctcaaaaaacagtatacaacctaagaaaagaagttgaagataaaatttcacgtttaccgcttaaattctttgattcaagaactcatggtgaaattttaagccgtgtaacaaatgatgttgataatatttcaacaacacttcaacaaagtttgactcagcttattacatctatagtaactattgttggtgttattatcatgatgttaactataagtccaatgatgacattagtagtaatattaacattaccactttatattgtaataacaacacttgttgctaagcattctcaaaagttttttgctgctcaacaaaaagaagtaggagaacttaatggtcatgtagaggagatgtatacaggacataaaatagttaaggtttttggacatgaaaaagattcaataaaagagtttgaaaatattaatgatagactttataaagctggatggaaagcacaatttatatcaggtataataatgccaatgatgagatttgttagtaatataggttatgtaatagtttgtgttgtaggtggatatttggcaacactcggaaaaattagtattggtgatattcaagctttcatacaatactcaaaccaatttacacagccaatagttcaaactgctaatattgctaatataattcaatcaacagttgcatctgcagaaagggtttttgaacttttagatgaagttgaggagatttcagatactgctgatgctaagattatagaattccctaaaggtgaagttaaatttgataatgttgattttagctataaaccagaagaaccacttattgagaacatgaaccttgatgttaaacaaggtcatacaattgcaattgtaggaccgactggagcaggtaaaactacactcgttaacttacttatgcgtttctacgaaataaattctggtaagataatgatcgatggtgtagatatcagagatataaaaagaggtgcacttcataatatgtttggtatggttcttcaagatacatggttatttaacggaactataatggataacatagcttatggcagagaaggtgctactgaggaagaagttatccaggcagcaaaagcagcacatgctcatcactttattaaaactcttccagatggatataatacaatattaaacgaagaagcttctaatatatctcaaggccagaagcagcttcttacaatagctagagcaattctagcaaatcctactataatgattcttgatgaggctacaagtagtgttgactcaagaacagaagtttatatacaaaaggctatgacagaacttatgaaaggcagaacaagttttgttattgcacatagactttctacaattagagatgcagaattaattcttgttatgaataaaggaagtattatagaaatgggcaaccataatgaacttcttgcaaagaaaggtttctatgcagatctttacaacagccaattctctggagcaaatttagatagtgaagtaatgtaaattataatattttaaggatagtagacgatagtaatattgtttactatcctttatttttatacaagaaaatggatttttataaattatttctagtgaagatataaacttaaaattttagtaactttgtaaatacatttatctaataagttgatttgatacctatatatacattaaaaaataaattaaattactcatactaaaacaaaaagtagttatcaagaattattggcataattcttgctttaaatatacttgaagaataaaaaatattggaggaattagaaatgagtaatttaggaactttcaacaaaataataaaatctgtttggagtattgaaaatttagatgaaattgaagatggttttggtccagacgaaattgaggcatgggattcacttagccatattgaactggtagtagcccttgaggaagaatttgaaatatctatggcagttcaagatatttcaaggttatatactataggagatatcaaaaatacattgagaaaatatggggttgaaatatgacctttactgactatgtttttgaattctcctcagagcttaacaaaactgcaataattgataagaaaaatatcagctatagtgatttgtactgtaaggtactgatgatatctcataatataaagaaaattaatatagtaaaggaagataagattctattaataagtgagaattcacctttttttatagaaagttactttggaataataaaaagcgggtgcacttgtgtacccctaaatcctactctaagtaagaatgatattgagtatataattaatagttgcaatcctaaagcaatttttattgaaaaacgttttttagataatatgcgaaatttgattaataaagatattaagatagttactgaagaaacattaaataatcttctattagataaagaatgtactagtaataatagagaagaagaagaaattgattttaaaaatagtgtggctgtaatattatttacatctggttctacagcaagaccaaaaggagtaatgcttacgcatcataatctctgtcataacactaattccataatagaatatttaagcttaaacagcgaggataggatagaagttgtcttaccattttactattgttttggaacatcgttgcttcatacacatttaagagttggaggcagcttagtaataaacaataaattcatgttcccagaaacagttctagatgatattgaaaaatatgaatgtacaggctttgcaggggttccaagtaattatcaaattttacttagaaaatctagtattaaagatagaaatttgaaaagcctaagatacgtcgctcaggcaggaggaagacttcctgatagttttattaaagaagtaagacaagctcttgtaggagtagatgtatttataatgtatggacaaactgaagcaactgcaagactttcgtatcttccacctaatatgcttgatgaaaaaatgggttcaataggtaaaggcattcctggaactttgcttaaagtaattgataaagaaggaaatgaagtaaaagtggatgaaataggtgaagtggtggctttgggtgaaaatataatgaagggttactttaacgatgaagaagaaacgagaaaggtcattagaaatggttatttatataccggtgacttggctacagtagatgaagatggttatatttatattgtggcaagggaaaaacaaatcataaaaagtggtggaaatagaataagtcctaaagaaattgaaaatattataattcaaattccaagcgttatagaagcagcagtaattggaattcaagacgatatattaggagaagcagtaaaagcatttgtagtattaaatgatgaagtattaaaagttgatgaaaagtatataattgactattgcaaagataaattgccgtcctataaaatacctaaatatgtggtatttttagagggtcttccaaaaaattcttctggtaaagtaatgatgggggatttgaaatgatagatgaaattataaataatgagcaatttaagtgtctgcaaaaggacaaagaaaaaaagcttttgagcattctaaggccccagatagataaaagtagaataaatgaaaatttaaacattatgtataaaaaactaggagttaatataaatgatataaattctcttgaagaggttccctttattcctgtaaatatgtttaagcattttgagcttaggacttgtagtgaagaaagtgtagttagaatattaaactcaagttccacaactggaaacattccgagcaagatatatattgataaggaaacatctataagacaatctcaaggattaatatcaactctaacaagttttttgggatcgtatagaagaccaatgctaataattgatagtaaagaagttaacaaaaaaagtgactatctaactgcaagaggcgcggcaataagaggagtaagcagttttggaaagagtttaacttatgctatggatttggtagatgataacatcatacttaatatagaacgacttaaagaatttgaagaaaagtacaaagatacagatatattagtatatggatttacttatattatctggactaggtttgttaacgtactaaaagaaaaaaatataaaattaaacatgccgaaaattaaaatacttcatagtggaggctggaaaaaattaaatgcccaaaaagttgaaaagaaagagtttaatagatctgtggctgaagtatttggaactgaccctgaaaacataattgatttttatggaatggttgaacagttaggcgtagtttttcttgactgtgaattcggatataaacatgtacctgattttggagaaattatcataagagatttttcaacgcttaaagaagtggaaaaaggtcaatatggctttatagaggttatgagtggacttacttcgagttatccggggcaggctatattaactgaggatattggtgaatttataggcgtagatgattgtaaatgcggaagaacgggtaaatactttaagtttaaaaatagagtagataaatctgaaacaagaggatgtggagatacttttgcagaaaagagggacaagaaatgataggctgctttatgttaggagataaattttatgaggaacctaagaagcttcaaagtttagatgcaattatagaagagcttaataaaaatagagaaacaatttattcgtatccatcagaagctatgattgaaataattaatgaatatagtaaaatattatgtagcgatagaaagtttttaagctatgaaggtgtaccatttttggtattatggctaaagaaagacaatattaagaagcttctacgccaagatctaaaaaaacaagaattcctagatgattttatagaaatagcagataataaatttatgaaagctcaaccgagaggggtagtgtgccatttcatggctggcaatgttcctactcttccaatatattatttagttcaagccattatttgtagaaatgttaatttatgcaggatacctattgtcagtatagatactgcaattgaacttctaaaacctttaaaagatattgtaattaattttagaggagaaaaatattatggaagtaccttattaaagagtatttcaattataaatttttcaagtaatgatttaaaattaaatactgaaatgtcacaggcagcggatgtaagagtaatatgcggcggtgaagaagccgttaacacattgtcagttctgcctaagaaaaccacatgtaaggatgttatatttggacctaaatattcctttgctgtatttgaaaaatctgcgacggaaagtcttaagataactaaagccttcgataattttgcaaaggatataataagctttgatcaaagagcatgctcttctcctcaagtgttatttattgaaaaatctactgtaggtattaatgaagcagcacaaatgctttcagaatctttagaaaaggttttaaaacgatatcctaaggttgaaattaatcaaggagcagctgcaaatataattaataaaagaggggaatatcttttatctttagaaaaagatataatatgcagtaaagacctcagttatacaattttaatagacaaagaaataatgttagaagaacctgtgcagcatacaactatatttttaaaagaggttgaagatatatttgaggtttgcaagctaataactccaaggatacaaactattggaatagcttctgaaaacaatagcaggattataaattttgcaaataaagtcagcctgcatggtgttgataggctagttaaagtgggtctcatgaatttgtatgattcaccttgggatggaatactctttatgagtgaaatagttaaatggacaattttaaatctaaattaaaaaagagaaatactttattaatggataaatctttagatttgttttataaacggtacttatgttaatggtgaattataaattctgtataaataagatatagggtgtggagaatgtgaaagtaaaagaattgatgacaaaaaaggtattggtattaaaacctaataatacatttgaagaggcagcaaagctttttattgaaaatggcatagatggagcacccgttgtagatagagatgggaagttaattagcattgtaacaaaaacagatttaatgaaggctattcttaataaattggaaatgaatacaaagctagaaactttaaatcttaaaaaagtaataacaattaatagtgaaatgaatatagaagatgtattgaaatataatgttggtcgtcttccagttatagataaaaacaataagattatagggataattactcatacagattttattaatgatttggttgaaaaaatttcaaaaaaatgtagagatatgaaaaatacaaagttaggattaactgagttagactctattattgagtgctcttatgatgggatttatataacagatggcgaagctaatactataaaaataaataatgcctatgagagtattacaggacttaaaagagcagaggttttaggaagaaatatgaaagacctggagaaagaaggtgttatatctcagtcagctactcttttagtgctaaagaatagaaaaaccactacaattcaacaggaattcaaaacaggagtaaaggttcttgtgagcagtaacccaatctttgataagaatggaaaaataattatggtggttacaaacgtacgagatgtaacacaactttatgagttaaaagaacaacttcaaaagaataaagaaattactcttaaatatgtttctgaaatcgaagaaatgagaactcaattattaaatacttcagaaattgttgcagaagaccataaaactattgaaattatccagcttgccaatagaattgcaaaagtggacactacgattcttatgctaggagaaactggagcaggaaaggatcaaatagcaaagcatatacacaaagtaagcaagcgaagtaaaaagcaatttattaaagttaattgtggtgcggtgcctgcaagtttaatagaatctgaatttttcggctatgaaaaaggtgcttttactggagcaaataaagaaggtaaaataggtttatttgaaatggcttctggagggactattttcctcgatgaagttggagaacttccaatggatatgcaggttaagcttctaagagtacttcaagagatggaagtagtacgaattggaggaacaaagcctataaaaattgatgttagagtactagctgcaacaaatagagatttggaagatatgataaagaaaaaacaatttagagaggatttgtattataggctcaatgtcataccgctatatattccaccccttagagaaagaaagcatgatattttgccattaattaatttttttctcacacagcttaataaaaagtacaatttcaataagatatttgcttcagatgctttaaattgtatgtatgaatataattggcctgggaatgttagggagctaaaaaatattgttgagagagctgtaataatgagtgaggatgataaggtaaagaggtcagatcttcctaaaaatattattgggtcaaatggcatgattgtaactttaaatacttttgaagaaggtataaatttaaaagaaaccttagatgccatagaaaagaaattaattaagaaggcatatgacaagtatggtaatgtaagagctgcagcaaaatcactaggaatagatgcatcaacatttgtaaggaagaggcagaaatatataaaagaagaaatttaataatatgacgtatttaaatagaaattggatacatatttattcattagctacggcagcttattttaaaatgcctgctgtgcaaatatgtatccaatttctttgttgagtatggcgaataaatatataatctatttaaattcatgtatcatactataaacatgctaaatattggatagccagtggtgcaaaaatgcaacaagatgcagaagtgcaacgtaataaaatattttcaaattataactactgtaaacgtattctgaggttattattaaatttaattgaaattttagttgcgtttttgcaacaaatatttatattgttccagaaattagaggtgatattgaaaaaattataagattattatggaaaattcaaggcagtatagtaattttttattttggcacgcttattgcttatataattattagaaaataaaaattagtgaaggaagcgataatatgccattaaaaacaaaggaacaatatattgaaagtcttggaaagctaaacctaaaagtgtacatgtttggaaaagcgatagacaatgttgttgatcatccaattataagaccatctcttaattcagttgctatgacttatgaattagcacaaatgccagagtatgaagatttaatgacagctacttcaaatttaacaggagaaaaagtaaatagatttgctcatttacatcaaagcacagatgatcttattaaaaaagtaaagatgcaaagattacttggtcaaaaaaccgcatcatgtttccaaagatgtgttggtatggatgcttttaatgcactatacagttcaacatacgaaatagataaagcgtgtggaacaaattatcatgaaaactttaataagtttttaaaatatgttcaagaaaacgacttaaccgttgatggtgcaatgactgatcctaagggggacagaggattatcgccaagtaaacaagctgatggagatttatacttaagggttgttgaaagaagagaagatggggtagttgttagaggagcaaaatgtcaccaaactggaatgttaaattctcatgaggtagtagtaatgcctacaatagcattaactccaaatgataaggattgggcaatatcttttgcagtgcctacagatgctgaaggaataattcatatatatggaaggcaatcttgtgatacaagaaaattggagccaggtgctgatatagatcttggaaatgctgaatttggtggacaagaaacattaacaatatttgataatgtgttcgtaccaaatgaaagaattttcttaaatggagaaactgatttcgctggaatgatagttgaaagatttgcaggatatcatagacaaagttatggtggatgcaaagttggagttggagatgttctaattggagctgctgcagtagctgctgattataacggagctcacaaagcatctcatgttaaagataaattaatagaaatgactcacttaaatgaaactttattctcttgtggtattgcatgttcagcaatgggctccaaaacagaagctggaaattattatattgataatctgctagcaaatgtatgtaagcaaaatgttacaagattcccttatgaaatatgtagacttgcagaagatattgctggaggaatcatggttactatgccatcagaagcagattttaaagatgaaaaaataggtccatatatagataaatatttgagaggtgtaaactcagtttcaacagaaaatagaatgagaatattaagattaatagaaaatatttgtttagggactgcagctgtcggatatagaacagaatcaatgcatggagctggatcaccacaagctcaaagaattatgatagctagacaaggaaatttagcagctaaaaagaaaatagctaagaaaatagctagaattgaagaataatatgagcaaaatcatggtagatgaaattaataatgctatcaatactagaataaaaccattacttgccgagcataatggagatattgagcttgtagaagttaacaatggtgtagcttacgtaaaacttttaggcgcatgcagtggctgcccttctgcaaggtttactatggaagaattaatttcctgcgtattaaaagagataccggaagtaaaagatgtacaacttgttgatccaattagcagagaaatgcttgattttgctagacagctgcttagaaaataaaggctaggtgaaattttggaaataggtattagatactgtggtggctgtaatgccggttatgatagaaaaacgtttattacaaatttaattaacgatcttggaaaaactcataatttcgagattgcaaaggaaaataaggaatatgactatttaattttagtctgtggatgttcaaattgctgtgtaagccatgaaaaatatatatcaaaatataataagatttttattaaaaatataaaggattatgacaaattagtatatgacttgaaaaaattataattgagttatatttaggaggtgtctaaaattagctggaaggatttatacaagagtaaggtagttacagctgacgaagctgtaagaaaaattaaatcgaatgatagagtagtaactggacatgcttgcggagagccaaaagaaattatagatgctatggttagaaataaagatttatatgaaaacgtagaaattgttcatatggtatcaatgggtaaaagtgaatattgcaagcctgaaatggctgttaattttcgccacaattctatattcgcaggtggaacaacaagggaagctattcttgacggaagagcagattttacaccgtgctttttctcggaagtaccaaaaatgtttaaggaaggtactttaccagtagatgtagcacttgttcaattaagtgttcctgatgaacatggttattgtagtttcggagtttcaaatgactacacaaaacctgctgcagaggccgctaaaattgttattgctgaattaaatgacaaaatgccaagaactttaggagattcatttatacatgtttctgatatcgattatatagttgaaacttcaaatgatattattgagcttaagccacctaaaataggagaagttgaaaaggctattggtgaaaactgtgcaaagctcattgaagatggttctacacttcaattaggaattggtgcaattccagatgcagtactattattcttaaaggaaaaaaaggatcttggaattcattcggaaatgatatctgatggagtagttgaattaatagaagcaggtgtaataacaaataaagcaaaaactttacatcatggaaaatctgtagttacatttttaatgggcactaagaggctttatgattatgttaatggaaatcctagtgtagaaatgtatcctgtagattatgtaaataatccatgtgttatagcagaaaattataaaatggtttctataaattcatgtattcaggtagatcttatggggcaagtagcagctgatacaattggacttaaacagttcagtggcgtaggcggtcaagttgattttgtaagaggagcagcaatggctaaaggtggtaaatcaataattgcaatgccatcaactgcaagtaaaggaaaactttcaagaatagttccaattttagatgagggtgcaactgttacaacatctagaaacgatattcattatgttgtaactgagtttggaatagcagagctcaaaggaaaaactttaaaagaaagagctaaagcattaataaatgtcgcacatcctgattttagagatgtccttattaaagagtgggaaaagagatttaaagtgaaattttaaattgaaataaatgaaaatatgggaggaagtaacttatgaaagtgtatgttttagacacgggatatttagaaactgataaaaataatgtagtgggtggagctactatgggaacatatagccagccacatgtacaaaatgaatggattaagctacctgtaatgtctattttaattgatcatccagatggaaaaatattatatgatgtaggaagcaatccagaagctatgaatggttattggccaaaaaaccttcaagaagtttatccattatatcaaacaaaagaacaaagactagaaaatcaattggctttatgtggtacaaagccagaagaaataaagaaagtaataatttctcatatgcatttagatcatgcaggaaatttagatatgtttaaacatgcagatgtatatgtaccaaaggcagactttatgcaagctcaaactcaagtaaggttaaatgaaaatccgttaacacacggaggatatattaaagctgatatggatgtttcagtaaagcaatatcatttagttgaagaggattttgaatttgcaaagggcatagaaatagtaaatttaccaggtcatacaccaggattacttggaatagtagttcatttagaaaatgaaggtacattaatattcccacaagattgtgtttatagttcagaaatttatggtccaccagctaaggcatcaggattactttatgatagtctttctttctttaaatcaattgaaaaagtaagagcgttagagaaaaaatatgacgcaaaagtattttttgctcatgatgaggagttctttaaaacaataaaacttgctcctgagttttatgaataaaaagtagtaaatagataaccacagtgaaagttatagtaatgtggtgactaaccgaaattctatatatgtttgttccatagaactataaaaattttgctgaaaggcagttaatgtagggttgtatccatatgtgcatgctcctaattttattaggacaagtaaacttggaacaaccctacattaattattttcatcagcttattttctaatgactgctccatattatgacattgaagttacaagcatatatggaatttctttgtttttatatgcatttaagtatagtaaatgtttaatggaattttgtatgtgatttactctattgtttagacaaaacaataaaaatactatgtaacataatatttaaatgctaaaatataagtaaagaataaaatataaaaataaaatacactatcagatatagatttgatatttttttgaatgtgtctggatatatggaggaaagaaatgagtaatattaataatgacaataatttaggaaacataaggaaagcaagaattgaagatttagaaactatagtaaaattcaattataacttagcaaaggaaacagaggataaagaacttaatttagaaattctaagcaatggtgttaaagcgatgatagaagattcatcaaaaggacaatactatgtttatgaaataaatggtagagtagttggacaaattatgtttacatatgaatggagtgattggagaaatggtatgtttctttgggtgcaaagtgtatatgtagattctgagtatagaaaaaaaggtatttataagaagttgtatcataatgttaagaatatatgtgataataatgatggaatagctggcataagattgtatgtagaaaaagaaaatataaatgctaaagcaacgtatgaatcacttgggatgagcgaatgtaattataatatgtatgaatatgaaaaataattatttacattattaagataagtaatcatatatgactagattgctgcttaatagctgtaaataatagttaagttagcggaaagctgcaattttcattaaagacagcttctataagttttgttcatatatatgttgcaataataaacttacatttaaacttctagtatgttaagtaccctattaaggcaaaatgtagaaactaattgcaacatatataaatcatattttacaatagaagggaagtgagaattaaaggagagcgtattaaatcctctcttttaataatattatgaataataaaaagatagtaagagatggacatatgcactcgccatattgtcctcatggaactaaagatagttttgaaatgtatgttgataaagcattaatagagggattagaggaaataacatttactgaacacatgccttttccatgttattttatagatgacaaagaatttcaagatgaatgtgctccaaatgaagaagtaatagagaagtattttaaggatgttgaagaaataaaattaaaatataaagacaaaatcaaaataaatataggactagaagttgattttgttgatggatatgaagaaggaactaaaagactacttaattcctatggtccaaaattagaagatgggctaatatctgtacattttataaaaatgggcgatgaatatgttgctattgatggaaaagagggctttgaaagagctttagagttttatggcactactgaaaaagtttatgataagtattatgagactttgcttaaagcaataaaatcagacttaggggagtataagcctcatcgtgtagggcatccaaatttaattaggattttcaataaattatatccattagaatataaaaacaaagaacttttagaagaaatagtaagagagattaaatcaaggaattatgaagtagatgtaaatacagctggccttagaaagccatattgcggtgaaatctatgtgtcagatatttttaaacatttgatagatgagtacgggattaaaaaagtatatggatcagattctcacacagcaagtgatgctggaagagattttgataaagaataaatttcggatagcagcagtaaaactatattgaggagtgaggtatgtcattagaaggtattaattttattaaagaaattacatcttttatctttgtggaagataagccagaatactgtgatattatttttatacctggtagtgcatggccagagccagcagaaaaagcttcaaaactttggttagagggatatgcaccatatatacttccatcaggaaaatatagcatgtcaaaaggatattttccaggaccaataactaaggctgaaatatataatggagaatataacactgaatgggagtttatgagagatatagccatatcaaatggagttaatggtgatgcaatattaaaagaagataatgcaacttggacaaaggagaatgcctttaagtcaaaggaagttactgataactataatttagatataaaaaaggctataatatgttgcaaatcatttcatgccaagagatgtctcatgttttatagttatgcatatccaaagacaaaattctttgtatgtccaatagatgtagacggaataactaaggaaaattggttcaaaactgagaatggaattgataaggttatgggagaattatctcggtgcggaggacagcttaagaaagcagttcctacttggtcctaagtattttaatagctctaaaaatattacaagaagtttagacttaattgtgaagtgtaacatatgtactttaaaaatcttaatttatcaacgcctatattgaaatatcacacaatacaaataattgtataaagaattgataataatattatataattcatgttatgaatcccataagaagcttgatagttgcttatgggattatctatttttgaaagttttaatattttataaatctagtgaaaaaagtatacgattttgtaacaataatttaattactgaataaagtgactatatagattgttatatatttagtattaaaataaagttaagatatatactttggattgacaatagatagatgatgttctatattgtatatagatagatgtctatataggaaaggcgtgaattagaatgagctatgaagaaaattcaaaaatttttaaagcattatctgatccaagcagattaaaaataattgatatattatcttgtggtgaaagatgtgcatgcgatatactagaatactttgattttactcagccaaccctttcgcatcatatgaaggtattaagtgactgtagtcttatagaagttagaaaagaaggtctttggaattactaccgattaaatcttaataattgcaataaacttactttatttatgatgaacctcgtaacagaaacaaaagactgtatttgtaaggataaacctaagtgtacttgcaaataagaagaaaaaattaaatgtatctataaatgaaatttaaatataaaaaatcatattgtaaaggagttaataaaaatgaaaaaaatgattatttttgatccagctatgtgttgttcaacaggtgtttgcgggccatctgtagataaagaattattgagagtttcaactgcacttaatactttaaaaaacaaaggtatagtagtggaaagacacaatttaacaagtaatcctcaaatatttgtagataataaagtgataaatgaaattttaaacaccaaaggcattgaagctttacctgtaactatggtagatggagtagtagttaaggaaggtagttatccaactaacgaagaattttgtgttttattgggtataccagcagatactttgaagcttaatataaagaaagctagcataaaaaagcctgctaaaggctgtggatgtaaaggtggatgctgctaataattaggttcattagaataaatcgatacacttaagtagaagggaagagtaaattatgttgaaactgtttgatattgaaaagctgaacttaactaagtatctattttttactggaaaaggtggagttggtaagacttcaacagcttgtgctgtagccgtgaatttagcggatcaaggaaaaaagattatgcttgtaagtactgatccagcatcaaatcttcaagatgtatttaatacagagttaaataataaaggcattcaaataaaggaagtcccaaacttaactgttgcaaattttgaaccagaagctgcagcggctgaatatagggaaagtgtaatagctccatatagaggaaagttaccacaagcagtaatagataatatggaagaacaattatcaggttcatgtactgttgaaattgcagcatttaatgagttctcagctatgataactgatgaaaaagtattcaatgaatatgatcatatcatttttgatactgcaccaacagggcataccttaagaatgttacaattaccttctgcatggagtgattttattaatgaaagcactcatggagcatcatgcttaggccagcttgcaggacttgaagaaaagaaagagatgtacaaaagtgcagtagatactttggctgatggagagaaaacaacgcttgtacttgtatctcgtcctgaaacttctccactaaaagaggcagaaagagcttctagtgaacttcaagaaataggagtaaacaatcaaatattagttataaatggtgtacttcaaaatcatgatgatgaactctcaagtgctatttatgaaaagcagcaaaaagctttaagtaatatgccacctaaatttaaggatatcgaaacttttgaaattcctctaagaccttataatataactgggcttgaaaacgtaagagctttccttaaaaaagattatattaaaattagtgaggaatctttaaatgcagtggctatgccaaaattaaaagatgtcattgaggatctatataatagcagcaaaaaagttatttttacaatgggtaaaggtggagttggtaagacaactatagcagcagctatagcactaggacttgcaaaaaagggtaagaaggttcacttaacaacaacagatccagctgctcacttgaaatttgtattagatgaaagctatggaatatctttgagtaacattgacgaaaaagaagaactcgaaaagtacagacaagaagttataggtaaggcaagagaaaacaatatgactgatgaagatatcgaatatattgaagaagatttaagatcgccttgtactcaagaaatagcagtatttagagcttttgctgaaattgttgaaagatcagaaaatgaagttgtagtaatagatacagcgccaacaggccatactttacttcttttagattcaacagaaagttataataaagaaatttctagatcagaaggagatataccagagtcagtaataaaattattgcctagattaagaaatgaaagtgaaactgaagtagttatagtaactttggctgaaacaactcctgtttatgaagccatgagacttcaaaaggatttagatagggctcagattcatagcaaatggtggataatcaattcaagtctttatgcaactgatacaaccaatgaaatcttaaaggtaaaggcaagtaatgaaattcagtggattaacaaagttgatgaaatttctaatggaaactttgcggtaatagaatggaaggcagaagacgtaagaggaaataacttaattaacttaatccaataaaattattttaaggggagataaaaaagatgaaaacaaaagttgcatttatctgtgtccacaattcatgcagatcacaaatggcagaggcaataggaaaactttatggaaatgatgtttttgaaagttattcagcaggaacagaaacaaaacctcaaataaaccaagatgcagtaaggatcataaaggatttatacaacattgatatgaatgaaactcaaaaatcaaagcttttatcagatattcctgaggtggatatagtggtaacaatgggctgtaatgttcaatgtccatttttaccatctaagcatagagaagattggggcttagaagatccaagtggaaaaagtgatgatgaatttataaaaacagctaaaacaatagaagaaaaggtaaaagaattagccagaagaattgagaataatgaaataaaattagaatagtaaattaaaaatagggggaattttaaaattgagtaataaatcatcaaggttatcattcttagatagatatttgactctttggatatttgcagccatggcgctaggaatattgttaggatggggagtaccagccctatcggaaggattagcgagcttatctattggaacaacatcaataccaatagctataggccttattgttatgatgtatccaccacttgctaaagtaaattataaggaactaggaaaagtatttaaaaatccaaaagttctaggattatcgttagtacaaaattggtttattgggccaattttgatgttcatacttgcttttgtatttttaaaatctgattcggaattaatgacaggacttattcttataggacttgcaagatgtatagctatggtaattctttggaacagcttagcagatggagatagcgaatatgctgctgcattagttgcatttaattcaatattccaagtagtattttattctgtatttgcatactttttcataactgtattgccacctatttttggacttacaggatatgagattcatatttccatgggacaagtggcaacgtctgttgcaatttatcttggtattccttttttactaggaatgtttactagacttatactagaacctatgaagggaacagaatggtatgtaaaaaaatttgttcctaaaattagtccattagctctaatagccttattatttacaattgtagttatgttcatgtttaaaggaaaatatattgtagaattacctttagatgttattaaagtagctataccacttgtaatatatttcatagtaatgttttctgtatcattttacattagttataagtcaggcatagattatcataagactactactttatcttttacagctgcaagcaataactttgaacttgcaatagcagttgcagtagcagtatttggaattcaatcaagggttgcctttgcagcagtaataggaccattaatagaagttcctgtaatgattgcattagtaaatgttgcacttcactgggggagaaaatatttttcatattctaaatagaaatgatattgctagttacagttaataaaaatatatagagcttgttgtgaaatatatagagtcattaatttataaaatttgcatataaatcaatagttgtaaggctataatagtataaattgtgctattatagctttatatttatatgtggaatctattgtatattcgaaagtgttttatgtaatttaagaaaggagttttaaaaatattatgaaatattcttatgaggaaggtaattttagaaaaggagatatactagggattactattgacagaaaggtaaatatttatttattagatggtgataattttattaggtatagaaataataatagttttaaatactatggtggtccagttgatagctcaccatataatattacagttccaagttctggtcactggtatattgtgatagatttaggcggaggatcaggaattctaaactactctataaaagtatttagataaaatacatatgtattagttaatatgttatttaactatagatgtccaaattattaattatacttattatgtgaacatatttactatatataaagggttatcttatctagaaatcataaatatatttgtggagaaaacatttgaaaatgagctgtcaagattcttagttgtagattgttccactttagcttgtcacactgaaagcgggagcatgctaaagtggtgaaatctgcagcttagaattttcagcgatattttcatagcttttcggaacaaaatatttatgatttcggcaagttaccgcataaatatagttttaaagtcggatatctatatattaataggcattatttagcgtacatttatatataaatttacattaaattttggtagtattttgaaataagtaaatagattttgttttgcattgacaataataggataaatatattattatatacaaaatatctaaaatgtaaaaggagtaagataaaatggcatattattttaatgaaccatcccatacttttggagaatatttattagtaccaggttactcttctgtagactgcataccacaaaatgtaagtttgaaaacacctcttgttaagtttaaaaaaggcgaagaatcattattaagcattaatatacctttagtttcggctataatgcagtcagtgtcagatgataaaatggcagtagctttagcaaaagaaggcggagtttcattcgtatatggatctcagtcaattgaaaatgaagctgctatggttgcaagagttaagaattataagtcaggctttgttactagtgattctaacatcaaacctgatactactttggaagaagtggtagaaataaaagagagaacaggacattctactatggcagttactgaagatgggactccaaatggaaaacttcttggaattgtaacaagtagagactatagaataactagaatggatttaagtactaaggtttcggaatttatgacacctttcagtgaacttatatatgcggattctaatataagtttgaaagaagcaaataacattatttgggataataaattaaatatgctgccattagttgataaagatcaaaagttaaaatacatggtattccgtaaagattattcagctaataaggaaaattcaaatgaacttattgattctcaaaaaagatacatagtaggagcaggtattaatactagagattatgctgaaagagtaccagcattaatagaggctggagcagatgtattatgtattgattcatctgaaggattttcagaatggcaaagaataacaattgattatatacataagaattttggagaaaacataaaagttggagctggaaatgttgttgatagagatggatttatgtttttagctgaagcaggagctgattttgttaaagttggaataggtggtggatctatttgtataactcgtgaacaaaagggtataggcagagggcaggcaacgtctcttattgatgtagttaaagctagagatgaatattttgaaaaaacaggagtttatattcctgtatgctctgatggtggtattgttcatgactatcatattacattagcattggctatgggtgcagactttattatgttaggaagatatttctcaagatttgatgaaagtccaactaataaagtaaatataaacggaaactacatgaaagagtattggggcgaaggttcaaatagagcaaggaattggcaaagatatgaccttggtggagataagaaattatcttttgaggaaggtgttgattcatatgttccatacgctggaagtttaaaagataatgtaagtataacacttaataaagttcgttctacaatgtgtaactgtggcgctcttactattccagaacttcaaaagaatgcaaaaataacattagtgtctgcaacaagtatcgtagaaggaagttctcatgatgtaatgttaaaagataatcactataatgctcaacagtaaagagaatatactatgaagtaatttcaaacttacaagatgcagttcaactgtttcgcaaggaattatagagagtttgcaaattaaaatatgaaattactcatagttaatattaaatgttttaataataaaaaattaaaattgacattatttaatccatgtcatatcatatagtatatagatttcattggaaggaagtatttttgtgagtgtttagtatcttaattatagtaatttaatattaattcaaaaaagaagtattttatacttttatttgttgttgaattaattataactattaaaagatacgagccacgaatttgctttcaaaagataggtatatttctatctttatttgatgttgaattttttagctgtggaggtatccacagcttttttgtttatttaaaaacttaaactatatatgtattgcaattgtttttacacattttgtatgcaagaatttacttatcctgaaaacatactaagtgtaattttattattgcaacatagataaatatttgatgaatgtatacattgcattaaatattggtttgttaagtaactctattttgaaatctataaccttattcgtggcttgaatatataagaaaaggaaatgaaaaaatgaataatgccacattagaaaaattaaattataaagaattaaaagacattgtaaaatcattttgtgtaagtaacttgggaaaaaagttgattgataaattagttccaagtaataatataaaacaagtaagaagaatgattaaagaaacttctgaagggagaagactaatcgatgcatcttatcatatgccccttgaaggagtatttgatatatctccattaattgaaaaaatagaaaaaggtggggttttggaaccttcagaagtgattacggtaggagattttcttagaggatgcagaaaagtaaaagcattcattaaagataaagaaggatatgcagaaacattaagtgcatatggagaaaatattacagacttaaaatatattgaagatgaaataaatatagctattagaggaaccattgttgattctaatgctacaaaagaacttaaaaaaattcgtaggagcattgagctttgtgaggaaaaaataaaagaaaagatagaaagatttattaagaatccaagcaataaagagtatatgcaagaattttttgttagtataaggaatggaagatatacagttcctataaaagctgcttataaaaatcatgtacaagggactatagttgaagcttcttcaaaaggtactacagtgtttatggagccagcttcagtgtcaaaatatacaattgaattaataactttaaaggctgaagagagcattgaagaatacaaaatattatctaccttaagtgaaatgatttttcaaaagcatcaagaaataaaaataaatatcgaagttatttcagagtatgacatgatacttgcgaaagcaaaatatagcaaggaaataaacggaatcgagcccaagcttaatgactacggttatataaaaataataaagggaaaatatccattaattaaagaatgcgttccactggattttgaaataggaaataaatatagaagcttaataataactggtccaaatgcaggcggaaagacagttgtattaaaaagtgttgggttacttactttagcagcattaagtggatttcatataagtgcacatgaaaatactgaaattgcagtatttgatgatatttttgttgatattggtgataatcagagtatagaaaatgctttaagtacattttcatctcatgtaaaaaatttagcagagattttaaaagaaagcagtagaaattcattattactttttgatgaaattggaagtggcacagaaccaaatgaaggagccgcacttgctattgcaattttagaagaattttatcataaggggtgcattacagtagcaagtactcattatggggaaattaaaaacttttcgcaaaatcatccagacttcgaaaatgcagctatggaatttaaaagagatactttggagccattatataaacttcatataggaaaaagcggagacagtaatgccctatatatatcaagaaaaatgggtattagtgataatataattgaaagaagtagaaaatatattcaaacaaaagattataattataatttagtaaaagaaagtaaaattcctaaaagagaaatagaaaaatccgaaactcatgagtatatttatagagttggagataaagtattactgcttgataaagatgcaagtggaattgtctataaagaaattgatagattaaataatataactgttttatttaataatgaatttatagaagtaaattacagaaggcttaaacttgaaattagtgctgaagaattatatcctaaagattatgatatgagtcagctattttcaagctataaagaaagaaaacttaatagagacattgaaagaggatctaaaaaaggactaaaaaaatttagaaaacaggaaggtatatagatatctaacgttaaaacttagatttattcgatgactcaacgaaatcaaatatatttctagtatagcggtatattctaactgtaagttgagctcttaaattgtctatctataaagttaaaaaggaaagaatataagaatttaggaataaaggaatttaagaattaaagaatataagaatttaaattcttaagaaggaaagaatttaagaatttaaaagtgaaaatatttttaaagaaaaaatataaaaagttaacaatttatagtgttttcaacgctttgaacaattatatatagtgtaaaaataattcttcgttataattctaaaaatattgaaggaattttagctgtaattgtgaattgtgaaacttgcattgtgaattgcagcatatatattaaaaaaggttatcttatagaggtgtataaaccaataagataacctctttttataaaaagcataataatgtattaattctttctaattcaggaaacatgtattaagtaagcctttttattggtaaataataatgctataatatgaacagattattacacatgtcataggtgataattttactgttactgaatgaattggaggaaacatatgaaggaaaacttggaagttacattaaagcaaatgattcatatcattcatagagctattaattctgtggacaaaagacttttgaatcatggagaaaaagttgcatatataatgttaaatttattaaaagcaaaaggaaattatagtaatgaagatatgcttaaaatttgcgtcatatcaatttttcacgatattggtgcatataaggttgcggaaagagataagcttgttgatattgatgtaaaaactccatttgatcacgctatctatggttcattatttataaaatatttttctccgttacctaatttatataatatagttctaagccatcattttacgtgtaagtattttaaggacaagcacatggatattatatctaaagaaggaatgatattaagttttgccgattatattgatagggtatatttatcaaaaaaagaattaacgaaagactttattagaaatcatgcagaagaatattcaaatgagtatatagaattattgctggaagcagatagaaaatttaattttattgaaaagctaatagataaaacttatgttgacgagttgtatgatttttttggtactagaatacttacaagagatgaagttgtatcatatagtaaaatgttagcttattcaattgattttagaagtgaagcaacagttaaacatactatattagtagaagctgtaagttatcaaattgcaaagctgtgtgggttagatgagaaaattttatcaaaaattaaattggcagctgcacttcatgatataggaaagattgctattccagtagaaatcttagaaaagcccggtaaacttacagacgaagagtttgaaattatgaaaagccatgctattataggatatgagattttaagtgatttaaatatagatgatataagagatataggaacatttcaccatgagaagttagatggtgcgggttatccatttgggctaaaaggaaatcaattaactaaagaaatgagaatagtagcaataggggatattactagtgccttattaggagtaaggagttataaagaggaatttagcaaagataggataattaaaattttaaataatatggctaaggataataaaattgatttatatatcactaatttgcttatagataattatgattttataattgatgaggcaaaaaagcaggctagtgatttaatggcaaaatatctaaatataacgactgaatataaacaattattaaaaaaattctcgtaaaaataagtgaatatcatataatctcaagcaattacatatatgt

SEQ ID NO: 58 - DNA, 36762 bp, Clostridium beijerinckii
attaatactttcttctactttatattcatctatattttgttttatttttaatatagatgacaaaactactctcactaaaatattactaaaaaaaatatctcgccttttatctcctaaatttctaatataaatactgtgcatatcttcaatataatctactatatcatttatagactttaattctattctggattcctctgtgcattcattccacacttcagatagctttttccaccataaaattctttgagtttgctcatataattcatgcctaataatatttccttcaaaagctttattatgtggaaaagtaaaaaaatcacataggtaatgactcaatattcctagcttaattgaaatatccttatttcttttaatttcaccataaattatttcatcaataatccctataaccttctcccaatcctcatttttactatgcatagtcattctatatttgagctttaaatcaggtaacacatttccataaataaaaaagttactatcaataatatttgagtagcctctctcaattaattccttgctaagaaaatagcctattttcccatgaagtaaagtatccatattaacgctcctaccctttttaatcacatttagagagtaataaacaagtaattgtctgaatcacaatacaaaagtgcattttcacacatagaagatacatttttattatggtactagttattactcttcatcacatgcttaaattataaaaaaagtaagttaaatcaccattacgtttctgttattttttaacgagcttaattatttttcttttttaattgtacatactcttctagtgttatatttccataatcctttaatgcttttataagctcatcttcatgtattatactaatgagttccatgtcatcattaagaatataaaaactgttaaatttgtttttatcaactaaagataaaacattaactaaaccttttttataatacacagaaattgatttattctctatatagttatgcttttttaactttcttattttcttgatcatatctcccattattatatacatagttttttctttttctataaatgttgcatatgtgattaatatgactgcaagaaataaacttatattaactttatgtaatatcattattataataaatattaaaaataatgttcctgaaataataaagctaaagatttctgtaattttctttgatcttttatataatagcttctttgataatagtatttcacatacccttgaaccatcaagaggataagcaggcaataaattgaatgctcctaaaaagaaattaacttttatactatcttcaataatttgatacttaaaatatccatataaatagcacataaccacagccataaaaatattgaaaaatggtccagctaaatataaaatcattttttttctttcagttaactcatcgatgtcacttaattcgactttagcaccaaatatgctaatattaacattattaaatttgcacccaaatttacttgcaactatcatatgtgcaaattcatgcaatattacccacagaaaactaataacaatgtaaccttcataatctccaagccacattaatatcgacagttctaaaatcaataccatataccatttcttcatttctaacccctataatattgctatatcaaaataatttgcaatgcacaagtaaaaaatggaacttaatcaaatattaaaatatattttatattcataataatatgttatttcctataaatttaattgttcatattactgttgcttcttatatattccataaaattaaaagtccttaactttaaattttcaattttcaaatcatctacagtaaaatttccaatctttaaatccttaccttttatatttcctatctgcattgtactaaaagtatctatatactcgttataattaaaatttcggtttaatgcttgtttacatttaatgtgcatttcttgtacttgtgcgtaaggggtatacttcaatccaacaaaaaatagcaataaaagtgtagctccagttagttccttagttattctcttaatcaaaacatttatcatcttatcgttacttttcatattactcccatatcttgaaccaatgatagcattattagctttcttgcctgaagtcaaatggttccttttatcctttcttcctttcgttgtattattaatgttcttatagtaatcctcataagctgatctatagctgcccatgatacactcctttcaaattcattcacattaaagtatatttactacttcataaaattatgagaacaaaattgttgcagaatctttgtatttgctacattccgcaatatttagatatcatttaggctgcttaattaaaaaaatacaccgcctagaatttttatgccactaatacctactcttcgaaaatcatctattttataataaataatccttaaaaattaaaataagattaataattttatactgtactcaaaattcttatttgcaatttctactgtactggataaaattattaatcctattattttataaataattttggtatattcactataattattttttacatttccctccaaattgagcactcaacttattgaaattatagcataaatttattatagcaacatgcatattctaaaagtgtatcttttttcttctcattcctacatttattactagtgctattgaaattactgttgtaagcaatgaacttcctccatagctaacaagcggcagggttattcctgtaattggtagtaatcctattgtcatccctatattctgcaatatagcaaataaaaaatatgacactattccaacacatataactgagccaaatatatctttagatgttcgtgctactgaaatcatcttatatataagaaatccgtaaagcattaacaaaacaattgcacctaaaaagccccattgatctgctattgcagcaaaaataaagtccgtctgaacttctggtacattttgtgcagcatatgttgtaaccccatcttgagccagcgacggactacttccaagtaatccacctgaaccaattgcaatcaacgactgatttaaatgatacgtacttgcatcatcgatgcttggattcaaaaatgctgtaaatcttgctttttgatatgtttctatgagtcctgaattccacacaatcactattccaagtactaagcaggctaatcctccagcaataattctcgtatcaaaccccattgtataaaatattcctaaaactataaagaaacataccatactcattcccatatcaggttggattacaataaatattactggtactatgcaataaaatgctagtgttaaaaaattcttaacatcatttatttttccgtccatctcatctaacttcttacccagcataagtataattacaaactttgcaaattctgacggctgaaggttacctactcctaaacggatccatcctctagcaccattaactactattccaatccctggaaccatggttaatataagaagaactacaactccccaatataatataggtacatagttaaatattatcttataatctactgccacaaaaatatataacgctacaagtgatattgcaaaccaacccagctgttgctttacaaaactcaatccaaattgtccttttgtgcatagatatatattaaatgttccgtataaaattaaaagaattaaagaaattaatatagtcttatcaatttctttaattaatttcatatctaattttaatagtctaaacaatatctcacctcctagttatattaatcttatataactcaatcaatcttaattatacattattattaccgcattctccataataattatattgggtataaaaaacataataattttgtaataatttaaagataatatcttgttaaatacccaaagtcatccatatttaacaaacttaattattataaaaaaatgagatgacttgttttaaagaattagccatacaattctttaaaacaaacatctcttataatttaaacaaaacaagttacttatcttccctttatacttttaattggaatgttagctattaatgcagaagtattttcaccttcttcatctccattcttatttacggatatttcaacatcctcaacttgtatatcaatatacttagaaattacttctaaaatctcttctcttattttctcaataatatctggggcaatttctcctctatcatgtataagaattagctttagtctgtcttttgcaacttctttaggtgttggcttactatttaaactcttaaaaaaacccattctctcaacctcccttaatttcgcttaaatagcttctttaaggagctaaaaaatccctgatgctcttctgtatgtaaatcaataataggaacttcttcacctgtaattcttctagctatgtttctgaatgcttgtccagcaatcgcaccttcttctaacacaataggttcacctttattagttgaaatagttatattcttatcatccggaactactccaagtaactctactgataatgtttcaataatatcagctacatcaagcatgtctccattcttagtcatttcatagttcaatctatttacaataacagaatggtcttccaatccctttgaatcaagcttaccaataaccctatcagcatctctaacagatgttatttctggatttacaacaataattgctttttctgcacctattacagcattttcaaaaccttgttctattcctgctggagaatctattaagacataatcaaactcttcttttaattcatttactatttttaacatttcctgtggacttatatcatctttatccttagtttgcgctgttggtaaaagaaataaatttgcaaatctcttgtcttttataagcccttgttttaatctgcatcttccttctataacatcaattattgtatatactattctgttttctaatcctagcaatacatctaaatttctaagccctgtatctccatctataacaactactttcttaccaagtgatgctaaagcagttcctatattggctgtagttgttgtttttccaactccacctttacctgaagttattacaatagatactcccattaaaaaatccctccgacgttttagtatatatatttatttggtaaatatggctccactattatcaacccatccctaattcttgctaattctggatagcttggcttttcgatatcatctggagacatagctataacatttgcaatttttaatagttcaggttgtagtaggaatgctgctattaccgcttttatatttccattagtcccagcgctcactttaccccttatacgtcctaaaacaattacattccctgctgcatatacttctgcaccactatttatgtctcctactataactatgtttccttggtaattaatacattctccgcttctaactgtctttcttataaatttagttttcccttcgtatacaccggaaaataccttaacctctttttcgttcacctgctcaatttccttttctatatcctctagaacaatatcttttaattcaatttgagttaataatttttctttaagaatgcctacttcctttttattaaccaattttaaatctattcttaatattagagttgtccctttataaaaatgctttcctttagaaagtttctttattagtaatacaagcatatcatcaaaacaagcaaatttattcatattgatagttgtatttattccatctttatttccctttattaaaataccatcattattatacattcattccctccaatgaattttgcaggttaaaatagttaaattgttttgaaaatggcaacctctctaaaattatatcattatactgactatttttgtatatatgtttcactaatttttgattaaattttacaaaagcatataaaacatcaaaatttgataatatgcattgtatataccaaagcattgaacagctatcacactataatattacatcaacataatcccttatattaatactgtcttcatctactaaacagtctactgcaactatatttacaccattctcttttgcatattttagtgtatctccaaattccttatgagtctctacattaggttcaaaatgaacaacatctttcatttgtattacaaatattacgtaagcatcatacccttctctaacgcaatcaatgagctctctaagatgtttaacacctctttctgtaggtgcatcaggaaactttacaattccattattctctaaagtcaccccttttacctctataaaaattttctgatgctttgtctcaacataaaagtcaaaccttgaattcttatatttagtttctggttttattaaagtcacatcttttaagaggttcccttttaatatccattcatgaacaaccttattagttacttgagaatccatattgatcattctgtctccttttataacgcctataagagaaaacttggttttcctttttggattatcatttttttgaataaatactgtcgcattagatgtcaaaagttccttgcatcttccagtattttttacatggcagacttcttcattgccatcaatttcaacataagctataaatctatttggtcttgagataaattttcctttcagaatattattatatttcatttttccctcactaaatctaaatttttataaaaaggtatctataattaggtatgcaatttttataattgcatacctaatatagataccttacaaattaattaatttttatcaatttatatttaaatacaaagtctctattataaatttttattaatgagttttatttgtattcgcctgtgaagcatttgcttcttggttatacggattacctaaaacatattttttccatgtctctgatgatgaagtatactgtgtgtcattctttaattgatccttgaaataagcatcataaaccgcccttaccactggcgcaatactacttccatggcctccatcaaatactactgctgctacagctatctgtggatcatttgctggtgcaaaactgacatatgttgcgtaaggttcccttcctttttctaattgatcatctgaaacatcggctgtaccagtcttaccagctgttggtattggatatcctaaaaatgtagaactacctgtaccatctgcttcttggttaaccgctgtcattccttgtttaacggcatcctgagtctcttttgatattttaactgtatttaaaacttctggtttaaactcttgaactacatttccatcaccatctgtaatcttatctactaaatgaatcttatatcttgttcccccatttgcaaaagttgagatatacgatgccaattgtaatggagtaaagttattcataccctgacctattgatgctgaaacaagggatcctggtgaccttacttgtcctggctgatcattagctgcaaattgagctaaggcttgagatattgacgttgcttgagcatctaaatttatatttcttcctgcaatactcgctttgtactcatctgaattattcatcaaatttaatacatctttcctaatatctttagcaaatgcatcatgaccaaccgctgttggatcatcaacatctttatttattgtatctttaactttatcttttatagctttcttagacttcctaacttcatcattgtcatcttctttatcccttatattaattggagtaaaatatattgtattattataatttccgctatctagaaaattaattatattatctgtagacatctgtagcacagtatttctccatgatgtaaaattataagtttgaccaaagttttctcctatttctattcctgtcgattgcttagcattactattaggatcaatccccaatccaaactgccaagcatagtttgctatggaatttaaagctctagctttatcttcaacatttttgctcaaaccacctgcatttatatacatctgagtagcagtttcataaaaataaaagttaatcgattgtgcaatagctttcgttaaacctattggtccttgtgcagcttctagtcctcctgggttaaaagccgaaccaaaaatttctgggtgagtattaaaacttccagtatcatttataattgtacctggactaattgctcccgactctaaacctgcaatagctgtaagtggcttaaatgtagaaccaggtggaattagtgactgagttgcataattaaacgttgcttttggatataaatcaaatttatcccatctagttccattatttaatttaggaaataaataatcaacagttttattaatacccattcttttaataaattcctgtccaaacttttccaaatcaggattaaaataatcctgatactgctcaggagttaactgtcctggaactgtaaataaatttggattcaaattaggataacttgttaaagctaatacccttccagttttaacttcaactgctaccaatgcacctctggttgcattcaatagtctatttcctttatcatctcttccggtagcctgcatatcagcaattttatctgctaatgcttgatctgctgcatattgaatatctctatctattgtaagatgcacatcatttcctggatacggttcaagtttaaatagctcttgcgaaacgcttcctttagagttaactttaacagttgttccacccttaactccttttaattgttcttcgaaagccgattctattccagactttcctacataatctgatgaaacatcataccctttaagttcatacgctgatttttgtgtatcattaattgaagatacatatcctaaaactgaagatgctaaattattatatggatatgatcttatgggtgccgaactcacatttattcctggcaaatcatatttcttttgcattactactaatgaagtatctttcttaatattctctgcaatagttactgatttatatcctttaaaactttgcatttttatagcatcttttacaagcataaattttctaatatcatttaaagaatacccttcttttaaaatcatatctgttaaatccttgccttccattttagaatagacattcttcttttcttttgagtcataatctgggtctacaaggccaattaaattatacgatttaactaatgcataaaatgcatcgtcaggagttattttcagaagttcttcatctagttttgcattttgttcatccgataattcttcaacatccttgaacattttgttttttagagtgtcattcagtcccctatcctttttaaatctcaattcctctatattttgggattgtttctcattagttttatactcaaaatatatattattattaccatcaatttttaaaggtaacgaatcctgaatgctttctccattttcatccaatattttaaaaagttctttcatagttatataaaactgtttatcagcatcttttgtttccgtatatgtaatagtgtatgtttgaatattagttgctaaaacatttcctttgtcatcatatattttaccccttggggctttttctgatataaatcttgttgatgttacatctgctttatccttatattcatcataattaaatacttgaatatataacaattttagaatgatcactgaaaatatagctatcataattatagataaaactgtatatctagaaatcttctttttctttttattagttggtttatttactatcatctaaacctccatctttgctttgaatactcatcatcataaacattcattactaatttatacacaaaaaacattattactccgttgtatacccccataatgatacttttagaaaattgtatttcaatattaaaaaaattaaatatcaacataactcctgcgtatttaattattgttataaaaaaagccgagatcacaggtatcagtctcttagtctttattattcctgctccaataaaacttgccagaagacatagaaataaattcaataatgaatttacaccaaaaccattaaaaaagaaaatatcttgaagtatcccactcataacacccataaatacagctcgttctttcttattgactaatgaataagctatagcgaaagtaaacagcaaactgggatatgctccttttattgaaaaaaacggaattagtgagttatctaatataaccaatcctatagaaatcaaaataataattaatttttccattataaacctctaattatatttaatttctctcgtatcctttggagagacaataaataattcttctaacttattaaaatctacatatggttttacaactgcattcttcattacttttactttatcttcttctactgaaattacttcaccaattctaatttcctttggataaagcattcctactccagatgtcattattacatcgccttccttaacatctgaattcattggaagatcatataccttagctaagttttctcccgtactatctttgaaaccttttatataacctgtagcatctctagtactttgatccataacacttactgctatattttcattaatcagagattgaactatgcaccaattactcccaacactggttacttgtcccactagcccttgagccgctataacaatcatacccttttgtatattgtcattttttcctttatttaccacataaccatctaaaaagtttccaccactatatcctataatatcacatgctacatagttataattgtttctttcttcctgaaaattcaacacttgtcttaatctatcattttcttcttttaaatctgaataactagccaactcattttcaagttcttgattttctttaattaattctttattttgcgcttttacttctgaaaaattcaagaaaaaatctaaggtctctttaatcctactagttcctgaatataagagactttgcactggatttaaagtactaccggcaccactttcaataatacttctattttcctttctaactgtataaactattaaccctaaaaagctaactgacagtactataatagttactgccagtttattcttaagaagcttcatatttaacctctttgatctctgctaattttatcaaaatcttctagtgccttccctgctccaagtactacgcaatcaagaggtgcctccgcaatatgtacaggcatgtttgtttctttatttataagtatatctaatccttttagatatgccccgccacctgctaacattatacctttttccataatatctgctgaaagttctggtggagtcttttccaatgttgtcttaattgattctataatagcatatactggttcttttaaagcttctctaacttgagtttctgaaatttcaacaatctttggaagcccagtaatcatatctcttcctttaatctccatgactgtttcttcatctgaagtcctataagctgaacctatttccattttaacttgttcagctgttctttctccaaccattaagttaaattcttttttaatataagatattattgattgatctaactcatcaccagctattctaagtgacttactagttactataccacctaatgaaataatagcaacttctgttgttccaccgccaatatcaactatcatacttcctgttggttcgcttactggaagccctgctccaattgctgctgccattggttcttccattaaaataacatctctagctcctgaaagttttgtagcttcttcgatagctcttttctcaacttctgtaactcctgatggataacaaactattattcttggatttttaaatgcattcttagttgatactttttctattagacttttcatcattgtttgagctgtatcaaaatctgcaattactccatcttttaatggtcttatagctactatatttcctggggttctaccaatcataagcttagcttctgatccaaccgctaatgtctttttagtcatagtgttcattgcaacaacagatggttctcttaaaactattcctttaccttttacaaatactagggtgtttgcagttcccaaatctatccccatatcttttcctgatccaaaaaatcccatttatttttccccttccaattctatattagtcctctttctttgaggctaacaaatttattatttcctattataatatggtctactaattgaattcctataatatttccacattctttaattcttagtgttatatttatgtcttctctgctaggcgtcggatcgcctgacggatgattatgacatataattatcgatgcgctattcttacttatagcttgcttaaaaatttctctcggatgcacaaccgacgtatttaaactacccttaaaaacatctttaataccaacaactatattcttggtatttaataagacaacttttaatacttcttgatttaattcgttcatttctcccatgagaagacttgataagtcttttggtgaagttattttgatgtcattatttattgctttcaatgttctaaatctcttaaaaagctcagctaaagctaaaatttgtgaagcttttccttgtttaataccttttatagatactatatcatcaaaacttgcatctaaaataccatttagcccttctagctcagataaaagcctgctacacaattgaagaacattctctccttgtgttccagtcctaattattattgctaataattccgaattacttaaagattctgctccataagttaataatttctctttaggtcgttcattttgtggtatatctttgattttaaggctactttccatataatatattacctccaaatatatgatttcccctctatccctaaaatataattattgtatctctttaagcataaactttagcttattcagtggcagtccaacaacgttgtaataacatcctcttatctcttcaacaaatattccacctatcccctggattccataagcgccagctttatctaaaggctcaccagtttttatgtattctaatatttcatcgtcgcttatttcagaaaaagtaacttcagtagataaactctcttgaatcgtcaaatttttagctgtattaatcacaacaacaccagaataaaccaaatgttttctaccttgaagtgattttataatattaaaagcatcttcttcatctcttggttttcctagtatcatattgtctatggtgactacagtatcagctgaaattataatcgcatcctcatctagcttattcttaacattcagtgcctttcctaaagctatgtctttaacatatctatctatagagccctcaaaaataactttactctcatcaaaattactgacaataacatcaaaattcttaattaatctacttaagagttcttgtcgtctttctgaagcagaagctaatattactttcatatattcacatcctaaaataaagaattttggcacatgaaaaataataggcgagcataatgatctcccattctttgaatgtaccttattatatatcattgacaaataatatatattgtagacatgttaattttttaaccaaaaactattaaattttaaaggtgtagaaatgatattctaccatttctacaccttatagtttatcatttaagatgttcttaaacaagtgtgttatattaagttataagtttttttatataaatgtaattttgttgtaataattattaactaaatctttcagtttttaataagtttatataactcctgcatatcattgctactgttcgttttatccatttcatcaggcagattttttacataatcatataattggcttatcttatttgatttggctgtgcttccttcatttacaattccatccgtccaggctttaaattctgctgtttttatacttttcacctgattatcttgtaacttattcacaattgtcaaaaatccattcataatttctatgagctttttattttccaagtcatcactagaagcacctaaactaattttagcgacatcaatattattggacttgaattcttctatcttttttaagccatcttcctcattatatattcctgctaaaactctatatttaccatcatcttctactataaatggctgacagtattttgatattgcagatagcgactcttttgcattctcctcttttgaataataaccacattgcagtgcgatgatattttttattgtaccgttatagtcaccttgagttgaagattttgaactatttatgcctacgttttgtacactcttcccatcaaagataacattgctaataaacactcctccaactatagatatcccaacgataacgacaacactacataagaatttcatcctgcctgattttttatattcatatcttgtgtatctcatagtctccccccttttgaacattctaaaaatagcgtgtcaaaagttaagttttatatgtcatcaaaacttatagaaaacattataaaacagaataatattatatatatttgacctgctattttttcagatttcttatatattaatatttattctgtaagttacacatatatgaattatgttaaataaaaaaatattatatagggcatattttaaaaatctaaacttatatatttgcaatattaaggctatagaaagtcatattcctacactcctaagcatacttatatatcatttctaactatattatatttacatttagcatcttaagttaactatatccattagcaaaaaattcttcttgcagtagcatatctttctgaatagtatccatcacacaatgaacttaccattactggttttccagaccttggcgcatgtataaattctccgtttccaatataaattcccacatgactaattgatccttctgtattaaaaaaaactaaatctccagctcttaaattacttttatccactttagtccctacatttacttgtgtatatgtagttcttgatatatctacaccaaatttattataaacatattgtgttaatcctgaacaatcaaaagcatttggaccaaccgctccataaacatatggctttcctaaaaacttatatgcataatttacgacttcatttcccttactaattgctcctcttgatactgaatcttcaccatttgatactgtttctgaatctgatggtgcttttatcactttagccgttttaagttcactagtcttaattgtaattcctctattatgtgttaatgtagtatcagctttggcatgttgcatattaataagaaaaactcccgaaaaaataaaagttgtaattacacatttcataagcctattatttttaattttcatcttaaattcctctccatacctaatctatattaccataaaaggcatcttggttatcgtttacactttactgcaaattttaaaacatgtttctagtatagtgataagctaggtaaaggtcaaaccttttatacttttatattcttatttataccgaaatatctctaatttcctcaatattactatcaataatggtcatttactgtaaatttataattttctgacttttgttttacattttgttatttcttactcattatcttttttataaataaacttaaaactcaaaattgtgagagtaataaaaaaacagtaagttatccaataaattttctggttaacttactgttctaattaattttttatactaatttctaatttctttgagaacttctaataaatattcaaagcatctacaagcagatgatatacttaaatgttcatttggagtgtgtatatcaatgatattaggcccaaaactaatcatatctaaatctccaagtctttccttaagtatcccacattctaatccagcgtggatagctacaacttctgcttcttttccatacattctaaggtatacatctttgcatatatcccttatttttgaatcacttttatatggccattctggatatcctgcggcagactcaaatgtacctcccataatttcagttaaacatttatttctttcaactatttcttctttcaatgaaaacacagaacttctaacagcactatgatattttatatcactttcattggttgttaccactccaagatttgatgaactttccactaatccttctatttcagaactcattgtgtttacaccatttggatacaaatatgataaactaattgctttagttgtagtatcatctgaaaatactttttctattttatctttactttcagataatgttatcttaagtcctggatcttttgtgctcaattctttagaaatatcactatctatctttgttttagcttcaatcagttctttttcctttgattgatcaattgaaataaccgccatagcttctcttggtattgcattatcttttgctccaccttttaatgaaactaaattaaaagataccttatttaagatttcccttaatactcttgccattaatttatttgcatttcctctttctaaatgaatttcagctcctgaatgtcctccagctaatcctttaacttcaatcacatattcttttgtattttcttttttatttgtccattcaataggcaaagtagattcagttctaattccaccagcacagctgacccaaagttttccctcttcttctgaatctaaattcaaaacaatttttccatctaaatcttttgatcgtacagctttagctccagtcattcctgtttcttcatctgttgttattaatacctctatagcaggatgttctatcgatgtgtcctccaatattgccatcgcataagcaacagcaattccatcatctcctccaagagttgtattatctgcatatatataatcatctttgaccactaaacttattggatctttttcaaaatcatgaattttatcgttatttttctcacacaccatatccatatgaccttggattataactgttggagctttctcatacccttttgatgcaggttttttaataataacatttagggcatcatcttgaatacattctaatcctaaactctttccaaagctcaataaataatcacttatttgcttctcatttccagaacctcttggtatcttacttatttcattaaaatgataaaaaattcttttccccgtaatattctctaaatttttcattctactctcttcctttcatcaattatatgatagaatatgattatacatatcttttcttagtttatcataaaatattgctatattatgtatatttttattattttatgattaattatttcacacactataatatatatacaaaattttaatgtgaggtgtttatatgcaaaaaacaaaaatgatttttactattggtccagcaagcgataatgaggagactttaagaaagttcattgaaattgggatgagcgctgcaagattaaacttttctcatggtacacatgaaacacacaaagaaaaaatcgaactaatccaacgtctaagtaaagaaatgaattctgcaacagctatagttcttgatattaaaggtccgaaaatcagaactcataactttgtaaacgatggtgtaactcttaatgacggtgacgatttcgatttcatatgtggcgaagaaattcttggtgatgagaaaagatgctcaatctcatatgatgtactttatcaagatataaaagttggcggaaaaattcttgttgatgatggtcttctaaaatttaaagttactggtgttgaaggtaaaacaattcatacaaaagttgttgtaggtggtgaaattaaaaatcataagggtgtaaatgtacctaatgtagttattaaattaccatcaattacagaaaaagatatagaagatataaaattcggatgtaaaatgggcgttgattttattgctgcatctttcataagaaaagccagtgatatcttagatgtaaagaaagttctaaaagaaaaccatggggaacatataaaggtaatagctaaaatcgaaaaccaagaaggtgtagataatatagattctatcatcgaagtaactgacgctgtaatggttgccagaggagatatgggtgttgaaattccaattcaaaaagtgcctataatacaaaaaatgataatcagaaaatgtaatgaagctggtaaagttgttataactgcaactcaaatgcttgattcaatgattagaaattcacttccaactagagctgaagcaagtgatatttgtaacgctatttttgatggaactgatgcaattatgttaagtggtgaaagtgcttctggttgtttccctatagaagcagcaaagacaatgtcaaaaattgctcaagaagctgaagaatacttagattataatcacttaactgcaagacttagagaaccatcacttactgactacgcagctgcaataagttattcagcatgtagaacagctaacatcttacatgcaaaagctatagtggcagcaactaagagcggtgctactgcaagactactttcaaggtacagatcaaaggctccaatcatagctataacaccttacgaacaagtaagaaaaggattaagcttaaattttggaatcttcccaatgccttgtaaaatgtttaactcaacagatgaaatattaacagaagctaaaaacacagtatttagtctaaatttcacacaacctggagatgatataatagttgctgctggaatgccaacaactcaaactggtggaactaatatgttaaaaatagaaaagatttaattaaaatactccaaataaaataagtatggatgattatccatacttatttttcatatttatacttctgtaaatctactcaaatttaaatcctttaagtaaatcccccaaagaggttccactttcatcactattgtcaatataatcaagatattctttattattttctacagcttcttttatacttaatgctattcttttttcttctctattgatacttaataccttgacctttactttttgattaacttccaacacatctgaaggctttgcaatatgttcatctgtaatctctgttatatgaaccaaaccttctattccatcaaataactcaacaaatgcgccaaatgcagtaagacgtacaacttttccttcaagtatatctccttcattaatgtcattgctatgaactgtccatggctctttagttacatcttttaatattaatgataatctttcattttttctatccacactacctataaatacttctaccttatctccctctttaactatatcttcaggcctatttactctctcccatgataaatctgaaatatgaattaatccttctactcctccaatgtcaacaaatgctccgaacttaactattttcttaacaacaccgtttcttttctctccatcttttaagtcatcccatatatttttcttatttttgttatattcttcttcttcaagaattcttcttgaagctataactcttttattgttaaagtctaattcagtgattctaacatctaaatctcttcctaccaaattactaagctggattctttctctacttgcaagggagcctgggataaagacttttatgttgccataatatgcaatcactccacctttagtttcttctttcacatgtactttaacattcttttcttctttaaagcattcacttaattcttctctatcctttatttctaaagcttttattaaagaaagttcaacatacccctcaccatcatttggagatatgacataaacataaatttcatcatctttactgactacttccattggatccctgtcatctatagatacctcttctttagctattaatccatcgaaagcataatctatattaaccgaaacctccttatcgtttacatctataaccttaccttttaatacatctcctctatttagtctttttacatcatattgatttaaaagttcgctcatattgctttctaattcttcattggacatagtataattcactcctcattataatttttcttacttacaataatagtctaatagaatcttttacacaagtacggtttactgtgctacaaatataattataatataatcattttaaatttaatcctcatattatcttaatataaaaatccatattgttttaatctaattattcccaaaattatttgcaatttcattatacagtatcaaataccatttaaaaagatatgaaataactattataagagagagataataacctttattacgatatacaattataatcatcctttttagtcttttttcatcgcttttccatattgtgtataaggaatcttttttatataataagtacataatcttttaaggggtgatcactattcgtaagattaaaaaaaaatatgttttaactatatttttaacattcatatttatattttctaatttatctttagatgctatgtcatttataggtataaatacatctaacaatactacagtcgcctttgctaaatcaactggtagtagcagtcggtcaagctccagcggcagcaaatttagttctggcagttcaaaatcaagtaatggatttagttcgggatcttttagtggatcaagttcttctagtaaatcctcaacaaacacaagtggtgattcaagtagttcaaagagtggtgaaggatttaaatctggtaatttttcgaatagtgattcttcaaactcaaattcaaagaattcttcttcatcttcaagtagtggtggatcacaaggatttagtagcggttcttattctacaactgataaaagtagaaccactgacccttcaacttcttctaatacaaatgataataaaaatactaatactcaaacatataatagtggttccaacagacattcattctggccattctttggtggaggatacttttatagaccattttattttggttcaccatcaagttcattaattaacaccttagttttagctggagtattcgtactagctattatattaataaaaaaatatttaaataataaaagaaaataaaaattatttggaggtataggcatgggaattttttcaaggatgtcaaatatgattaaggcaaaagtaaacaactcattagatgaaatggaaaatccagttgaattattagaccaaaaactaagagatatggatgaacaattcaataaagcaaaattaagttcagctcaaattttaggtaatgttcatgaaattgagaaaaaactagattctgctaaaaaggaatctgaagattatgatcaaaaggttagattagcactaagtaaaggaaatgaggaattagctaaaagagcattagctaaaaaagttgaaacagataaaaaggctgcttctctacaagcaagctatgataatgctaaaatacaagcagatactttaaaggcaaacttacgtgctttagaagaagaaataacaaaaactaggagttacagagatgaggcagctgcaagatttgcaaatgctgaagcttctcaaaaagttaatgaagttcttgctaatgttcaaactaaaaataactcaatacaaattgatagtatagaaagaaaaattcaacgtaaagaatctcttgctcaaggtttaggtgaattaagagacctagatgattttgatagcgaatttaagaaattagatgaagttgatttggatcttgaattagcaaaatataaatctaattaggtgataagacatggataatgataaggacctaaattttatcaacgaagaacgaaggtattggggcaaaatttatacagatataacttatgctataagtgaaatatccccatttatttcagaaagagattcaaggataagaaaatatttctctaagtcacctattcttaaggactatatgaagcttttagattctgctgaagctgactgcaagaaaaaatccttattttcaatgtttaaatctagtcctagcataaacttacttcaagattttaaagctaaaaatagagaaaactttaaacagttagaaaaatgctctcattgtgaatgcttgagttgtgcatttgattgtaatttcaaaaaatgttcaagctgtagaagcagttctctaatttgctcctgtgataaagaaagagtcaatgtaagaaaatttgataattttatgctagaacttactaacaacgatactggtatctcttcaaaatataatgttttagctgtcgttgaagactgtactttagataatttgtatattcttctagaaaattccaacaactctaatgataagctagtactatactattaccctggaataaaagaagatagttacggagagataactgatcccaacgaatttgattttgtagtagaaacttatcaaaatgcagagtagtactattaaaaatctattatctaataatataaaagttatagttcgaagttgatttataaaagcaaatctttctcagaataaaatggagatacgtatctttataataaagatacgtatctccatttttactagttactcataagtttaaattttcaaaatcaatatgattcttatatctataatactttaaccttcatcatacattgaaaattgttgtatttctaattcttttctcttttccatctcattgaaacaataatttattatatcgcttctttttattatccctataaaagtaccatcatcatctgttacaggcacaaaattttgacttacagctaacgatattaagctttctatatttgaagttatagaaacagacctatgagttgtttttctataaatgtctttaactttaacagattctatgtttttaaaattcaaattatgtgtattttttagcttccacaatagatctccttctgttagcgttccaacatattttccttctctatctataataggaatagctgtatatccgtagcattccattttctccataacttgtttcatagttgcatcttgattttcacatataacttcattttttggtgtaagaaaaaaggctatattcataaataaaatcctttcattcaatgtattcgttttgttcttcttcacaaaactattttatcatatctcggattaaatttctttaactaaattcttacttatttctgaatatatactgaaatcacctttttttctcactattctctaacttatagatataatttaagtacgcttcatctttcaatacactattaacttcgttatatccattctctccttgaagagtctttttaaccagaacttcgcataaaacattgcacttacatttcggacaagtgcctacagctgcaaatctccaatttaaaagctttataggagtttgtaaatcaattttttttccacatttaggacactttagcattaatttttcttcttttatttttatactctcaagatctgatacctgtatggcaggcatattatatatatctttaactatataattttttatcactctagaattatatactcttctaaatacctctacggtatattttgcatcatttaaagcatcatgtaattttgtatcatctactttaatttttaattcatctaaagctgacttaagccccaatgcttttttatgagctaaaattttagtaacatattcttgaatatcgagatattcgtttaaccatcttaaatcattataattataatgatgggcattaataattaattctgcaacgtcatcctttgcccatgaacataaaacatctccatcttcaaacatatcctttaatttacttatagcttcttcaaaagatactcctttttcattaagtatatccatatctattttagtgatttctgttactattggattaattaccggaaatattttaggcttaatatattccctaatttcttttataggtttcatatatttatctacttttactgcacctatttctataatttcattttccaaacttattgaatcaaactcgccatatttttcaaaaaaatctttttgataattagttatattttttaaattattaaattctaagtcaataataatgtaccccatgcttaatcctttctaatgctaatttttaattctttaaactcaattatttatacttctatccccgcaagcttcattaaatgaattgcattttgtgttgtacttcttccttctctaagaatatagtcaaatttgattttattattttcataaaattctctaaaattataatttattatctcttcactttcattttctaaatcacataattcaaagtcatgagtagaaacaagcccaacccctccgtatttaattaattgtttaatcaatacagatgcaccagtatgcctatctcttgaattagttcccttaaatatttcgtctagtagaaaaaatacactttctcctcttttgcacgcctctattaatatttttattcttaaaatttctgcataaaatgatgaaatattctcttctaaattatcttttgttctcatgcaagtgtatatcttcataattccacaagaaaatttatccgcatgcactggtgctccgatgtaacttaaaaccagattagtaccaagtgttcttaaaaatgtacttttcccagacatattggaacccgtgattaaagaaaccttttgattacccgtcatcgaaaatgtattttcaactgctttttctcctaataaaggatgacctatattcactgcagttatttcatttttatctaaaataacaggatacgtccaattttcattttcaaatggcaaattacatacactaactaatgcatctattttatgcattacttctaaccagcctttaagtttattcccattcttttctctccatttttctaaacttcttaatagaaatacatcagaaaataatagtatattaaataacagataatatgcattatatgaactatttcctatccaatccaagatatcagaaaaagctttcatctcttccttacaacttaatttatcacttttcaactttccttgtaaattctttaaatattgtgaatcaaaattttcttcttctattagaaataaaattttactatacccatatatgctattttttatggattcaaataatttaatctctgtacccatgcttttagataacactttaacaacgataaagttcaccataagatttaaaagtagaaatgattgtggtattacctttactattgctaaatatatcgagaaaattgttactaaaataaaagtacatgcgataacaattctcagcggacttgatgattctgtcccttcactccaattaattaagttatctaagtctatatcttttgattttttcaaactgccctcaagaactaaattttgcctccagacagctttactactcaattcctttacagcttcttgtctttcagcaatatcaagcttattcaaattcccttcattttttaataattttactagttcttctcttcctcctttagttactgtatcattaatatattgaaaaatcgagttattgccaaatacgtccaaatcatctacaaatggatgcttatagtccaaatactctgaaccagaatcctcgaaactcgtaaaatcaccacttaatctttttattcccttctcattaattttcattatcgtatttatcttttctctgtattgaattatattattgtgataaaatatcaaaacaataaatataccaataaaaaatatagttgagatcaatattagatttaatttattctgactatataatatataatcagttaatacccctaaaatcactacaaacaacctgctccatccaataattttcaccttatagttcaggtcttttgtttgtcttaaacatcgttgtatgttctctttataaaattcttctgctaaactcataattcctcctaacataataattttatttttataagcaatctttttgttgactataaactaaacttcgtaatttaaatttaaacaaaactcaaatgattaatataaattaaactattgttccaattctatatcacaaataaaataaagcacattaagatatcttatttttaattcaggatattttaatctaccttgttatcttgtgcaatctattttattattacctcatatccattttagctttatgtagtgagtaattcatatataaaatacatattctataagtataatattaccataataaattcgatttatattcctttgtttaaattattttttcattaaacttatagatattattaaaacactaagataatttttttatttaagtcagagacatctacctaatatgtgattttattaactccaaggattaaaattaaaaggattatttccaatataaccttgaaaataatcctcaatctctattaaagttaatctagtctattctttagataagcacttgtatatctcatccaaattgtatctcatagcttctatataatttttgtcatcttcttttgattctaatgtaagtattggaactacatcagcttgaacttcttttgctaaagtttccgaaactttagggctcgctaacgactctgaaaaaacagtctttatattattatctttacaaaaacttactaagtcttttaattgcttaggagttggctcaccctctgcaaataaattttctactgatttttgagtcaatccgaagtctctgcataaatatccaaatgcagcgtgacctgttatgaaatttttcttacttaatgtatcaaatttgggtttatattcactatataaactctctaattcctctttaaacttattgtagttttcttcataataatccttatttttctcatctaactttactagtgtatcttttatattacttgattggatttcagcattttttaaacttagccaagcatgtggatcaaccgcatccccctcttgcctggtttctataccagtacttgaatctacaacaattacattagtattcttaatagcttcatttacttgacctacccattcttccatgcctaagccattataaataaacgcattactctttgttaattcctgaaaatctttggttttaggctcataatcatgtggctccatattatcaggaactagacatataacatcggctttatcaccagctatcttctctgcgaattcttttaatggatatattgaaactgcaatttttaatttatcttcagttttgttttgtattccagtatttgcattagctccacatccgattagcataaaacttactaataccgctaacgctcccgaaattattttcttcttcatattatacctccagtttgcatctgatttgcatttgcaactctgtttataatattactgttaaagtttaaatatgtcaagattagttaaatattaatttaggatagtattatcaattcaaattaattaagttataatcatacttatttctatcaagaataatcttttctattttttgacatgtaaagaaaataacttgctcaaaattttcatccataagaagatttagtgcccgctctcttctctcatcatcatattggacaagagcatcatctaaaaatattgggattcttttatttttaaacaacatatttataaatgataaccttaatgctagatacagttgatccttagcaccattgcttagtatttccccttcgaatagtattcctttatttctaatctttaacttatagtcttctgatatcttagcttcttcgtaatcatcatttgttaagaaattaaatttctttataattttcttattcatatctggtccaatattcttttttatctcatcaaatgcttcttgaatcaaattactagctaactctaatgctttaaattctttctccaactttttagttttttcttcattcattaatatttcttcttctatctctgaaatttcccttttacctaaataccttttttctataagatgttctaaatcctttatctccttctcgattttcaacaattcattagacttcgctctaatctctgagtctatttcttcttcagattcataagaatagtttatgtcctgactaataatttgtttcatttcttcctttatttcatctatatttctatcttttattaaaaccttatatgtttcctctacacttttcaatgcacttttaatttcattcattttatttattttttctttatactctctcaacttaacatgcatatctactatttctatattttctaatccaagtacatgagttttttttcttatctcatcatctttatcggctaattgttcatttatattttctatatcctgattaattgtattaatctcgtattcctttataagtatttcttctttttgtttttcatagaattccaattgttctagcacctcatctaaagacttgcatcctaaaacattatacaaagatgctatcacacctttatttctattataatttgattttaatttagtaatatcgtatctgttaatctcctcttccttattttttattaataaaatcatattatctttataatctatatacttatcatattgatttatcttactaataaaatcttcataagatactgaattagttttctttatataaacatctaatcttttttcatattcttctattctttcttttagctcatcaattgatatattatttttcctaaaaatctctgaacttttaattaataaggaatatttgaaatatactattcctattatgataaatataggtataaatataatcataatgggaattatttgcttcaatatactgtatataaaagcagaaatgcaaattgctccaataaaataaatacaatttatttttttatttaagctatttaagtctccttccgacttactataatcctgattctccattttatattttaattcctttaatccctctttataagaattaagtaatctctctatttcttctctattattttttataaaatctaagttactaatgctagaagcctgcttgcttatatccatcttgaatccagctattgaattttttatatttatgatatcattaagtttttcttctaaattcctctggtcaacttttaatgtatatattttttcttttacattacttcccatcgaagaaaaaactttataatttatcattttttcgttttttactcttaattcttcttctgatttataaagtttatttaacttttcttgttttacgtctaatagacttagatatctagcacacctttcattaatttcatccaaatattcagctgttatatattcctcaccctttttaagttcttcgattattgcatcctgttttcttttaagctgctcccctttaactaaatagctacttatttctttgtagtctttttgaagttttatcttcttaatgtactttttatataaatctagcttttgaatttgttcttttatgttgcttttaacatctttcttccttaataagttttcctcattttgcacgttttcttcagctaatttatatgcttcccataactctgtttttagtgaattatttttctcttttaataaatcaatctctccaccttttcttattcctagcaattgcttcttcttcttttctaatttctcaattactttttttacagaagtattttcatctccaacattgtaaacattggttagcttctccattatttcttcttctttatctttggatataactactcctaattgtcctataaataacgtcttcataaaagtagataaatttatatcgaagaaataccttcccggctcatttttatattctatttgtaagctctctcccgttatttcatctaagatttcgcattcatcttctttttttgttataccaaatcttctttttataatgtagctttttccttcattttctattattaattctccggaaatattctctccagatagaggcatgtatctttttctatcgtttagtttacttctagaattttcaatcccatacagccatatcttgataaaattctcaattgaactttttcccttttcgttttttccataaattaaattgaatcctctgcttaaatctaggcttttatctttaatccctgcaaaagcttttatatttatttttttaactatcaaaagctttcacctctttcataaaatttacttgaatacaatttctttcgatactattttcgaatgtattaattctataatttataaatctctctttaatcaatttacatctcattaattcttacctcttcacctgagatgctttgaattcctatctttaaagccaaagaaataatttctctatcttcctccgttgtaacattctgtagctcttcatatattttttttgcaaatatgctttttaatgagtacccttttatcaattcggttatatctaacttaatttcacttttgtcaataatcttcacaaaatagaattcatctttaagtagttcttcaagtaattcttcacttaatgaaaattcatcagatatttgcccttttaaaataaccttataaaaattattctttctaccatccttaggtatttctgatataattctattttttacttcgttatatccaaagcacccgtcaatatttattcccttctcatagtaatttcttactgatgttctaataaaccggctttctacaaatctattcttaatctctaagaatactattcctttctcttcaagctcatcaaacccccttccttgagggcatccgctataactgtaatatgtgttacctatcttcttaacttccgaaaacttatgtctgtgtcctagtgctatataatccaaatcgcttttaattatatcttcttccataattggattgtaattatttccttcctttacactagaaacttctccatgtataaccattatgttgttatatccgttgattctttcaacatcttttaacaaggatttactgacatgtgtggtattaaacccagctccccaaacaacagtctttaaatcctctaatattactttttcaacacttcctttaaaaatatgaacattacttggccaatctacaatgctatagaaagatttttcattaaaaggatcatgatttccaggacttataaaaacttttaccttgctaatattttcaaaacagctttttataaaatgaagtgtagttttctttacagataaattatcaaatacatctcctgctattagtaaaatatctatttcttcatttaaagttattagcattatgttctcaaaaacttgttttaattcttctttactctttagtgctagctttggtgtcattccactaaaaggagtatcaaaatgtatatctgctatatgtaaaattttaatttttctcatactatcacacctaaacttttttatataacgaacttttgttctaattttaccacgaaatttgcgaacagtccaaaatgattattatgcacgtttataattcaaacctctatataatatttactcaaaaaacaggagatgtattatacctttgtataatacatctcccattttttagaatatgattagattatcctaacatacatagaaacaatattaaattataaaatttcattagattctatgttcatattcttctaccattctttttaccatttctccgcctactgaaccacattgtctagaactcaagttaccattgtattctttaaatggtattcctagttcttgagctacttcgtccttgaatttttccaagccacgtcttgcttctggaactaatgtcctattattgttgtttgacataacgatcccctcctcggctaattgatagaatcagtaaacaaaactctaaaaattttatctaccgataatagtattttaaccttacgattatttattattctcattaatataaggacattcttcaatatttatcctctattaaatattaaaataggaatctctactcaatataaatttatcgattttactattgcactactaaattcaatttattctatacaactatctctttaaatgttgtttctatatctctttttatatcagtaaatatatcactcttatctttaataaaagaatttagcaaatcaatggttattgaattcaattcaataatatctttatctgtaattaaattatcagccttgcctctttgtaaatacttattcatatccttaaagaatctatacacttcatctttaattaaatcctttgacattaagtcttctttcatatttaataatctttttctaatatctaatgcttttaatggaaatagtaaatacatgtttttttcgcttaattgcttaaaatcatatttccatcctttgattatattaattgtataatctagatttttttccttagcttctgatttaattggatacacatcaggaacttcaatattggaattcaatattatcatggatttagaatacttatccttcaaagcatattcacttttatttacacttttcctcttttttgcattaaggcttattacattgttattattcgataaatttaccttagttatcattattgctatattttcagcatcgttagcgtgaaactgtaccctgtattcaaacttcctatactcatcttctgctagtatcttcaaatcataatttgaatcttctaacttaatatcttcatttatatctatattttttttagtcttattatatttcattctcgcatccatatttaaatcatcattatataatgaatttacaagctcaattattgttgtattatttaacaaaaaaattctctcaataattttatttaggttctttataccaccattcttattgaattcctcattatatcttattttcgagttattagcttcatcatcttctttgaagcaattaaacttctctctaaaagatatataggacttattgctttctttttcattaatagtattattagttgattttgccaatctatttttattctctattcctttttttctaacttcgtttagcaaaactaatttattcatatcgtattccacctcacaatggattattaccataatatgtcttcaatattcaaatattgaatgtattttataatagctcattcacaagacacaaaatagtttttataaatacataattatttatgtttacatatagttcattatattaataaaattatatactttttctgggaaaggtcaagttattttctacattttatactaaattattctctttttacttatttttagctaattatttacacaaatatacaaaccaatcagatgcatttctgtaactctaaaatatatttttttataagccatacatttttgtacataaaaaagccgtagtacaacgtactacgacctttgtggcaggggcagtaggatttgaacccacaaccaatggttttggagaccactactctaccgttgagccatacccctaagacattaagtattgtatcatgtgtttatcatttatgtcaacaattttattattttaatttttagtaatcattcaaatcaataaattattataataatcttaacaccccaatgcaccaaacaaacttaactaaatagtagtttttttaaatacttcttgtttaactactcatattattttataataaaatataatactttgatagtcaaaatattttattgtcgaatttttcgtgaaaggatatatgtaaaatgaattttaattctcttaaaattggaaatttagttgctcctattcctattattcaagggggtatgggaattggtgtttcatcttctaatttagctgctgctgttgctaatgctggtggaattggaatcatctctgctgcacaacttggttataatgaagatgactttgaaaagaaccctttagaggcgaatttaagggctttaaaaaaacatattactattgctaaagctaaagcagtaaatggcattataggtattaatgctatggtagcaactaataattatgaagatcatataaaaactgcaatagaagctggagttgatttaataatctctggtgcaggacttcctactatgttacctaaaatagtaaagaattcctctgtaaagattgcaccaatagtttcttctttaaaagcagcaaaagtaattttgaaactttgggataggcacgataatgtagctccagatcttgttgtaattgagggaccaaaagccggcggtcatttgggctttaaagttgaagagttagaagatgaaaatttagattttgataaatctgttgtagatataataaatgaaacaaagaagtacgctgaaaagtataataaagaaattccagtagtagttgctggcggtgtttttgatggatatgatattgctaaatatttaaaattaggtgctagcggcgttcaaatggcaacgagatttgtagcaactgaagaatgtgatgcttcggatgaatttaaaaatgcctatgttaattgtaacaaagatgatattcaaatagtaaaaagtcccgttggaatgccaggtagagctatgaagaatacatttgtaaaaagaactagctctgagagagagaaaataactcattgttataattgtttaacaccttgcaaccctgctaatacaccttattgtataagcaaagctttaataaatgcagtaaagggtaaccttgatgaaggtctcatattctgcggtgaaaatgcaagcagaataacaaaaatcacaacagtgaaagagcttatggatgaattagtatctgaaattaagaaagcttaaaaaaatagactatttcaaagaacttccttatcacgaggatatctttgagatagtctattttatttacaataatattattttagcatttcatctataaactatacatttttgaaagctattacttcaacctcgcataatactcctttaggaagctcctttacggcaacgcatgaacgcgctggattactaataaaatacttagcatatacttcattaaagttagcaaaatcactcatatttgcaataaagcaagtagtcttaattacattttcaaaattaatatcattagcttctaatatagctgatatatttttcattacttgagttgcctgctcttttatattacttcctacaacctcaccagttgatggatccaacggtatttgtcctgatgtaaataatatatttccaaatcctattgcctgagaatatggtccaattgctgctggtgccttttttgtatttgttacttctaacattttataatccctccaaatcaaaattaagttatattaatttactttttattaataccatcattatttatatctattgatttaaattcatatctctaatagggaaaattaagtattataaatacggatttccttatgatcctaattctttgttgttgtaatcaaatttttttatataaaaaaatcgtagtacaatgtactacgatttttgtggcaggggcagtaggatttgaacccacaaccaatggttttggagaccactactctaccgttgagccatacccctaagacaataatcattatataacatatctataaagaaagcaacatatttttataattaattatcgtgaaaataaaactacactaaatataaaatactttatatttatattcaaaatttgcaaattctttagtgcagtatataatcacatctaataataaaaagatatataactccaaaataagtaattctattttgcattactggaatttacgacttcattgggtttagcccattttgataattcttttatattgtataaaatcaaatcatcaaaagacatatctccataatatttccacaactttatagtattataacctgacaaatctaatttcgttcctttttcaccatcaactattattattatctttttaggatctaaattattaatttttatgaactcacttaactcatgattatcaagctgaatagtgtttaaatttaaagacttagttaagtaatcaaaatcattatttaatgtaataaatttatattcacttaaggattttattttctcactatattcctttatgctagtatcaaaatttttgatagcttcattataattttcctcataataatctctattttgagggtctctatcttgaatagctgcctttacattgtataatgctattttatactcttctataccttcaaaatagtaaggattttctttagtgtcattatcatgcccataatttaataattttatgcctctagctaaatttattatcccaaggcttcctttcttcaattcactaattagtgaatcactccatggttcaaaagatgtgccagaatatataaataaatccatattggatatattatttaaaacatcttcactatatttaaattcactaatatctttctcattagtaaacatatactccgcattattcttttcctttataatttttttaaccatataatattgtggtttattaactatcattatatttagatatttatctctgctttcagttctattattctcagtattagctaataaaggatttgaaaaaaaactcataccaaaagacaatgctatggttattatcaccatggcaaaggtaattttcttcaaagacaagtcacctccaaaatttaactgacttcatttataactttctttttaatatgtactgtaattaatttcttaagttaattattaattaacatttattaggttaaacataaaataattcactttatatatattgagttacatat

SEQ ID NO: 59 - DNA, 36736 bp, Clostridium beijerinckii
atttattagtctaacacaaacatatcaaatgatgcattaaattctgatgaaccgccgtataccgaacggtacgtacggtggtgtgagaggtcggaaaacaaaataattgttttcctcctactcgatttaagaaaaatatacaaatttggatcttgaaaatcaagttatttaaatagttaatgcatattggtcatacaagaatcttaaaatcctataacaaagggggaggtggattaatcactttgttttgttaagtatactcatattatattttcttacctttcacaagggttatttgttaagtgacgagataaagtcatctatcatagatttaaaggtatcttctaaatcaacatcaccttgaaaatatccaaaggaatataatgaaataaaaccatgtaggagacttcttaaagttcggcttttatgaaccaaaagaatttcatccttaatgtaagaatttagaatttcatgaataatatgagttatttttctcattaaattaaacaattcattatttttagtgctaggaatattgataaaaagtttataagctgtcttattttcaaaagcaaattctttataaacaccagcatattctcttatggcatcataaccactcttgccaatcagcctatgcatcaatttctgattcatcttatttaacatatatactgtcatttcaattttaagttcatccatattattaaagtgattatacaaagaaggatattttacatccaatttttcagcgatcttttgaaaattaagttgattaataccaatttcatctgctagacaaaaagaaactagaataatcttttctctggttagatttcttttgtgcatacacttttcactcctataatcttatcttataaaaatagtttaacatttaaaaaaatatatatgttgctatagtaaatttacatttaaaactctaataaagcaagtgttaatcaagagcatgatgtagaaacttaattgcaatatataattataaaaacatttagaactatataatataattataaactatattttataatttacaaactatataatatagtttataatcaaattgaagatgaggaacaaaaaactaatggggaagtaatacaaactttatcaaaatgttagtaattactaatattttttgttctttagaaaattgtaatgtggttaaatttgaggatgatttatataaaaggctattcagatgatgttacatgtaattttgttcttaatttatagaaatagaaaggagtatgcttatggaaatatggagaaaaaatttaatagtgtgttggtttgggatatttgttgcagccatagggatgagtcaaatcgctccagtattgccaatctacatacagcatcttggagttcaagatacagcatcaattacaaaaatttcaggaattgcatttggcattacttatgtaatttcagctattttttcaccaatttggggcagtgctgctgataaatatgggcgaaaaccaatgattcttagagcaagtcttggcatggcaataactatagggtgcatgggatttgcaccaaatgtatatgttctaataggattaagattacttcaaggggtaatcacagggtatagcacagcatgtacagcacttattgcaactcagacagataaagaaaatgcaggatatgctttaggtacactttcaacagcaaatattgcaggttcattaattggtccaacaattggtggtttcatagatgagatctttggtctacaaagcgtatttttcataacagcagcattacttttaatctcatttattacaactgttttatttgtaaaagaatcttttactcatgaagataaagatgttctaagcattaaggaggtatggaaggcaattccagaaaaaaaccttactattacaatgtttgtaactttctttatattagctgttgcattatattcagttgaacctattgtaacagtatatgttaagcagttatctagtaatagtagtcatattgtgcttttagctggactaacattttcagcttcaggtcttgcaaatataattgctgcaccaagactaggtaaactttcagataaagtaggagctcataaaataatactagcatgtattataggtgcaggaataatttttataccacaagcttttgtaaaagacacttggcaattaatgggccttaggtttttattaggaatagcatctgctgggcttaatccatctgtaaatatcgtactaaagaaaataactccagcgtctcttacaggcagagtatttggttttaacatgtcggcaggatatttaggggcatttggaggtgcagttttaggaggacaagtagcaggaaacttgggaatgaaatacgtatttttcattacaagtgcattattatttataaatgcagtttgggtctatttcaaagtttataaaaaacttagtttaaatcaataattattatataaataaaatgaatgaaaaggagaaaagaaagatggaagatttaaaattaaacgaaaaggaacttattaatgctaaaactagcgctcttgtacttatagacttacaaaaaggaattgcaggtggaggaatttcaggttcacctcatttaatggaccaggtaattcaaaatgctagtaaattagttaaggaatttggtgagaagggtgcatttatagttttagtaagagtttcaactgtagatggaaaagatatggttaagccaaaaacagatttagcttctagtggaatgaaatatcaagaaggctgggacgagcttgtacctgaaatagcagggactaagaatgttcatattgttacaaagaggcaatggggagcattttatggtacagatttagatttacaattaagacgtagagggattgatacaattgtgttaggagggatttcaactagcattggagttgatactacagcaagagaagctttccaacatggctataatcaaattttcttagaagatgcaatgacagcagtaactaaggaagaacatgaatatgtttgtaaatatatattccctagaataggtaagattagaacaagcgaacaagtgatttcgttattaaagtaagtattggaagatagatgagaataagatatggaacatatagttcattatatcttattcttttttataagatttacttttttaaaaaaaataggggttatccttggcactttaagatgttaaataatattatggtgcataaagaagcatacaataatatactaaagcaagcttaagacaatatcatttaaatcaataaattgagaagaattcatgttgaatattgtcgaaaagatgataagatagagacatgtccttactcaaaagcaacaaaaacttaaaaaatactttttgtttaaataaaaatcataaggacaaataaaacatatagaaggagaaaaactaatgagaaagaatggtttaagaagaatagtaactacagttattgcagctacaacaatagggagtttctcatcattaggagtatctgcagctacaataaattcgagtgttaacgattgtaataatgtaaatataaataattttttaaatactaattcattaatgaatacttctaatggaaataacgttggtaatacagatacagtttcaaaaagtagcacaaatgcaacatcagtaaatgtacaggggttacctaatctgccgacaaattattcaatcagcatgcaaaattctgctgaggataaaattcttcaattaatgaatgaaaaaagaaaagaagcgggtcttcagccattaactatagataatacattagtacaagttgcacgatataagagtgacgacatgattcaaaataatttctttgatcacacaaatccagacggaacaaagtggacaaactggttacacacaataggctatacctatactacagcaggagagaatattgcatataacacttctgacccagttgaattatttaatcaatggtggaactcaccaggtcatagagcaaatatgatgaatgaaaaatatactaaggttggtataggtgtaatctacggaaataacaaatacatgggaacacaagaattctcaaactaaagattagcaataaaaataagagcttatataaataggctcttatttttttactgtataagtgtaggcgtaggctataaataaatagttatatatttgcgcttatttttattaattacttatatatacgttgcaaaattaattcttcatcacaattctaaaaatattgaaagaatttcagccgtaattgtgaattgtgaaatgtgcattgtgaattgcaacatatatactaaaaatatcatattcatatctttggattaaatcaattattaggcgtaatcaatattttaataatataaaattgctttgtaactttataaataagtatacctattaattcctaaagtaaaggattagagaattattaaagtataagtgaaatattgaggataagatattgaaatgtataatattaattaattatgtaacaaaaatctttgaaaataatatgataaagtgtcaatgttatgtgaaaaaagtaaaaaatagaataaatataatagacattataatttaaattaaagtataattaatgtattgagaaaaatattgggagggatagtgatgagatttagtaaaattaagttatcaaacaaactaattatagcattttcattaatgattattctaattatgggagtatcctcactagctatacttagattaagtcaaattaatggaactattaatcaattaattgacgtagaaaatgagaaagtatcagctgcatataatatgagaggaagccttaacaaaattgcaattagcataagaaatatatcaattagcaatgatatgaattatatgaatgagcaaaaaaaaatactagataagaataaaattatttattatgaaaacgaagataaacttggtagcttagtttatactgaaaaaggaaaagaaatatataaagaaataaagaaaaattctgaattagcattttcagcatttgatgaagctgttaatttagggatgagaactggagtatcaaccgaagaacttcaaaatatgattactaatatagagaaaccacaagatgaattgcttttaagtatagaaaatatgatagctgctcaaaataatttaatgaaatcacaaggacaactttctaaagagataacagatagttctaaacaacaaatggttatactattagtagtaagtattattatgggaattttatttatgcagttaattagaaaaagtgtcataaatcaagtaaaagaagttatgaatggtgcaggaaaattggcagatggtaactttgatatacaaatgaaagtagttgctaacgatgaaataggaaatactgtaactgcattaaatggtgcagttgaaaaactgaacgaaagtatgttgtttattaaagataaaagtaaaagtatccttgagagcagcgaattaacaaataaaatgttttcagaggtaagttctaaagtagatgaaatatcagcagcgacagaagaaatatcagcaggaatggaagaatcatcagcagctgttgaagaagttacatctatggctgctacagtgaaagaggaagtcaacgtaacagctaaaaaagcacaagatggattaaatgttgcattgaatatacaagaaaaagcggtttcaatcaataatgattctattaaatcaagggaaaatgcagagagaatatatagggaaacaaaaattggattagaaaaagcattgaaggaagttgaagttgtaaacgagatatcagaaatggcaaaaagtatagatgcaatagcaaaccaaactaacttacttgcgctaaatgcagcaatagagtccgctagagcaggggaagccggtaaaggatttgctgttgtagcagatgaggttaggaaacttgcagaacagtcatcactaacagtttctgaaattcagaataaaataaatgctgtattagcttcagttggaaaactttcaggttcatcacaagatatcttagtatttatagaaaaggaggttcttaaagattatgataaactaattactataagtgctgagtataaaaaggatggagatactgttaaagaaattataggtaattttgcagaagtttctgaaagtgtttctgagtctgtagatcaaatttcaaaaagcatggaagatgttgcaatttcagtatcagaagtagctaaatcatctgctaatattgtttcaaatgttattgatgtaagcagcaaaaatgaatctatattagctgcatctaacaataatgcagaaagtgctttaaagttagaagaaattatagagcaatttaaattaaaataaaatacaaatataaggaaaacgctattcattagtgaaagttgtgcgatataagagtgacaagatgatccaaaataacttctttaatcacacaaatccagacgaaacaaagtggacaaactggttacacacaataggctataatcatactacagcagaagagaatatcgcatataacacttctgacccggttgaattatttaatcaatggtggaactcgccaggccatagagcaaatatgatggatgaaaattatactaaggttggtataggtgtaatctacggaaataacaaatatatgggaactcaagaattctcaaactaattattaataataaaaataagagcttatgtaaataggctcttattttttactgtataagtgtaagtgtagactataaataagtggttatacatttgcgcttatttatatttacaattaagagagaaagcatcaaacaaaacagataagaggaattatgacaaatgaaatcataaatcctcttatcaaaagaactaaaatctaaaatgaaaatgctgaggttcaaggcaaatctgtctaaaattcatagcaaagatagcttaagtttcctaattggtaatctctaaatataactctaggggttaattctgaactgctgcctaaagctataaatagtgggacaagatgatctgcagttggaactgctaagttagcatgaggagcatattttttatagttattaagggcattcatgtccttgtttcctatcttgtcaattaaccaatcatcaaattctttagaccaagaatcaattgtattactatcaaaattaactaatcttagattatgaactgtatttccacttccaagaattaaaatatcttcagaaccaagctctttgagtgcattgcctattttaatctgcttatcaataggtagagtataatttatagaaacttgaataactggtatattagcttttggataaagatgctttaaaagagtccatgcaccgtgatccaagcctcttgttagatctgtttttacatcaatacctgaatttattaatttatttctaatttttgttgcaatagtgctagaacctcgtgcagggtatttaattttatagagttcttctggaaatccataaaaatcatatacagtatcatatatatcatcagaagcagaaatagtaagtgtttcagttgtccaatgggctgtgaacacaactatagctttaggattaatagatcctccaaggtcatttaaaaatttagtatacacgctttgctcaattgccatcataggtgaaccatgagctaaaaataaaggtttaatcatataataaacacctccaaatatttttgttaaattaaatatatagtgcataaataattatttaaaacttaatgatttccaaaggaaatcagcagtaattggccatttagcattatccttagaacatataagttttaaggattaccttacattaagaattaatgtaactaaactataaatttattttgctcagcgattaatttctttgtcatattatttaaggtagcagaagcttttgcaacttcattagatagtttgtacatttcatcagtagaagcagatatttcttcagatgaagctgatatttcttcggctatagcagatgtactttcaattttattaagaatatcgtccttttctttatttatttctatagttgccatatttacagtttgaacttttggaattacggttttaataacatcaattatattttcaaatgaatttatagtttcatttataatgctaacttgattgttaagatctgtggtcatgctatttgtatcatcttttattacagtagtatcattagagatatcagatactaatttactaatattttgagatgaagattttgtttgttctgccaagacctttacttcatttgctaccactccaaaaccctttccggcttcaccagcatttgcagcttctatagatgcatttaatgctaataagttagtttgatctgctattgaattaataatttgtactatattatttacttcttttatattgctgctaaaagtaataattttattagataaatttttaaaggataaacttatactgcttactgtatccattaatagcttcatgcttgagctgctattatttgcaagttcattcattattattgtatttttatctatatctttagtgttaattactatatcttcaagtttgctgctgaagatatttaaagttgtagtgatttccattagattattcgcttgagaattaattccacttgctacctcttgcattgaatttgccacattattagaagatgagaccatgttttgagatatagttgataaatcacttgagttttcatctattattagagaactgtccttagacattttaatcatatctccaattgagttttgcatggtattcatggagttagcgatatcaccaatttcatctttaacgtataaatatttttcacttatcttattagtaaaatttccagtagccaatatatttaaggaattagaagcatatcggattcttttagatagcctatttgaaataatataaattacaagaattccaataaccaaaaacaatatagatgtaagggttattgagaattttagggagttaagttctgatagaagttcagatttctctaaaataacaactaccgaccatttttctttttcgattggagcaaaacctccataagattcttttccaccaaaagtatataaacttaaaccagtttcaccagctatcattctcttttgcatatcagcgataccttttaggctaggatctttttctgcttcttttatagaattatattgatttaatggcatgcttgaatccttataagcaatgctattgctttgactgttaatcatgtaggcacttccagttttaccaaaagagatcttcttaatcatctcactaagttccattccatctctaactgatactaatacgcctataattgagtcatcattttttattggtactgaatatatcattgtcattgcagttttgtcttcattaacttcaggatcattaataaaattttctccagacattgattttttaaaataagtagtatcttttatattagtttgttcaccagtagtatatataatgtttccattcatatcagcgtatcccattttaatactaccatttctttttgcttcagcttttaaaatagtcattaatttatctggagtatcattgtttaatgaagcagtcttagcagtaacttccagtgaatttaattgattatctaaattagcctgaacagtattagaagcctggatagctatttcaggtaatgtctttgtaatatttgatattaaagcgttagatgcattaatataagaaataattccaaatccagtgcttacaactaagagtaatatacttatcagaataattaattttgattttatagtttttataaacataattaaaccatctccttaatatttatttcatagttttcttatcttcatatagatctcgcatttttataatcaagttctgagcttttaatagtgattgagataactcagatatttcttcattagaaagaacattaaatcgttctaaaaaaatatcctctccagctgcagcaacagatgaaataagatttaatgatttatttgatagtgataaataaacaattcttttatctttttcatcttgtttttttatcaagtaaccaagattatataaagcattaatacttctgcttgtatttggtacagatatgtttaattttttacttattcttgatgctgtagtagtaccttcaaaatgaataaaattcagtatttttgaaagaaggggagttatttctgtattagttaggtctggaattagatctataaactcaacattaaataaactataaaagttaaccatatttaaaattaattctctattatcttttttagtcatatgaaaactcctttgataattattattaattaagatatattataacaatatagttatcatttgacaactactttataagttttatatagaaattattgacaaagacaaagtggaaaagatttattctaaaaagttgcagattttcttgagatttcataaaaagagtttatgaatatgtatattgaagaagattttgggaaatatgaaattaagcaaatactatgttcttttttagaaaagatggaagctgtgaaattaaagcatgtaaaccagaaagctgcaagaggtatcgatttactgatagacctgagagtattattagtttaattaatataattgagtcgacaagcgtttgttatgttgtatttgaaatgattgaaatattaaaaaaggaatatggatttaaaagaagaaaataattatatatagtcatgatcaaatttaacctgataaataaaattcaatcacaaaaaaatataaaaactgaggatggattaataaaaatgagtaatattaacagtgcaataaacgattttgaaaaatttatagaatttatagaaaatgaaaagcctatactctcagcgactcaggaagtattaggcagaaaggattgctataatctaaacatgatccttgaaaataaaaaagatgtaataaatcctagttataatcaagataaatattatgcaatagacttgatgttttcactagttcttgcaagtaagctttatataaaggctaacgatgaaaagggaaaagtaagactctttaaaacagataaattagaaagctttcaaaatttaaatgaagatgaaaaatatattttcttactccaaacttattggacccaatatgattttgaaacaaaatttgatagaacccataatatagcagctttttacaatattttagctgagatagctagtgctaaacaaggagatataattttaaaagatgaaaaggatatttcaaatgtaatgtattcaactggggctgcattttttcatcatttaaaattctttagttttggtgaactagaattaattaatggcgcaaaaacaaggtatgaagatacgataaaaagtttttctccaaatgaatttgggattaaaacaagtatattacttctaacaagggctattcagtattggaataaagaagatgttccagtattactagagtattataatttaaaagttacaactaacaaaaacgaaaaagcatttgacgtttttaaaaccatatttaaagggaacactgttaaaaatacagtagaagaaagtaagataaataaaggtggaacgtatacttttaaagtaagtttatcaaagactgtatggagaaaaataaatttagcatataagcatacttttggggatttacataatgttattcaagaagcctttaaatttgataatgatcacttatatgcattttttataggaggcaacagaagaaaaggaatatactgtaagtatgcagagtatgaaggacctgtagcagaaactacgactatagcaagtttgaatctttataaaggagaaagacttctatacttatttgattttggagatgaatgggaatttaatgtggagcttaccgaaataaatgaagaaggaccagttcctttaaaacctatgattatagaatcaaaaggaaagtcacctcatcagtacagtggaggttggggactttacgaataacataattgtaaatagatactattattctaataatagtttttcaatattaggggtgcacggataattaaaaagcaccccaatgttaggcatcaacgtcttttcattttaaactaaggctagccttaatagatttcctaaggcatcatatgaacctctgaacagccttaactatattttcagctttcttaattagcctgattattagaagcaattatttctttaagctgtacattttgatttatgaatctagctttgcttttctcagatttcaaatgaattgcatttttagggcaatgatgtatacatgctagacatacttcgcatttatgggaaaactcaggtttgttattaactttaatattatttgcagggcaaaccttttcgcataccttacagctagtacaattatccgtaacaataaatctcttagctgcaaaattattgctgattttatctgcaaagccacggccatatttagatagagtatttgatacgattccttttttcacaagagaatttcgtctatttgtaatatcagctattatttcactcagtttttcatcaataacttctggattcttatttattatctcatcctccatcttaaaggctgaaagaaaattatcaaccatcagtatttcatttgtatagttgaacttgattccagattccttggccacaagctccatatgccttaacccagagaatgcattaccaccatatgtcataattgaaaagaagtaatcagctttaaattttgacttttttataaagttactaactattttcgccattccgaatccatgacaaggaaatacaaatcctatagcatcatcctcaaattcatatttaccttcttttatcatttgaggtattgaatacaattctccaccaatcttttttgcaacatataaactatttcctgtagcagtaaaataaaatattttcaaattaattccgcctttcattatttcaacgaatattgattcttcaacacatgttcaatataataaatttatcaattaagttaactcaattcaatagttaaaacaatgagatttgtttattaatgaacaaaacacatatgaatgttgattattataagataaatcagtttacaggaagtagattaggtacataaaggagatatttttatggatagacgtattgaaaaatcaaaacaggctattatgggtgcttttatcaaactcatgtcggaaaaagattttgaaaagataaccattaacgaaattgcagaagaggcaaatgtaaaccgtggcactgtatatctgcattatgaagacaaatttgatttgatgaataagtgtatagatactcatttaaatcaattatgtgacagttgtatttcagatggagagagtagcaattttgactccaaagcttcgctacttcagacgtttcaatatctagaaaagcatgccattttctattcaaatatgctcactaacaaggctatgcctgcttttagggaacgtattttaacaatggctcttaaaagtatggaagaacatcttgacatgactggaagcaatgaaaatataagcaaggatataatggctcaatatgttgcttcagctgctgttggtgtaatggaatggtggattgtaaattcaatgccttatccagcagcatatatggcggagcatttgtggcaactactaaaacgagaacaaatagagggatacatatgattatctcagttaaaaagaaaaagagcttttattagcataaagaagttattgatacaaatggagctcatttaaaaaaataataatttaaatggaatatatagggcagtgtaggaattaaattttctgctttgctctttttgctaaatttaagcaattaagaaagatagcattactcatttttgttacactacttggtattgtaacatttgcaaattgtccaccatttagctttataacttttaccttcataattaacattatctccacttacataagctttgttggcatcccaattagcataagttacagatgcagagacaatcactgtggaagcctttgttgttgctgccttggctaatactgacatttgtggtaatgcaaacgataatactacagcgaaagcaaataacttttttaatttcatgtatttcataatacatcaactccttctatatatttttgaaatgtatataaattatacgttcccacttaaatgttattatttaattagtattttggattacttggtgtagcggctccaattaattcccaaacatcagaagcaccaggtttatcaccttgagtccaccattttgctttgtaattgttgttgttataagaaacaatatctccatttacataagctttactactatcccatgcaggataagaagtaccaggatcacttgggtttgtcggatccgttggattacttggattagttggagttgttggcgtagttgggtttgatggagtagttggattacttccaccagcaagtttgtttgccattaaagatgttaaaggaaatccatttgggtcatctcctgaaacttcccaagcaatcattccgccataaccgttatttaatacataattacatctttctgtaagagattcttcatcttcatatgtgtacataattccttgtgatgcattatatagataaggaactttagcatatggatctctatattttacgtaacctgatgttttttccaattccttcattttaaaataagggttttgtccacctggagattgtgcattatcccatgtacctactggtgcaccatttgcagaagcaaataatccaggtaggtttccaccattgttcacaacatttttccatcctcttgaatagaatggtgttccaacatttagtttgcttgcaggtatattataagtatccctgtacaatttcattgctgaatcagtattatatttattttttatatctataggagaagttccagatggatcattaggatttggatatattgcagcatgatgattagtagttgtttcccaagccccatgcatatcataagtcataacgtttataaaatctaagtattgagcgtaaacgttaggttcagtatattgtgctttatcatatccagatggtgctgctattgtaagcattttattagacaatccattatcattgtaagctttacgtatttcacgaagaagtgaagtaaagttttgtttgtcctctggtccacctgggcaacctttatcaaattggtcgtttggatcggcttttctatcaataccagggaattcccagtcgatatcaattccatctatgaaaggatatttttttagaaaatctaccacactatttgtgaacacagcacgagaactagaacttgatgccattgcatggaaattagcaccccttgtccatccgcctactgatataagcacctttacatttgggtattgagatttgtaatacttatattcacccatgtgtcctctaagtttatctgcatcccaaccttcagaatgtgagaaagatttatcaaaatctgcataagaatcagtagaattgagtttaaagcttgaatctacttcaaagaatgcatgattgattacagtgaccttgtcccaaggtaattgatcaacagatatactgctgtgagctgtattgtaggtaccccaattaggaaaataaactacaacattttttttatcagatttttctgctgctttaggaattagtgttatttgcgtgaatgtaagtagaaagactacaaaaaaagcaagaaatttttttaatgttacgtgtttcaaaacacatcaacccctctcatataatcattgaaattttttggaaagtaactttaataataaattgttcacccccttaaaacagtaatagagaattttctattgcgtaataaacaataaaatatttcacgcctatatttattgcctattactttgtaaaaaaataaaactgtagaaaatttatagaatatatgattgtactatattcaatacgagaaaagtgtaatttttgtgtggggcaaaattaactttttttagtaaaacattaaaatttaaccacaacaatatatacaaatgtaataaaatgtaatataattacttatattgtaaaatataaatacttaataggagaggagtgtaataaattatgttttattatttataaaatctatatattagagcaaagttaagtatatgagaatggtacattttggtcgttacggtaattggtataaagaggtatttattatgtaggggggaaaagtattgtcagatagtaaactattttatgatgatactaaagataacaaatcaatatatggatacatagaaagaattagaaacggtgacgttaaattaaaagataaattgataaaagagtatttaccatttataggtaagtctgtgtctaaagtatcaaaaaaatatgaagatataaggtacagcgatatatttagtataggaatgatagcttttaatgaggcgttagataattatgatgaaaataaaggaaaaaactttttcgcttactgtgacatgataataagaagtagaattatagattattatagaaaaagtgaaaaagaagaaaaagcatatccatttacttattttgaaaatgaagatgaaattaattttgaggaaaaatatttaagatctaattcatttaatcaatatgagaatatagaaacacaggatgaaatggaattctttcaaaaaaagttgagtgagtttaatataaacatatatgatattggagaagaaattcccaaacacagggactctattattatgtgtataaaaattgcaaaagaattatgtgataatgagtacttatatggaaaattgattcgaaataaatccattccgttaaaggaattagtgtcaatggttcaggtacataaaagaaccattgagagaaataggaaattcataattgtagtaagcttgatatttaaaacagaatttacgtattcaaaggaatatatacaagatttttttaatggatctaatgtataggtaattttagtaataacaattttattcaagtgtgtctcagaaagagtaatgatctttcatgcattcaattatacaataaatgtataatttgttctgatttataatttatcccacttaaatagaatctttttacgtataatatagtgtacgttaaaagtaattaatttaggaggtgatatgaaaaaagttcagcaaaaaggtaacaaagtttaataaaatatttatgtaaataaggggggagtaaactactactaataataataaatagaggtatagggggaatttttatgaaaagaaaaaaacaactaattatgtcattagttatttcttcacttatggtttcatcatttattccaacagttacagcgaaagctgatacaggatggaatcttgcatggagtgatgaatttaatggaacaaatataaatacgtcaaattggaaatatgaaactggcggagacggttggggtaataatgaacttgaatattataccaatcgatttgaaaatgcaagaattgaaaatggaaatcttgttatagaagcaagaaaagaaaattataatgggatgaattatacttctgctcgcttaaaaagccaaggattaaaaaattggacttatggaaaagtagaggcaagaatgaagttaccagctggacaaggtgtatggcctgcattttggatgttaggagaaaacatttctcaagttagttggccaaaatgtggtgaaatagacattatggaacatataaataatgaaagtgcaatccatggaactatacattgggatagcactggtaacaatacgcatgcacagtatggcgctgcttcacctaatatcgatgtaactcaatatcatgtatattcaattgaatgggacgcttcatcaataaaatggtttgtagatggaacacaatatttagaagctaacatagcaaataatattaatggtactgaagagttccataaaccattctttatattatttaatctagcagttggaggaaattggccaggtaatcctgatggatcaactccattcccagctaaaatgtatgtagattatgttcgtgtatatcagcacggggataataatccaacaccagcacctacagcaccagctgttccaagtggattgtctgcagctgctagcaatcaatctagtattaatgtgtcttggaacgcatcatcaggtgcaacaggttatgatttaaaagttgataataacgttattagtaatgtaacatcaccttatgttaatagtggtttaactgaaaattcaacacatacttatgctgttagagctaagaatgctaatggaacaagcagttggagtaattctatcagtgccactactaaggcttcaagcaatcctacgactggaagctgggctcctaatactgcatataaagttggagatatagtttcttataatggtaagaattataaatgcattcaagctcatacttcattggtaggctgggaaccatcaaatgttcctgctttatgggtattaatataaatgcagaatatgtagactgggtattccatgaaaaggatacagcacttacaactaatcaagtaaaggctaaggttgatagttatagaaatcaagttgttgcatttaaagatactgtagattaatattttaagttacgtatagtaatggataaatattaatagattaaatgtatataaaagagacagcataaaccttaaaatagatctctataaaaaggggctatgcagcttctaaaagatgatttctgtacttttcaggagtcatcttttttagatttaactgtgaatggctagtattatagtagattatgtatcattatgcttccttcatatgttctaattgcaatatgcatattaatagggaaattaaatgttttataaaaaggttccagtttactgatatttttggcaaaataaataaaatcttaaagtgagggagagaaaagtgttgagtaaaaagaaatttttaaaaaagatagtttcagtcatggctatggcaagccttatggttacaggaatggtattaggtaattcaaatagtgcatctgcggtaacgagcagtagtattcccaatcatgtactagtaggctactggcacaattttaataatgggtcaggagacattaaactcaaggacgtttcatcaaactttgatgtcattaacctttcatttggagaaccaacatctgttacttcgggggatataaagttcaccccatataatgaaacagatactgagtttaaaagtgatgttcaatatcttcaaagtaaaggaaaaaaagtattgttatctattggaggacaaaatggtgaggttcaattaacaagttccacatctgttaataactttgttaattctgtaagtactattattgataagtatggattggatggattagatgtagattttgaaggacattcgctatatttaaatgcaggggacaaagattttaaaaatccaacaacacctgttatagttaatacaattagtgctttaaaacaattaaagactaagtatggtagtaaattcgtattaactatggcacctgaaacattctttgtacaactaggacatacgtactatggtggattaaattcatatgtcgataacagagctggagcatttttaccagtaatctatggacttagagatgagttgaactggcttcaagtgcaatattataattcaggttcaataaatgacattaatggtaaagctcaatcaatgggaagtggagaattctatgcttctttagcagatatgcttttaacaggttttaatgtaaataatgattctaattatttcttcccagcattaagacaagatcaagtagttattggtgttccatgttgtaattctgctggaaatggatatgtttcaaatgctgaggtacaaagtgctttagatggattaatcaatggtggaacagttggaagttataagattaacaataaatatcctaatttaagaggtcttatgacttggtcaataaattgggatcaatatacaaactttaattggtctaattattttagaggttattttaataatttaactccacctgtaaataaacttaatgcagcagtactaagttcttcagaagttattaatggaagctattctatatcagcagtagttccagcttataatactgcaacttcgtataaaatttatgagggaacaacagtagtagcttcaggaaatttaacagctggacaacctgctaagacgcttaactataatgccatatcaaaagctccaggggcatacatctacaaagctgaattaagtgatggaagcaatacagttacttcaaatcaagtaactgtaacagttccaaaagcaggagataacacattacaaccagcaatattatctgctagtgcagtaaataatggagcatatactttaacggctgtagttccaaaaaataatactgcaacaagctacaagatatatgaaggaacaacagttgcttctacgggagctttaacttcaggtgtaggcgaagttagcatttcttatgctattactaataaggctaagggaagctatgattatacagtggttctatatgatagtacaaattctgttaactctaacaaagttacagtaactgtaacagattctgaatctaacaatgcatgggttgcaaatcatgcatacaaagttggagatattgtaacttacaatggcggtacttataaatgtattcaagctcacacttcattagtaggttgggaaccaagtgctgtaccagctttatggcaaatccaataatagataaagggagttgtagttttatgtaaaagaatgagctaagattatcttggctcattttttgaatttgcatgtaatataaagtattttagtttgatgaaagtagttaagaaaataaaaaaaggtgctgcatcaaattttgatacagcatctttttacaaatcttatggtctaatttatttaatttattaccaacctacattaattattgcatacttagggtcagctacatgcaatgtgctgctgaagtcgaaaacatcatcatagcagaagccatatgatttgttttcataagaatgatcatgccagaattttgcaaagtaatttgcaggagcttctttatagaaataggctgagttattccagtgtgcaggatcaagcataacatgtctgttaaaggctgcacaaacctgtgctttgatggctttttcatcatcatttccaccatcaaagattccatttcctaataaaacttcttgtgtacttggttttccatgtatataaagattatatgcaccaccatttttattgaagacaaaatcactgcctacaacatgtccactataagttcctctatcacatgtaaaggttaattcatgggttgagtaatagttatataccatagaaaatctatggtaagacttaaatatagtaaatataaaaatcatgggagactatgagatataaaatgtaccgtataggatagataattaaaaacgctaaaatgtctacccatgggcaatgtggtactgagcacaagcaacagcgttatgagttgtagtaaatatgagggcttgagggcaaaatgattttttgataaaactttatataagcattaattatttatgttaaaatatagttactatgtatagaatatgtaatttaattatttgattgctaaattaagggtaaagggagagaaattatatgatagggttatatattataataattttagtaattattattgctttaacattaaaaaagagtaagtatgataaaagtaattacaaaaaagaatcaggcaatggtttctttggagttatgatggacaagggcaaatatggagaatatctatccttcaatattttagaaaaaataaaaggggagcatagaatacttactaatgtatatttaccgaaagaaaatggagaaacaacagagattgatttaatatatttacacgagacaggaatttatgttttagaatcaaaaaattatagtggttggatctttggagatgaaaaaagcaagtattggatgcaaactttaaagaacggacagaaggaaaagttttataatccaataaagcaaaacaatactcatataaaatacttaataaaattattgaaagttgacgaaaagttagtaaagtcaattatagtttttagtgaaagatgcattataaagaaaatggaagttcactcagagaatgtaaaagttattaatagatataccttaaacaaaacgatagaaaagcttataagtaattctcctaaagtatttgcagcaggtgagattattgagctatattatgaattaaagtcttatacatgtgttagtaaagatgtaaaagaaaatcatataaagcagattgaagaaaaacaaaatttgaaatgtaattcaatgaattcgggtctaataaaagaaaatattaaaagtaagaatattgatagagaaattataaataatgtagaagaaattaaattaggagaaaaagaaattaataatgaaagtgaaatggaagaaaagcgagataaagtgaccatagatataaatagaaatgatgtatgtataggaaatcttgttacaagaaaaattagagaaaagttagatgaatctggtggacatgcatccattaaattatttagaggtgattcttgtgaaataagttacgattcaaataaaaatggactcgtttcacctaaaataccagttccagatcaattaacatgggaagcatttaatgcagccgtagaagttgtaataaataatggaggaaaagcaccaaaaggaagtgctagatcaaagggcgccagacttggaaatgataagcttccattgaattctgtggaaggctatgtagcacataaggtacatggagtgaaagaaggacaaagtgcatttggcccaggctttgtaatttttgcgattttagattgggcaggtatatgcaataatgaaaaaggattcttaactataaagccttcattcttgatggaacttgaagaaagtaaaattgaaaagaaatcaatataatgattatttatttatattttaaaatataaataaataatcgaaacttatctgtattagtattattgtggtggtataatatgataaagataattttatacactttgaggtcgagatatttttaaaaattggagttataaaagaatcattaagtatgatctatgaataattataagtatatcctatattttaatagaaatggagttaatatattatggcaattttttcaccggttcaagttaatatagttttatttattttattgcttattttatttggacatacttattttaatatgaatagaaaaaatataaccaatagattgtttatgtggattatgggattaacagcatttgccataatgctagagattttaagcgttatattaaataatccaaatttaaaacaatttatggtaatgcaaaagattgtcaatgttcttggattttcagtgactcctatcattccatttctaggatatatattcagtaaagaatgggtaaataggtatcagaaagataaaatcaaactaaataaaatacttttattaccgctactcataaatgggataatggcatttgtaagctatagtgtaaacttgcttttttatgtaactagtgaaaatacttatgaacgtggacctttattttttatattaccttgtgtaagttacttttactttgggtacaacttatattttatttacaaacagcgtaaaaggttttcttggtgggagcttcgtatatttaatttattctatattgcagcaggagtatttacaggtattcagattgtatattctagttatctaactatttggaatggaactgcaatgatgatagttattatttatatcttcatattaaatgatcaggtacatagagataggctgacgggattagaaaattattcatcctatgaacgctatattgaaaatatctcttttaagaagattaataagctttttataattaatattgatatagatgattttaaaagtgttaatgataaatttgggcataacgaaggcgatgaagcacttaaaatgtttgctaatctactaattgagagtttctcgctaagaagaaaaaaattgatacgtgtaggcggggatgaatttttaattttattagaagttgagcggaaagaaatagttgataattatattcaaaatttaaataaaaacattgaggcatataataaaactaaagagaaaccatatgaacttaaattcagttatggagtggcatgttgtagtaacgctaaagaagatatccatgacattttgaaatgtgcagataaattgatgtatgagcaaaagaaaagtagaaagatgaagttataatttagcacgtaaaattaaaaaagataagaatttagaaaattacaagctttattgctggtatatttaaatagtggtaaaattattattggaaaataaattttaagatataatttagtagaaactagacaagattatagcttgaattgtaaggaagtgagaaacgtggaaaaacaaataatagatcttaaaagagatgcatataaaaagctattagagtggaaaaataatcataataataaggtactattagtagaaggtgcaagacaggtaggaaaaacttatttagtaaaaaaatttgcaagagaaaattataagcatttaatatatataaatctgttggaagaaacaggagaggacttacttacaatttataatataataaaagaagaacgtctatcaggaaaactagacagggaaaaaacaaatacattaaaagagatgtttaagagattctctaacaattttgaagacaatgaagaatgcataattataatagatgaaatacaagaatcttataagatttataatatgataaggcaatttgcaagggaatttaaagcacattttatcatgactggaagttatttgggaagagttgttatgcagaaagagttttggtctccaatgggtgatgtagatttccttgaaataaagccattatcattcactgaatttgttaatgcgcttaatttaacacaagcttatgagtcattagatttgtatggagatggcgataaaaaggattatgatttattttatgataagtataaagattacttagaagttggcgggtatccagagatagtatgcgaatacttaagaaatcacaaggaaaatattaatgatttgtttgaaaaattattaagagtattttgtgaagaatcttcaagatattttgatggagatatattgactacaagagtgtttgaagactgcataagcgcaataattgaaattctagctagaggaaaaaaaggcattaaggaaagcagttatacggaagaattacagcaaataataaccaaacaatattcaagtaatatcacgaaggaaaattgtaatagagtacttcaatggttttacacgtcaaaatttgttaaagactgtgataagcttatagattttgaatttaccaatataaaaaagagacaaagatattttttgtcagatgttggtatggcaaattatgtgatgaaaaaagcaaacctattagcatcggaatctagcgggttattaaatgaaacgtttgtttaccactgtcttttggataagatatctatagttcctatgtttggcatctatggtgatggagaacttgattttgtctatagagatagggaaaacgggcatgtttacggaatagaagttaaggctggtaagaatccaggtaaaaccataacaaaatcattagctaatggaaaaattaattttgcagtttatctaaaaggggtaacgcaaggtggaattgcaaacaagacttatacaattccaatatttttatttccaagatttgagttcagaaaaatataaagatactgtgataagagtttatgtaatgtaagctcttattttatggtaaaatatacttataatatagattaattaacacttttacgtgtttataaagattagatctatgtaaaaaacggtgaaaaatacagcaaggtttataatttagcttaaaaggaagtgattcaaattattaaaagatgtgaatgggtgacaaaagaagaattatatattgaatatcatgataaggaatggggagtgccggtatatgatgataggaaactatttgaaatgttgtgcttagaaggagctcaagcaggcttaagctggtggactattcttaaaaaaagagaaaactataaagaagcttttgataattttgaagctgaaaagatagtgaaatatactgaagaaaaattagaacaattaatgcaagataaaggcattgttcgtaatagaagaaaaattgaaagtgttgtaactaatgcaaaagcatttctgaaaattaaagaagagtttggctcattctccaattatatatggaagtttgtggacaataagcctattattaattcatggggaagtataggagaagttccggcttcaaatgaattaagtgataaaatgagtaagcaactaaaaaaagatggttttaaatttgttggaagtacaatttgttattcctttatgcaagcagttggaatggttaacgatcatacaactgaatgcttttgctatacaaaattaatttagttaagaatattcttaggaagaatcatgtaaattaaataatatgatttttatataatacgatgcaactaaatggagtaaaaagtgtaattttaaagtagaaaacgaggaggattttacatatggcaatagaaaaagttaaagagtatttcaaaaaatatggtactgataatcgtgtgcaagagtttgacgtgtcaagtgaaaccgtagcacttgcagcagaagcattacattgtgatccatgcaggattgcaaagacgctttcatttatggtagctgaaaatccgattttgattgtagttgctggggatgcgaaaattgataatccaaagtacaaagcacattttaaggcaaaagccaaaatgcttacactagaggaaactgaaaacttaattggtcatgccgttggtggagtttgtccttttgctataaatgaaggtgtaaaagtctatcttgatgaatcattaaaaagatttcaaactgtgtttcctgcttgtggaagtggtaatagcgcaatagaggtgaccatagaagaattagaaaagtattctggttatgatgaatggattgatgtttgtaaaggttggaacaattaaagaagttgattataatatagggattttaatatcaacatatgaaacttgtggtaaaataagtaatttaaataaaaatgttatataattagagatagaatatttaaaaagtaaataatctatcttttttatattttagaaataaattattaaatatagagtctgataattcgtaagaaatgagatgaatattatgaatactaaaaagtgcttttataatattggatttaatcatataaaaaaggctagttttaaaacaaaattaatatcatcatttctgattatttccatattaccaatcttatctattgagatattttcttattattattctactaataaaatagaaaataaaatatcaaggctaatggattttagtcttacacaatctgctaaaagtataaacactactctttcttcttatgaagatttagatatgcagattgccagcgatgatgaactcacaaaactgattgataaatatgatgttggaaataatacggatataaatacccaagtggcattgaatgatattaaaggcaaattaactgtttacgcttattcaaaactgggaattgttaatattgatatacgtactaataaaaatcataagatagcttcatataacagaataaatggacatgcaataccagatatctggaaaaggtatgacgatataattgaaaaaaatgattatgaagatgagactagcagatacggaacaatatggagcggaatgtcatatacgcagccattggtagaagaaacgtataatttgattaatgtgtattcaaatataattgactttacaagtgacagaataatcggagttctttgtataagcataaatgaagacgttttacaaaagacttataacttaaattcagatgatctgcatgccaataatatcaatgtatattcattaattatagataatgaaggtacaatagtatcttatgaagatagaaattatattgggaaaaatatatactatttagctaataaaaaagatagaaattcagaggacctaaacaatactataattaattctcatattgtaaaaggaaattcactaattgtaaacactaagagcttaaaaataagtaactggtatattgtgaatataattaatgaaaataaattattttccgaagtaaatctgagcataagaattattattatagttattgttatagtaatactctttttcatattttttatagtgctagtttcaaataggttgacaagctccataagaaaaattgttgcggcaatgaagaaagcacagaaaggagaattatctgtaaggatagaggaggatataactgatgagttttctataattgcactaacctttaataagatgatatctcatattaatgagttagttgaaaaacttagaattcagatgaatttaacttctgaagcagtaaaattgcaaaaagaagcagaaataagagcgattgaggctcagattaatccacattttttatataatactcttgactgtatcaactggatggcaattgaaaaggaggagtatgaaattagtaaaatgcttaaaagcttaggtcaaatattaagatattcaattaatcaaagtaataaaatagtttctttttcacaagaaattcaatggcttaagcagtatttatatcttcaggaaagcagatttgataattcctttaaaactgaaattaagttcgataaagaagttccggaatttaaaatacacaagcttatgctgcagccactaatcgaaaattctattatacacggatttgagggctatacatctggaggtattttagaactgtcaattgaaatgaaggaagcggatatagtgatttttataaaagataatggaaaaggaattgatggtgaaaaagtaaaatatattaatagccttgtaagtgaagctaagattattaataaaggagagcatattggaatagaaaatgtaatatcaagacttagaatatattatggagattattataagttcaatatagaaagtgaaattggcagagggacaagtatttgcattagaatacctaaaataaaataattatataagatatttcttagagtttctattcataatatatgttggatatattaaaaataactaagttttcagggggaagtatatgaacattgttgttattgaagatgagattaggactagaagaggaattataaaattattacctaaaatcaacgaaaattatcatgttataggtgaagcaaatgatggcttagaaggttttaatataatagaaaaaacaaaaccacaggtagttataacagacattaaaatgccaggagtaaacggattagagatgcttaagaagcttaatgaatctgaaattaaggttaagatgataattattacagcgtattcagaatttgaatttgccaagaaagctatttcagttggagttactgattatttattaaagcccataacagttgaagacttgaaaaatgtctttgaaaaaatagaaaaagatattgatagggaaatagaaaaagaaagttatcaaagaattaacataatgacttttgaacaaatgataatagagatgatagaagggaaaataaagattaacaaagtatatgaacactattcaggtaagataaatgaatataattttaattatgttattgtagccaaattacttaatactcatgttgaaaaatataatttattaaaagaatgtatagataatttgtttaagcatattgaaaatttaaaatatattcttatagagtatgaatatagtaatgaaatattaatcttattttcatcaaaggattcggaagtaaatattgaaaaagaattgaataagaaattattcaatttatttcgtaataatggatttgaaaactgcattgttgctggtctttctaaattaatttcaattgatgaacttgcgagtaaagtgaaagaaataaacaggaatttaaaatggtcattgttattgaaaaaggatgttatagttactgagaatgcaatatcaagcatatgcactaaaacttttaaatatcctaaggaaattgagcagttaattatggctgcaattggtgagcaggactatattaaattaagtaatttaataaataagtttttaagttattgcaaatcaggtgaatatcatccagatagtatcatagatggtgtagattgtttcgtgatttcaataattaacataatgaaagatattaattatgagttgtttattaaaattaataatgaaagaatattagaaaaagttaaaaatagtacaagctggtgtgaaatagaggatattttaaaaaatataataaatatagtatctgaattaaataataaagattcaaaggcatcatacagtttaattgtatataagactattaataaaataataaatgattatgcagaatgcatttcattagaaaatatagcagcaagccttaatgtcacccctgaatatctttctacattattttataaggaagtaggaactaattttacaagctatttaaaggaatacagaataaataaatccaaggaattacttattagtagtaatttaaaaataggagagattgctaagagggttggatacaatgacccaaaatatttttgtaaagtatttaaaagcgttacaggtgtttgtgcaggaaaatacgttacaatgcataaataaaattgattagttttttacacttttcttaaaactttggaattggattagagtattgtaagaaatataatgatagtaacagatgcgcatcctgcattgtatatgtttacatttatccaaatgagtttatgtcgaagatatgaattttaaagtggggggattaaattgaaaaaaaccatatcattaataataagtgctgtactttctttaagtttgattggctgcggatcatcaagtactcaacaaactgctagcaatactaacgggaaggttacgctaaaagtttggagttattataacgacaatgaaaaaaaatcatttaataatttagttgataaatttaataagtctcaagataaagtagaagtagtaaatgaatatgtaccatttgcagacataaagaagcagttttcagtaggaatagcagcacaaaatctaccagatcttgccgttatagataatcctgatcatgcagcatttgcagcaatgggaatgtttgaagatataacagataaagttaaagactgggatgaaaaagataattactttgaaggtccatggaagtcaacaatgtataacggcaaaaattatggaattcctatggatagcaattgtttagcgttattttataatgaggaccttcttaagcaggcaggagttactcctcctcaaacatgggatgagcttagaacagctgcgaagaaacttacaaaagatggggtttatggtttgtcattatctgctgtgaaaagcgaagaaggtacattccaatttatgcctttcttattatcttcaggaggaagtgtagaaaaagttaattctccagaagtagtaaaatcacttcaattgtggacagacctacttaaagatgggtctttaagtaaagaatgcattaattgggatcaacctggtgttgagaagcagtttgctacaggtaaagcagctatgatgataaatgggccatggcaattttcaacacttaagagtgatgctcctaatatgaagtgggcatgtgtaaaaattcctaaagatcagaaatatgcttcagtccttggtggtgaaaatataggaattgttaaagggcaccatcctgaagaagcatgggaatttttaaagtttattggaaaggctgataatgttagagaattcataaataatacaggatattttccacctagaaaagatttagctaacgataaagtttggactgaagatcctaataaagcagttttcatggatcaaatgcagtatgctatgcctagaggtccacatccaaaatggcctcaaatttccgaagcaatttacactgcataccaagaatctttgacaatgcagaagagccctcaagaagcattagatgaagctcaaacaaagattgatgcggtattaaagtgatttgtaaaggttaatatggttgaggtgctttaattaagccctctatccatattaaatagaaaatgaaaagaggtggtaatatgcataagaatagagtgggttatatgtttattgtaccagccgttatatttatgctattatttgttggttatccaataatatataatattttactaagtttgcaagacgttaatgttatgactgtaaacagtccaataaaagaatttgtagggtttaagaattatatagaattatttaaaagctctgtgcttctggtggctatcggaaatactctttattatactgttgtatgtataatttttcaatttgtgctaggttttgcatttgcattgttctttaatatagaattcactttttcaaaatttataagaggtttggttatggtatcttggttaataccaatgactattaatgcattatcatttaaatttatgtttagtccaagtggtggagttattaatcaaatacttatgaatcttcatgttataaatcagcctttggactggcttatacagcctaatagtgcaatgtggggacttattataactaacgtatgggttggaatcccttttaatatgattcttttaacaactggattgagtacgattcctaaatctatttatgaaagtgccagtcttgatggagcaaattggtttcaaaaactattttatataactattccatctataaaacctgcaattttgtcagtgttaatgcttggatttatttatacatttaaagtatttgaccttgtttttataatgacaaatggtggacccgtaaatgcaacagaagttttgtctactttatcatataagctatcattcaatcaatatagctatagccaaggttcagcagtagccaatattctgttcttaactctatttatagtaagcctattctatgtaaaattaataaaagaagatgaggtgatgtaatttggaggaaagaagatatattaaaccgagaactaacattattttaaatattatagctgtaatagttggagcaatatttctattccctttatattgggtaattataagttcatttaaaagtgatgctgaaatatttagaaatcctccgaccttttttcctgaacagcttacattaagtgcatatgctgctcaaataactggtgaatatagcatattcaaagggttttttaacagctgtttcataagtttttcggttcttgtgatcacattgctttttgcagtgccatcagcatatggtcttgcaaggtatagaattaaaggtaaaaaattatttattcaatcatttcttattactcagatgcttccggcaactttattattaacgccaatgtttataatatttgggagatttagaatattaaatacctacttatcacctattcttgctgactgcacaatatctataccatttgttgtaattatactaagaacgtattttttatccatacctaaggagctggaggactctgccagggttgacgggtgcaatacattccaggcttttataagaattatacttccagtatcttatccaggtattataatggctgcagtattttcattcttatttgcatggggggatttgatttttgctttaacatttatgaatgagcaaagcatgaggccaatgactgcaggaatttataattttatggggcaatacggtttagcttggaataaaataatggcttttggtacactcactataattccggtagtagcaatatttatattcatgcaaaaatatataatcggtggtctaactagtggtgcagtaaaagaataattaaaatattacaggaaaaaagttaggtaaataaatgctttaggaattcacaatagactgagaagaataataaataggagggattaatatgggacaatttgatgataacagagaatttttattaggatattttgaggaaaaggatggagctctttgctatagatatgatgcagaacgtcttattatcatgccgtgggggccaaatagtttaaggattaaatccacaaaagagccagatatgcctatggaggattgggcgcttatagaaccaaaaccatctaatgctaagatcagtattgaggagtatagtgcaaaaatcgtaaatggtaagattatagcagtaattaatcagattggaaaattagaattttataatcagaaaggtgaattgttgttagaggaatatgttcgtaatcgtaaggatatgtatagttctacttgtagttctttggaagtggaaggaagagaattcaagccgattataggaggagattatcatctaagcatgaggtttgtttctaatccagatgaaaaaatctatggtatggggcaatatcaacagccgttcttagacgtgaaaggagcagatttagagttagcacacagaaattctcaggctagcgtgccatttgctctatcatctttgggttatggatttctttggaacaatcctgcagtgggacgtgtgaattttgggaagaatattactacatgggaagcatattctacaaagaagctggattattggattactgcaggagacactcctgcagagattgaagaagcatatgctgatgcaactggaaaagttcctatgatgccaaaatacgctatgggattctggcaatgtaagttacgctatcagactcaagaagaacttttagaagtagcaagggaatataagaaacgtaatcttcctatctctgttattgtggtagattttttccactggccactccaaggcgaatggaagtttgatccaacatactggccagatccagatgctatgataaaagaacttaaggacatgggaattgaattgatggtatctatttggccaactgtagattatagaagtgaaaattttgacgaaatgatgaataagggattgctcgttagaacagataaaggtttccgcatttgtatgaatttcatgggaaatactatacattatgaccctactaatcctgaggcaagagagtatgtatggcagaaagctaagaaaaattactacgataagggtgtaaagattttctggcttgatgaagcagagcctgaatatagtgtttatgatttcgaaaattaccgatatcatttaggaccaaatgtgcaggtaggaaacatttatcctatgatgtatgcaaaaacattctttgatggtatgaaagcagaaggacaggaaggtataattaatttgctacgctgtgcatgggctggatctcaaagatacggtgcattggtttggtcaggtgatatacattcttcctttaaaagtctcagaaatcaatttgcagcaggattaaatatgggacttgcaggaattccttggtggactacagacattggaggattcttcggaggacatattgatgatccagatttccatgaggtattgatccgttggtttgaatacggaactttctgcccagttatgagacttcatggttatcgctggcctttcaagcctcagtatggaacaacaggtggagctgaatgcgtatccggtgctgataatgaagtatggtcttatggagacaaggtatatgaaatctgcaagaagtatttgaaaataagagaagcaatgatgccttatattactactttaatggaagaagcacataaaaaaggaactccagtcatgcgaccaatgttctatgattttccagaggataagctttgttgggataatgaatcgcaatatatgtttgggccaaatatcctagttgcacctattatggaaaaaggtcagactgaacgtgaagtatatctgccatcagggtcaaattggactaatgcatggacaaaagaaaaaatggaaggtggacaaacaatacttgtagatgccccaattgatcaaattccattgtttctaagagattataaggaaggatcttgcactataaatatttaaaattaatatcataaatcggcagtttgggggtataactctagctgattaaataggttgatttttatcattgttaaataggatgtatttagataagagtttatgtaatgtaagctcttatttttatggtagaatgtatttatattgtattttgttgggtggaattaaaatgaatcaaatatatacttcaaaagaacagataatattgctaaaagaaatatgtgaagtccattatagtataaaagaagccattttatattaagatatggaggaattaataattttaaaattgatttcagaagttaaaatgaaaaatacaagcttttagaatctaaattacaggaagaataaaataatttttaattt

SEQ ID NO: 60 - DNA, 36221 bp, Clostridium beijerinckii
attcacgatcaataatttaaactattaaagttattaaaataagtttaatatataataaattataatacttattatatattaaactcaataataaaacaaattactttgatttattttcttctaatgctgctttaataaatcctacaaacaacttatgtggcttgttaggtcttgattttaactctgggtggaattgtactgcaacataccatggatgatcttcaacttcaacaatctcaactaatctttcatcaggacttgttcctgcaattttcattccagcttcagttatttgttttctgaattcattattaaattcatatctatgtctatgtctttccttgataatttcatttttatatacttcataagagttagtattctcagctaatctacaaggatataatcctaatctcattgtaccaccaagattttctatatccttttgatctggcataagatctattactggataatttgtacctgggtttatttccgaactatttgcatcttcataccctaatacacttcttgcatattcaattacggcacattgcattcccaagcaaattcctaggaaaggtttcttattttctctcgcccattttatagctgctattttaccttctattcctctgtcaccaaatccacctggcactaatattccatcaacatctttaagtaattcttgagcattactgttttcaatattttcggcattaatccacttaatttcaacattagtattattagcatatccaccatgacttaatgcttcaactactgatatgtatgcatcgtgtaactcaacgtatttacccactaatgctatcttcacgttgtttttaaggttcttaatcttttgtaccatttgaatccattcggaattatcaatatctttacatcctaaatgtaatttttcacatacaagattatctaaaccttctgaatgtagcattaatggaacttcatataaattttccgcatcaagattttgaattactgatcttccgtctatattacagaacaatccaattttagccttaacatcatctgataattctttctcagttctgcatactattatatctggttggatacctatcattcttaattcttttactgaatgttgagtaggctttgtctttaattctcctgcttttcccaagtatggtaccaaagtaacatgtatgtaacaaacattttcagctccaacttcactttttatttgtctaatagattctaaaaatggttgtgattctatatctccaacagtcccaccaatttcagttattaccacatcaacatctctatcttttgctacttggtatactttatcttttatagcattagttatatgaggaattacctgaactgtacctccaaggtattctccccttctttctttttctataacagaactatatatcttaccagttgtaacatttgaattttgggttaaactttcatctataaatctttcataatggcctaaatctaaatctgtctcagctccatcatctgtaacaaaaacctctccatgctgataagggctcattgttcccggatccacattaagatatggatcaaatttttgaatagaaatttttacccctctattcttcaataatctcccaagagacgctgctgttattccttttcctagtgctgatacaactccgcctgtaacaaaaacgtatttagtactcatttttatcctccctatgttaaaatgttcttctaaattaatattgactttttcaaaaagtcatgctataatgaaaatcaccccataatataatatggggcacttgtgttgcttaataacataggtattataatatcacatatctactccaatatctagtcttttttttataataaattggtcatgctattctttcctatattatcttctaattcaaagtacttctctctaaaaagtctatttattaataacttttcttctgctagtttcaaattgttacttatactcttagaagtttttagattaaaaacttccttaactctctcagtatctaaacagtgattatattttaataataataataatatatatttattatctctattttttagcaattctataaaattttcttcatcaattccgtaatatttgcatatgttattcaatatctctatatatttcaatccattttgcatatatattcctccctttgaaattatatcccatttttttctaatttaatcaacttattcctaaatatctttatacaaagggagtatttaaataaatatagaacctacttaatttaatttcacaccgatagttaagtttgtcttcaatgcaggctgtccacctatttctagtatgtacattgcggttattgttccgccctctttactaatatcaatattaagttttttagtatctatttgaagatccataacaccgtacggcgttttatatagagatattgttctatgattatttctaaattccattttagtttctgtagtgccttctcttattaaatcaaaagaatcatttcttattattatagtagtctttgtcccttccatccctgaaagctttgtttcctcatactctaccttaaatccatcttctatttcatggaaatctcctggagttactacccctacaagatcctcttcattatccaatacataactatctaccgttataatagcttttttcttcatattctcctccacttataatatattatatttgaatattatttttgactttcagaaataagctttagctttattaaattcatttgacaactatataaatttcgtgaataaaacttccaaatatcctattaatattatttaaatatatctcgaaatatttccactattttaaactttatctttatattatttccatctgcctgcttatcccctacattttcagttgaatcgtctttagattctaattcaaaactttttccatttgactttattttattctctgttttatcatattccacttgtgcctttgattcgtctacaaaacataatggaggaaacattacacaccaccagtttctaccttgtccacttcctataattattctaaaggcctcataatttccttgaggtaaagtgatattaccataagacttatcaggaaaattttccctagacaattcaacttttacatcataatcataattattatccttaatcacttgttgtgcaagtgttttaacatcttccatcttatcttttataatttttcttgattcatctaatgattgtgaagaatttaaataaggatatagataatctataactctattcttaacttttaacttcaattgttgatcatcatcattatcactattagcaattacatgaaatcttattaatgaatctttaacctcgtcgtaattgagaaccctcatattattatcatttttattactttctgttgcaattaaactatttaccaaacttgtactattacctctaacaatgcttgtacatccagaaaatatatttatacttaatgttattaaaactaccaatactattttttttaatttcaaatattttatcataaacaaacccccttgtagctaaaattattaccacttggaggttttttatacattcaatttgaattaaattgttcttgttataaatacatctttatatttttttttcatttcatcataacataactgtgcttttagcatatcatcaaaaagagcaaaaacagttggtccactaccactcatcattgtacctatagagccaatagatttcatttcttccttaatgttagcaataactctatgcttccttaaagtaacattttctaataaatttttcatattatttgctacaaaataaacatcatcattattcatattttctattaaactatctattttaggatgaaatacaacttttgataaatcaaagcatttataaacttcttttgttgatacaccaaaaggtggctttactaaaactattattttatctttaaatgattttaattgggtaattttttctcctataccttcgcacagtgctgttccaccttttatgcaatatggtacatcagctcctagttttagccctatagatttcaattcttcatcacttgcatttacattaaacatcttattcataagctttaaaactcctgctgcatcggtacttccgcctgccaatccagctgaaacaggtatattcttagttaactttatatctactccctgactaatagaataagtttccttaaatatttttgctgctttataagctaaatttctttcatctgtaggaacataatgtttattacaatttaaccttatctcagattcagttttctctatttctattatgtcatataaatctatagtttgcattatcattcttaatatatgatatccgtcttctcttttcccaacaatatctaaggcaatatttattttggcataagccttaatcttcattattttattcctttcttaacattttgacaatattttatcataggtaaaaaatcttgtctaattaataaattaaaaaaggattaataatgtctattaaacattctactatgagatcaattttagataactttaaatcttttatcaagagttataatgtattactgtactgtttatattcttcatcgaacgtatctagttgtttgtttggttcctcatttataaactctaaaagagaatctaatttttcatagaatactacaatcatatcgcccttattactcatatctattgcatattttaacgcttgaacttcatctagacaaatcttcaaatttgcatttttattagttttcaatattgacttttctaatatatctgcaatctctccagattttctaccccttttatccttatcttcttttattactattttatcaaaattattagcacatatttctcctattgcgtatcctatatcgtcttttctatctcctggtattccaattaccccaattaaatcattatctcccttaatctttctcaatgaagatataatcgctctataaccttcaatattatgagcataatctaatataactcttctgttaaggtaattgtacatgttaaatcttccgctattatcttcattctttaacccaaagtccataaaaccttttgaaatcatacaataatcaacttctaagcctacaagccctgcacaagctgccattgcattttctatattatattctaatgttccattatatgatattggtaactctctagtagctacaatttcatacttcttcttattattaattacgcaaattttatcatcttcaacaaatacagctattttgccattagctatattttcttgtatcaacggattttctttatcttttgcaaaataaattttttctgctgtgaatctatttattacagttttgctatatttatcatcagcatttacaacaacaaaaccatcatcttttactgcttctcctactaaagcttttgtaaagctcaactcttcaatagaattaattccatccaagcccagatgatcattggttatatttgtgattattgctacatctgccaactcatatgctagccctcttttaaccaatcctcctctagcagtttctaaaacagctacatctacatctttattcatcagtattgatcttgcgctattaaatccagaatcatctcccttatgtatacacttttcattcaaatatacaccatcagtcgatgtcatgcctacattgcttcccatctttcttagcacatgacttattaaccttgtagtagttgtctttccattagtgcctgtaatagatattacaggtatatttttaggttcttcatcataaagcgtttcaagtattgcttttcccacattacgccttttaccttttgaagggaaatggtgcattcttatacctggtgcggcatttatctctaaaactactccattattatccttaagcggaacactaatatcttttgcacaaatatcaactccacaaatatctaaccctaaagttttagctgcatttatgcaactttctatattttcctcacagatttcatcagtgcaatctattgctattccaccagtagaaagatttgcattctctcttaataatattttttcaccctcttcagggatatagttcagttccaatcctcttttagaaaggcatgatattaactcagcatcaatttttattttggttaatgctttttcatgatcctctcctcttaatggatccttattaagaacctctattaacatccttaaactatcttttccatttccaataacatatggagcaattctcaatgatacagctaccaccttgtaatttacaacacaaactctgtagtcgcttccttcaaagtatttttccaaaattatatccttttgattttttcttaagttaatatatgcatcaaccaattgtttttgatcttttatattcagtattactccttgacccttgtttccgcattgtggctttaaaaccactggatatccaattcgttctgcttcttgtaataatccaattaaattaagcactttacttccgtctgctacaggaatattttgagtttgaagcaactgttttgttaagagtttatcacaagatatatcaactcctacacaactagtcttgtttcctatagaagcttctataattctacccgcttttccatatcctatttgatatatggtactgtcccctagttgcataacaggaagtttatattcccttgcagcatcacatattgcttttgtagtcgcacccatttgctcattttgcaatatattttgtataattttcattcttccatcgaaatttattggattttgcgctatcaaagaattcattaaatctatggctaaattagccacctcaagtattgtatttttatattcatattgtacgataatataatacatatcgcctttaatttctcttgcctttccataagcaacatctattcctaaattattttgcatcgctatcatagtgtgttcacaaatatgcgctaggtaagttccttcttttagtcttttaacaaaaccaccttcttcatcaattccgcatctatgattttttaattcaggaattatgtttacaagattaaaattaaaattcggtatgtccttacttgctatttcagaatatccttccaaatccatatctattcttatacactttttatgagaataaatattttggccttcatatattctcttttgtattatcttcatgattaaacttttcctcctcaaaaggtgacttttttataagatcaaatttatttccatcagttaatacatgcaacttaacattatgcatactcaaaatatcatctgcatataattctgaaacattagtatatgtaattgcactaccatcaataaagtaaactgctccttcacctattacctctatcattccagattggtttactactattcctgtattctcatctattcctattcctaaaacctcagggttttgtgcaattcctgttaataatctccctattcttcctctttgagcaaaatgttggtcaattataacatccttaatcaacccaaggcctggagacatttttaatgtgcattttctaggatcatcatcatcttccccttgaactatcattgtgtcactcattacggatgctcctgctgaagtacctactataaatgcaccattcttccaagcttcttctaatgcatcataaaccggagttccgccaattaaacttgttatttttaattgatctccaccggtaaaaaatattaatgaagaatctctgattagctctacattcatatcatcagatgcttctgttctctcacttatatctaatacctttatattttttacttcaagttctccaaatacctctttatatttatttgcggcctctttaggataatcagttgcaatagttgcaattaataaagtatctttacttttgtcaattgaatcacatactctttttaaaatttcttttttgccttctttatcttcggctcctccaatgattattaaattaccacttaaaacttttttcaaattttctcacctcatatcatgcattacatattctatccaccagattaaataattattcaagaaatttggctgctgcaaatgccaaaccacgtttcctataagaataatttctctagtttttacttccttaagttcgaagtaattagcaactataaaacaaaacttagtttgtgtatttttcattttattatgtaaatattttttcttcatatccaaaaactttttctatttttagatcttaataatattgcttcataaaaaaagagatactccagaattcatctaatgaaattcttaaagtatctctttttttatgaatttaattaattttagaatattgcccttcctggtattatcaatttttgtccttcttcaatatgttctggatcttcaatcttatttattttaattaaatcgtcaactgttgtattatatttttttgctaagttccagaaagtatcccctttactaattacatatatagtaatactagctttcttttctggaatatcgccctcttcttcaaccacatctgaaacaaattctttattcatttcatacaatactctgccagatagtatcacagtagctttaatagctatattatttccttctatagctgcttcaatattttctaaattatttttaattatagatttcatattttcatctgcgcctgctatatcaattgcagctgagaatggtatctctgctttaacacttgataggtatttctcctcatcagttgtcttatacaatatacttgcttttataattccctctacaataactctgtcttttacaacttgtttatctgttaatattatagccccattagcagatattatatgttcaggtctcaaatcattatctttcaattgaatattatacttaacaattgcttcagaattattcattccatgaagaattccaacttcatgttcatcttttttgagactaagcaaacaattggtagaatatgcatctttaatagtatctatgttttcttttgaaaatatcttaacatttgctctaactacaagctcatcgtttataattcttatttcgcctaaatcatcttcttccaacattaaatcattatttgatatttcataggaaacagttggaatcatatctgatgttataccattaatttcttcctcttttgataaataaatatcatcttctaatggaattatttccttagaatcttctcctttgtatagtatatttaatttgcagtaacagccaagataaactttatcttctgttatttttatttcctttttatgaagtagtaaggaacactttaatattttgctgatttgtggtttatccataccaactctaatcatagatttgcctactaattcaacatcctctgttgcattgattttattaattgtctctgtttttttcaatacttctacttgatcattgccctcaatatcttttacaaattcaaattcattgctcttgtaaagttcccaatctacagtaactataccctgaatagatattttcctctcattcattatgtttgcttcaatatgttcaatattacactctgcctcgcaaattactctattttccccttgatttaagtcaatattatttgtaaagttctgattataattcaccgaatttactgcgagtccctcttctttagctaaatatattactgtgtactcaacctttccttctataactactttatctccaattatttctttattagttaccattggtctagcttcaacagttaatatctcttgtacatcaggatgggtatcagggattaagtattcatcttttaataccgaattcgtattattttccctaagcaattgttcaaactgtacattttcttttacaatatctatatctgccatattttatacctccataaaattcctactattcatttatatacatatgagtagaaatttatgataaatatatttttattttattctaacaaattaagtaaaccttttatttaatttacttaacaatatttttttaaatttttttgcgttttttattgacatatactattttttgtcgtaatatagtaattggttattgaccatataacctctcataaattctcaatacccttttataccatagttgaaagatggaaacccaccatctttctttttttataaaattatttagttaatctaaatcctattatcattttaatcataaaatgatattctatttatggctttctacgtataaaaacacttctcacaatttctaattcattaattattttaaataaatatgaatattaaaaactcacttaaaaataaaacaaaaagaaaaaactccgaattaatcgaagcttatattctagttggaaataccaattgtacagtctttgttaatacatctgaataactataagtcacggtcctttgggtgtcattttttaatcttataacaaaaatacttgggtatacactttcaattataccatcattaactaaaatctttttccttccaccattagcttttagagtcactttctgaccgacgtgtctctctatatcgtttttaatggaagcaatagttttaactttttccatgtaaacaccctctttcatactaattatataacaaaatcataaattagtcaagtaaaataaatattttatcatttatagcaccatattgtcaatgtaaacatttttccaattatatatgttttcaagctattttattatattatctgctttttcttaattattattccccttatcattaaatttaattctataacatttcataatctataaataaccttaattttatttttaaattgattccatgttcatacttagataagtatataatttaaaatcagatattatattaaaaatctttcttagctcaatgttatatctataaactattcccccttcaattattctatactcttatcctattaacataatttcgagtatttccaatgttatatattgaccaatactacttacagtaatattggtcaatattttattccttactatattttttaagaaaatcttagtagacattttatataaagctggaattccctccccgttcagaatttattctcaacaataccaaatgacattttttaatcatataaaaatattttttactataaaatactcctttaatcacacgtacattaaaggagtatttatatttattctctatttttcattaattaatttttcaatttgatcagcaattttctctggttcatatgttggtgcaaatctagctattacttttccctcttttgatagaaggaattttgtaaaattccacttaatatcatctccacttgtattaaagcctttttctgataaaagattatacaatccctttgatgcatcatcttcgcttgcaataggagcctctttctttaaaaaaacatataatggatcactattctctccatttacatcaatctttgcaaatgttttaaaagttgttccgtatgttaatttacaaaaatttgatatctcttcattagtccccggcgcttgctcaaagaattgatttgatggaaaatctaatatttcaaatccactgtctttatatttatcataaagcttttgaagcccttcgtattgtggagtaaacccacatcctgtagctgtattaacaattagtaatacctttcccttgtatgtctccatagaaaccgaatttccatttatatcttttactaaataatcatatatcattttgcttctctccttatcatctttaatatgaacttaagtgaataaacttatgttttcataaattatattttataaaattaaatttgtttaaaccattatatattctattattatttttgtcaaatagaaatattatatttattaattatagttaaaaacttcaatactcttactaattactttgatgcattgaagtttttaataatttattttatgcaattcctatctaaattatttattaaatataaggagatttaggatatccttctctatactttcccctggtctgcaatcctccaactccctttattcctgttatcgtattttcaataacatcagttattgagactaccttatcaattcttgtataagcaatcttctcacatacaaaaacagggtccaggcagtgtattaatactcgatttggactcgaggcaaaattagcacctacgtctaatattctttcatagcaactttgacaagcccctgcaaatattactaattcatcataacttgaattataatttcttaagtttttgactgattctaaataatatcttgaatttctataattatctaaattcaaataatcccttggttctcgtaaaacactatcgtgtccagttaaaactactatgtccggttttatttctttaactaagtctactattacctctggttgatctttttccgctatagctctccccactgcatctaaagataattgcttatatacctttaaacaagtctccatgtactcactatccccatctacatggagaatctttcctggtcttccaaacatcaattcattcttcgtctttatcttaggagatttttcaactttatccctaagatcacctcgtagtatcatagctttctttatggcctcattaactcttgtatttaatattttatcttgagatccagtgtcctcttctgccatttcaagatcatccaaacttgcatctgctattattcttatattaattccttttagaattatattatactttccgccactatctttaatatcaattattttaaaagtaatatctttattataagattttctaacaactatatctcctatttccattactttctcctaatacattctttcacattataatatggtaaagattattaaaggtttctaaattaatataagaatgattttattctatctaggcaagaacaaaataaatgaactatcgaaataattttttaattatttcggtagttcatattattatgtttattatatcttatattcattcttgaatttttctaaaaattctaggtatttctcttgctcatgtattattgattctaacttacctgcaaatgtattttgcccccaattaacttcattataataatatctatttgcaagcctccaatatctttgtgggaattgaagatatgcatataataccttatattcctctggttttaattttgatactgaatcataggattctataatagctgtcgcaaattctaaattccactcaactctctttagcacctttatcataaaattgcttatatcaaaagttctaacttctcttttacagtaatcaaaatctataacatgtacatccatactatcgcttaaaattatattatgataagtaaaatcatgatggcaaaaacttttttcattctcagcaattgcacataactcatagtaatctgactcatttaaagtcactaaggatttctttccaatctctttataaaactccatagattttaaataaagcatgtcaaaatcactttttatactttttttccttaccatatctctcattttatctaaagatttaattcttttttctattaaatgaggccatctgccaagatcacttttgagcttagaattctcaggtggatcatagcccttagatgcttcatggagattagctaaagtctttgctgctatttttacttcatctatgttatggaagtcacattcccttccttctaaccattcagacaaagtatataagtcttcattaaccaatgcataaggctctccatttatgtttaaatagtatttatctaaattattaaaaccattttttcttaagtgctctttagcaccatacacgaacaacaacttttggggtccataatttatttttttcaaacatctctcgcctttatctgttttaagatagtatacgcctttatttgcctttattttttctatctttatattgaattgtctttcaatttcaaattccctcatcatacttctcacctcctgtatatttatatgaggatatcatttcttttattaacattttttatattcttttaatataatacattaagacaaatgctatgaaagggtttaataatgaaaataggaatagatggtagagctgcaaagtggtatcgaggcacgggtataggtacctatacttatcagttaatatctagcctcaacaatgttgatagtaacaataactatttaattttcacaccacaatgtgactttataagcgatttaaagaataattttaaaacagaacttattgaatcaataccttctaatagtttttgggatgatataaatgttcccaatatattaaataatgcagacatagagctttaccatgtcccacaaaacggggttggtctatcagaaaatgttgaatgcaaaaaagttattactctacatgatataattcctttaagaatgcctgaaactgttagtgatagatatttaaaaatatttaataatgaactgcctaaaattttagataattgtgatggaataattactgtatctaattactctaaggatgatattgctaaggaatttaactttcctgctgaaaagatttatgttaccccattagctgctgaagatatttacagacctatgagtaaatgtaaatctaaagactttattaccgagaaatatgggataaaggaagacttcgtactttacgttggaggatttagtccaagaaagaatattataggactaatagaagcttattctaaactcccaaataaattaaaagaaagtttcaaactagttataattggtcgtaagggtccttcttatactaaatacaaaaatagagctgatgatctaaatatatctaacaacgttatttttactgattttattcccattgaggatatgccattattctacaatgctgctgaggtccttgtatacccttctttttatgaaggatttggacttcctcctatagaggctatggcatgtggtactcctgtaatagcttctaatgttacgtcattacctgaagtatgtcatgaatcagcgctttttatagatcctaatgatattgattcactatcttatgacatagaaagagttttaagtaatagcctattaaggttaacaatggtcaaaaaaagcctaacacgaagtaaaaacttttcttggaataaaacagccctagatacaatatccgcctatgaagctataataaattcatagaataatacactaactatataaaataaaatttatattttttatataactagtaaaattccttcatagtttttgtaattagctaccttataagtaatttatattacaacagtttcaattaaacattaaatatctgtataaaggcaagaaaatcataagagattttcttgcctttataaattctcaatatttcttaactaataagaaaccaatattccattttcaaaataaaatattggcttaatcattattataaataggtgaattataagttagatttatattattctttacattcaaataaattaatcttatatttaaattacttctttacttcagaacctatgaaaaatttattttctaaaacctttaaaaattcatatctaaaatcctcattgctaaactttccttcaaatctgcttaaatatacttcatattcccaattctttctcttatgataataatctcttgatattgtataaaaatctttagggaactttataagtatatacaagagttctttttcttctttttttaaaatggacacattctcatatccattaatacaagttgacatcttatccacatcgaatgcggcattctttatacactttaaaataaaattccatatatccattactcttaaatctatagtcataaaatcaaaatctattatatttatttcattatttttggttaagaaattatgataagctaaatcattatgacacaaacgaatagtatctccatcctgccttaggttatcatatgagcttttttcaaggtcattttgaacctctttaatttcatttaaatacttatctacattgtttacaaataatttatcaaattcatttttatatttgtacgtatctactaagctcttcatccaaattaaatcatcatatgcttctttaattttatctttcaaagatatatctagaaaatcttttttgtatttatccttcaaatattctcttaatccttttgaagctttatgcattaaagctatattttctgcacaaagatcaatttctactggattagaaaatgatgcttctcttccattcaatatatccataacaatataaatttgtccattccactctttataacatgaatcatctttgaaccttttatatgttattacatgttcataactcttttttacatagtctaaagaatcacttattaaattgactctatctacatcataatttactcttttcaatattttatttccttcatctgtatataccaaaaatacttttctaagtggaacaatgtcgtttacttttattcctagttcttcgaagaactttaggctcaaatcataatcgcataaataatttttttctgaatacttagttctattcatattcttcctcctaacaactaagctttaggtataaacaataactacctttggttacctatatgataaaatttttactttcatactttaaacttttcttcaatccatttaataattgttcgtcattccttgctttcctactacccttacattcctcattttgtatattataaatttcccttgtattatcctttctactatctctatacctctcccaaaactttaaaaaatcctttggataactgcaaagccctcttaaataatcaaagctgttaaatgataggtgtgatccatgtacaaataactttattagttcttcctcatctatattaatttcctttctttgtagtttcttaatataattatataagtcttcttctactaagttatatgtcataccttttattgtacacacttctattttttcattattttttcttaaattacttttatcaactttaccaaggcagatttcttctctattcatactacgtcttataactccaaagtagtcatgttcataaatataatttatagccttattagctttttccaacattatttttccgtttgataatatgatattctctatctcatttgtacatgttttactagatacatatgaataattcttttgtagttttcttatctgcactttataagattccacttctctgcctattgtgcttttaattttgcttagccctgttagattaccgcctaatagcaatttatgaaattctataattaaatcaacttgagaaactatatcatttctttgcatatttttatcataactaaaaccttgtcccataatagctattccttttttatttaaatacttattaatcaataattcatccatattaatttcccccactaaaataactatcaataaacttttctctaaattcacaatcatttaagtacttctctaacttattgatgaaaaattcttctccccatggttgctgttcccaataaacctgcaaccctatttgccagaaagcctgaggaaatcttataaattctctaattataggtagctcttcttttcttatttctattctctcactataggcatttaaaattagattacatttgtcgctttcccattttccatctttcattgatcttattaataaagaagatacgtcgtgtagatgtgaatctaatatgcagtaatcaaaatctataatattaatatttttcttattatctattaatatattatgatgagcatagtcatggtggcaaaatccccttgaaagaacttccttttccataacctttacataattatttttttgaagacctactatactcttttctgctctatttaattctttttccatattgtccaaatacaataaatcaaaatttgatttatatgctttttgacttattctatttttaaaatccagtatttctcttctccttgtctcaaaaacatctatccatgaaaaccatccaatccttggtttcatctctttcttcaatgtaaatcctttgctgcattcatgtaattttgcaagctcatttgataccattgataattctattggattatcataattacttactctcgatggaatccattttgttaagtacgcatactttccgtttatgttaccatattcttttttttctctattcataataaattcaggaatatccccaaatccatttctttgtaaatgcttcattgcagataagataaaataaaaatgagagaattcatatttaactactttcaaacaatatctctcatcctttgtaataactttataactatttttaactttttcaatatcttctacatctaaattataattttcttcaatatagcctttaattttaagtatctccttattattctccataaacttttcctaccagctattatttatttttattatatgtgctcaaataatttattgtgatttatattcacaaaaattaaaaactaataatattctgtattatatatgtaatttgttgaggtgttcatatgaaaattgccattgatgctcgtagttccacgttacatcaaggaactggaattggtacttatactagtaatctcatatcagagattctttctttagattcgaatgatgaattcactctattttgctctggaaaatttaacaaagaattcaataaggaaaatgttaatataatttattcttcaggtagacatggcggtttttatgaaagatattatatacctaatgcacttaacaaggtccatgctgacctatatcatattcctcaaaacggaataggactcgattttgatacaaaaataccaactatagttacaatccatgatctaatcccatatataatgcctgaaactgttggcaaaggatacctagaacgatttttaaataatatgccaaatataatttctaattcacgcggcattctaacagtttctgaatactctaaaagagatatattgaaattctttagtttttatcctgaagaaaaaatatttgtaactccacttgccgctaataataattttaaacctttggataagaatcaatgtaagctatacgtaaaaaacacatttaaagttgatgatccttatatattatatataggtgggtttagtttaaggaaaaatgccttaggattaattaaatcattttgtaaagtttataaagacttgaataagccttataagttattgcttgggggccctttaaaagatgaaggtgaaaagttactttcatttgttcaagaaaataacttacaagacaaagttgttttttgtggatatatagaagatgatattcttcctgttctttatagcgggtgtgatgcatttgtatacccttccttctatgaaggatttggccttcctccgcttgaagcaatgagctgtaaggcaccagttataacatcttctataacttctattccagaagtaactggtgatagtgctattttgataaatccttataatatagaagaattagacaatgccttagttgatcttttgaataatgaaactttaaaagctgagcttagtgaaaagggatatctaagaagcctcaactttacttggaataagactgccaagaataccttaaatgcctatagaagtttaatatcttagacttttataattatttaaatctttagtaataaattaaatgtgaattcagagtgatatttcaaatactatttaaaataaattcagcattataagaaacacattactgtttttcttataatgctgataatctaaaactatttatataaattctcattattaattggtatttgctcgaatctcttgctttatctttatatattcatcgtaattacttatgattggagttttttcttctatattacttaatactacaagaggactttttccagtaaaattttttactggctcctcaatatctttagtattataagtatataaatagcttgagaaaaactttccttccttaacatatttaacagcttccttgttgttcgttattacgtaagttataaatttttcaattagcttatcattctcgctgttttggtttaatattaataaattatctccttctgatgaaaaaaacttattagcccctggtttaaggctaggcacgttattaacgctccacgtacaaggaacatctaatgctgctatttctttcattgcattaatagacgatattcttgctaagaattctcctccattttgtaaatttaaaatattattatcctctagttttttcatcatagcttgaacttctgatttaactacatctgtgcttttatcaccatcacttaatgtttccatggttaatagatccatcaaatcttcgtaatcttgatcagttgcattaattataaatatttttccgttacttttttcatgaatatcttttccaatccttataatatcatcccatgtattcagactatctctttcatatccgtaactttttaataaatcttctctgacatagaaagctaatggcctagatgttaaaggtattcctatggaactatcaccatatttaacctgagccaccctatacttagaaaaattcttagcatattcgctcaagagcttatcatccttgttataatactcatagttatccaattttagtttatcaaaactaaacctatctatctgcgctatactagaaatctttgatttcgtacttccttctgaattattattaactatctgattgtaattttctaacttctttacacttattgaagtcctatcattctccttcataaaattattggcgcactcaactaagtactcataagaattctcatttactaagagctctatatttcctctaacttgttgctctttattcggttgaaatagattaatgcttactattccaattaacaaaagaaccgaaaatacaatagcatatttaattttatttttcatatttatatacctctatttaatagaacttattttttcatgcacttctattaattcaaccgctaaatccttcaaaaccattgtagtcattaagtgatcttgagcgtgaactaaaagcaaggagaattctattttctcatttacagcttctccctgaattaaacttgtttgagaattatgtgcatatcctaattcctcatcagcttttattattaacccttttgctttatcaaaatttccttgtttagctaaagtaattgcttccatagaaaaagttcgtgcttccccgctgtgcattattatatttaatattatttcctccataaattatccccttctccatttagatatcaaaaaactattaaattaagataccttacccttataatctttaattttactacttttccttaaagttttaaagaatattattttgatgcaataaaaactagaattgataacattaaatttatcaattctagttttaacactcaaatatatttaatttctatttagaaggattttaattagatttttcttctaatacaactgacaaatcaatagttttcttatctctaattacttctatcttcatagtatccccagcattcttactttcctttattgtcttaagttcatcgaatgtcttagcttcttttccgtcgcatttaacaattatatctccaatcttaagaccacctttttcagccggtgaatactcttcaacagaagatacatatattccttctaccaaatcgtatttcttagcagtagcgctgtcaatttctcttatctgaattcctagatttaatataggttttgataaagcatctatcttattcttaacttcatttataggtattgcaaaccctataccttcaactggtgttgatgatcccgatgcatcagaacctatcttcatagaatttattcctataacttgccctttagcattcactaatggacctccactatttccaggattaatagctgcatctgtttgaatgaaatctacactttttccactatcatctattgttctattgcttccacttataactccctttgtaagtgtctgagcaaaattctttgagagaggtgttccaattgctataacctcagctcctggatatacttcatcagagtctccaagttctgcaacagcaggaactttagttccatcttttaatttaagcattgcaacatctctatcttgatcataatttactactgttgcacttacttcagtattattacttaaagttactgtaatttctttagcatttgcaattacgtgatagttagttagtatatatccttcttcatttataatgaaccctgatcccatcccctcaacttcgccgttcataaatccactgttagatgaacctttcgtcgaaacaatgacaactgctggcgcaactttattaaatgcatctgccgctgacattgcatcaggagtgcttgatgtgaatgattgcggaatataacttgttatttgtttagttgcagcaacattattagttttcatgaatgaataagtagcagcacttccaattgcccctcctaccattgtaagaactaaaattcctgcaatccttcctagcatgcgcagacctcttcttttctttctcttcggatctacataattattactattttgaaaacaattttcccatgcaacttgctgacctttatctactggtaatgactctacatcaataaatttttcgttattatcattattattcatgtatttttcctcctatatatcaattctcaacttatatgactagtaattaaactatacaaattcgttcttataaagtatattagaatactttaaatatctactagtattatctttatagtgttagtatagatttattatgtgtcaaacaaatgacaagaatatataatttgatataattttttatgaattttagcccaatagaagctttatttcttaattattcaataatacttaatatttaataaaatatacatatttattagcatcaagattttttagctgccttcttagcatcttttaatacactattaacgccggtaactactgagtcaggatctaatacagacattggagatccctctatttcctctttatatatagttgttactgttgtattaccaatctttttaacaggatcatcttcattattagttattaaatataatggcttatttcctagtagttcattagtttgactattcgaaatgcctttatataaattttctagttcgtttgaaactgcctgtttataatttttcttattttcaaaactctgaaattcatctaattcattctgatttaaatacttcttaaacgtatcattttccatagttaaccctgctttatttagcaatgcagtcaaactaaaattcgtacccattttctcaaatatacttctataatatttggacttaatactattcttaaattccttagtttgaatattttcctctgatattgggttaattaacacaactcctgctactgaatctgaatataaattggcaaaattactaagaaccagactaccgtactcctctccaactaaaacgtatggctctggtgctccagcttttctaagcaatgctttcaaatccttagcctgctcttctggcgttctattatccccgccatcattaaatccatatccttctctattatatgtaaaggtagatatcttcttctcctctaatgacttacaaacatcatcccactcatacattgtagttccaattgatccatcaaatactacagtataatctccaccagtcttaagcttatactccattttacgtccatctattctgacatacttaaatctagattttaatcttgtattatctacaaagtcatttaaaatttgcactaaaaaaccaaagataaataatcccacaaaaaagataacacatttttttaaaatgctccttttgctggttttatctttctcaaccttatgtactccattagaatgtgataacagcttcatacctagactctacctctcccctagttttaagttaggttttgcatttatatttaaatctgatactgctccctcttgatagttgaaatatgctgcacttcctatcattgctgcattatctgtacacaatataggtgatgggaatagaatttcaatccctttttttctaccttcctctagcaaagtttctcttaaacaagaattcgatgcaacaccacctgccactgcaatcttttttattccttttctttcacaggttaagaatagattggtctttaatacatctattatcgcattttgaaatgacgctgcaatatcagctttatttatctcttcttctttcatttttgccttatttaaataattcaacacagctgatttaactccactaaaagaaaaatctaatgtatcatcctgaaacttagctcttggaaattctattgcatccttatttcctttcttagctagcttatctattttgggtccgcccggatatccaagttctaatgctcttgccaccttatcataagcttctcctgccgcatcatctcttgtttggccaataacctcaaaatccctatatccttttacatgcacaataaaagtatgtcctcctgaaaccactagtgagacaaaaggtggctttaaatctttatgctcaataaaattagcactaatatgtccttgtatatgattaaccccaattaaaggctttttagaacctaatgccaatccttttgcgtattgaagcccaaccaaaagtgccccaacaagtcctggtccatacgtaactcctattgcgtcaacatcatctattgaaattcctgcttctaataatgcggcttttacaacactatctactgcctcaatatgcattctcgatgcaacctctggaaccactcctccaaattttttatgagtatcaatttgtgaagcaattatatttgataaaacttctctaccattcacaactactgcagcagcagtttcatcacaacttgattctattgctaaaattatttttttattcatatctaatacctctttttattacaattcaaataaaattatttattctgatctatctaaataagctgattaagcctatttataacttaattttaactaatctaacaagagaaaactttgatatattagttaaaattaagaactagataaattaaatactttactataacattatttaatttatctaaatctattttatcttaaaaaaaagataaaatctcgtatttatatattgtttaatatcttcttaatatttatgaaatcatatcttttcaatgcgcaaactattctatattttaattactaaaatattatactttatctatacaatattatcaaagttcaatttttctagttatacaaatgcacttaacatatatcttattctcacaatttcattgtaatattaacttgttgtataaaaggtacatatgatgtatatttgagataacaaatatactttcacgaggagaatttaaatgtctaactatgctaaagttataattaaaggatcacctattacaaaatccaattttaagttacacaatctaaatggacgtgcaatcctaccacatagctctggaaaatatcatgataggtatgctctatacgaacaggaaatagcacttcttgcaagaaatcaaaatcctgatgttgttttttctgaaagtctaatagctttactaagagtatattataaaagtgaaaagcgtcatccagataccattaatattacaaaaagtatatttgatggcattgaaaaaagtggattaattataaatgatgctcagataaccaaaatctttacagaagaatattatgataaagagaatccaagatttgaactagaactctttgctgaaagtgaatatgattttagctataaagttatcaaaagaactacttccttaaaacctaaattatattctccaataagaaaaaatatactatctgataaaactagtagttctgcaactgattatcaaaaagataaacttgattgcaatgctgaaaataaacgtgataaaaaatcaaaaaaaaactcgtctaactcattaatgtctagcgaaatgattatatgtaacatctgcaataaagccattatttcagatgattatgtaaaagccgattcaggaaaaacattaatatgtaaaaggtgctttaacaaactattctaattacataaaaggagtctatatatgaataataagcttgatatcattttctttggagacagcctaactttaggatatggggtaactaaacaaaattcttgggtttacaaacttacgcaagaacgctccctttcatcattaaataaagcctgtaatggtgatactaccacttcaatgcttactcgctataatgatgatgttttaatttattctccatcgaaaatttttataatgggaggtagcaatgatcttcttctaggacgcaaaattccttttataattagtaatattggaataatgattaatgatggactaaatataggctcaaaagtgactttaggaattccccctaagattattggccaaatggcaaattcgcttttttctccttcgcatctatattcttatgcagaaaaagaacttcaatatttaaaggatgaactcattaaattatctaataaatacaatcttcaatttatcaatttctacgatttgacatttaatagggatgatatttatttagatggaattcacatgaattcacttggccatcacctaatgtatgaaaatgctctcaattatttttaaaccatattattctgtgaactaattagcagtaattttagcttttattatattactgctaatatatctctacctaacttctacatgctttcctttacaaatctagccgcaataattccacattgtataccatcagtttcttccatccaaaacgcattttctccgtatataacatttccacaagcaaaaaaaccctctaaagatgttgcaaagtctactacttcaaatccagatgtcttagaatttatatcaaaacttgtttttttaattacggttgtttctggcaagaaattaactgataatagaagtgaatcacattccttttctattatttcttcattctctaaattaactatttttagcttctcaattcgcgttttcccttcaatttctgttactctagaattctctattactggtatatcaaagccatcaacaatatctcgtatttccgaattagccatttcttcaaatgtattctcaatgacaaccgcttctatatttccaccttctactataagccttcttgcaactatgaatccccatttatttttcgctataatcacagtccttcttcctggtagatatccatctaaattaattattttatgagcctctcctacagtgaatattcctgtaagtccattggtaggaattataacatttcctgaatatgtttcttttgctcccatagcaaatattatcgcttgagcggttaaatctttaataccatctctagaatttacatatgtaactttttttccttcagttacttctaaaactgtagtatctaaaagtatttctatttcaaattctcctaactgcctttctataaaatcaatatactctgggccggtcactggatcatctagaaagttttttccaaaaccattatgaacacattgattgattattcccccaacgttagactccttttcaataattagtatttttgttattccctctcttgcagctccaagtgcagctgtcattcccgctattcctgccccaataataattaattcataatctggcattataatatcctccaccattaattcctaaagctttattaatttctttgctttcttcattgcaactaccatatcatacatgcttgctatttctccaaaagttatttgttctgttaatttataataatccaaggatgtatcacttattaaaagtttaacgccctttttatataacattcttatatcttctatagccttagaatcccttttaaacaacttaacccctgaatttaagaataaaatttcttttggaagtttatcatactcatttaatgcttcgaaatattcactcattaaagttattcctaaatcatcatttccctcaccaattttatctcttgttattaatatagaaaaaatttcttcctcatcttctgattctaggcatcctctcttttccatctttattaaaaatctatttttttcatcctctatatctattttatatcctttatgcgctgcataccttataacatttgaccgccctaattcattgtttactactacaacagcttccccttctccaattgaattaaaatacttcttaacttctcttattatttgtagatatgataatcctctgcaatctatttctttcatatgtttgacccctttataattattttaatctataattaatatatcaaatttttcaatcgatttcttaactaatatataacttaatttaaaaatatattaaattaagttattataagtctattatataagttttcccacattaatagtataccatgctaatttttatatatagttttttattcacaaattatttaccttttaattactaatatatcattaatttatatttgtttaatccataaatttatgtatactataatgtagtgatatattgaattgaggtgaaatcatgagttcttctaactcatatgttgttaatttttttaaaaatagcttagaaaataatataaaaaaagataaggttataagattaattttctttctaatagctcttgtctctatagtattaaaagggattatatttcaaggatttgttacgagcaaagatccatatacatttagtttttctactggctatgaatctgctagttctttcttaaattattatgtggcctttactttaatattcttaagtttctcattattatttaaaggtaaaggtagaataatctatactctagtaatcgatttttctttaacactattaatattaattgatgtatggtattttagaggttttttaactgttccatctgcgttaatattaactcaaactgctaatttagataatatgtctggaagtatattatcaatgaccagcaatttagattttatatttgtatttgattttataatactaggtatatatgcttacataactagaaaatcatttactcaagtacataaacgagcatttaaaacattcttttgtacttttgttttgccaatattatttataatttatgtacctatcagtataactgtattcaataatacagatgttcataatgcttacttattcagtaattatgataagtcaaatactgccaaatacttttctcctattggatatcatattatggattgttatacagtttataaagattctaaaccatataaattaacagatcaagataaagcttatataaatgagttatttgaaataaaaaaagagaaccttccagataacgagtaccttggcatggcaaaaggaaaaaatttaatttatattcaagttgagtctttagaaaactttgttatcggaaaaacagttaatggaaaagaaataacacctaatttgaataaattagtacaaaaatcattgtacttccctaatacctttgagcaagtaaacgaagggacaagctccgatgctgatttaatggttaatacttcaatgttgcctttaagacaaggaagtacattctttagatatccaaatactaattataattccttaccaaatttattagaaggtgaaggctatgctacttctgctattcatcctgataaaggttctttttggaattataaaaatggattgcttggaataggctttgataaatttactgattactactcatttaatgttgatgaacaaattggccttggtataagtgacaaaagatacttcgagcaagttgttcctatgttaaaagaattaaagcagccattctacgctgaaactgtaacattgacaagccatggtccatttgatcttccagaaaagtacagagaacttggacttgatcctgaattaaatgaaagtaaacttggtgggtattttgaaagtcttcactatacagataaacaaataggttattttattgatcaattagataaagaaggattacttaaaaatagcattatagcaataatgggtgaccatacaggaattcataaatattatgacgatagcattgggcaactatctcataaagaagattggtatctaaatacaggaaatccgactgttccatttattatctataatccatctacaaatgaaggaaaaacatttgataaaatgtataatggcgaggttgatgtaatgccaacactcttatatttacttggagtcgataaagataagtatgagaacactgctttaggtagaaacttattaaatacaaataaatcttttgccgtaataactaatggaacacttaaaggtggggaaaacttaacagataaagaaaaagatatttataaaaaatcattagatctttcggataaaatgatacgtgcaaattatgctcataattctaattagataatgatattttaactatagtaaagagatggtcaaataaaattcgaccatctcttttattttttcttaattttttttatctcttcttttaatctatctagtgaatgttgatacttcaaagactttatatttggaaatgctttaattattcgtttattcacggccttattgtttaaaaccaaattttctaatttaaattttagcttgctaatttgttctttcgcatgaataactttttcactttcctgttctatcaagccatcaaatctgcttaaattttgttgtaggaccactttatagctttcagttttttctcttatctcatcaaataaagcgctcatttctttgagttttccacctaatttcaaaactttaactgttgtagttatcccatctgttaataaatataagagtgaaatattacaaatccacatagaaacctttagtgatatgtgactaactaagtctattataattggattaacaacttttattgtgattagagataaaagaccaaataacactgaatttaatagacatactctgccctttatattaaatttatagcctgaataatcccaccatttaagattaaatattgtttctagcaaaaaacctgttaaatactctaatatgcttgtaaaaatcattgcactcaagaataaaattataatattatctgaaaatggagccagcaatataattactataagtgcacctgatccatagatagggcaaaatggtccttttaaaaaacctctatttacatactccatatcgattatagagcaatatatagtttcacatatccatccaagaaagctataaattataaaagaaaaaagataaatatagattatattcataactatttaacctaccttagcatatctatcaaattaataacaaaattattttccagctattgaaagttctttcacaacaactgacggacatcctatgctactcatcgggaactttaagtcacttcctacttcctctatatctttcagtaatgtaaagaaatttcctgcaactgtaatttgttctaccggaaagctcttctttccattttcaatcataaatcctttagctgctaaagaaaaatctccagttacagcactagctccagagtgaaggcctgcaaaatctgtaattattacaccttctttaacttcattgcaaagttcttcaaaagatttattacctggatttatataaaaatttgtggcactaacacctactattgatgcatacgaagccttgaatccatttcctgtagatttaattcctgccttatgcgcagtttttatattatataataatgtattcaattttcctttagatattatctcttttttgatagttgctactccttcatcatcaaatgaagttgttccaagcccatcctttaagtgaggatcatcaattagagtcactacatctgatgctataatttccccttcttttcctttcagcaaagataaccctttttgtgcttgctctgcattaaaaattcctgaaaaagttccaagcagtgataccatggcctcgttatttataattatcttatatttgcctgacggaatactttttccaccaattcttgaaagcgcttcttcaagaccttgcttagctaaactttctggatttatgtcatctatctttttagccataacatatcctgttccatcatacttttcactattatcttgtattattggaacgacatatgcacttagattattcctttcatttttcaaattaagtccctttgaatttattattccataagtagctttaccatatccaattccacaaccttggaaacttacaactttatcacattgttttttacattccttttctatttctaaagaaagagctataagctcatcaggcttaatattatccaaatcttttttgtaacagtctaattctttatattccttatccccttcatatataaactgttcatcatcattttctatagcaaatgccgcttcctttgcatttcttataagagtttttattgcttcttcatctaatatttcagtatatgaatatcccattttgttattgatttttcctctgaacgaaagaccaaaggcattatttagtttatatttttcaacttcgccttcataaatacttaaacttaaactttcagcatcagaataatatatttcaaactcttcaaagcctgaattcttagcttctttaaataattcttctttaaataattcaaaatccatatttatctacctccaacagtcattttctttactctaatcataggctgacctacgttggtaggaatacttcctgatgatgagccacacataccttgagctacatctaaattatttccgaccatatctatatccataagtacttcactacctttaccaataagacttgctcctcttaccggctcctgaatcacaccatttttaactaagtacccttcttgaactgcaaaattaaactcaccagttacagggttaaccgatccgcctcctagcttctttgcatataatccttcttctatagatttaatgatatcatccggattatcatttccagctgctatataggtattagtcattcttgaagttggttggaacttgtaactttgtcttcttgaacttcctgtagcctccatattcatacgtcttccatttaacttatcaatcatataaccttttagaacaccattttcaattaaaatatttttttgtgtcttattaccctcatcatctatatttagcgatccccaagcattaggtacagttccatcatctatagctgttacctttattgatgcgattttctcacctaatttattagcaaagactgaatttcctttagctacagcactggcttctaaagagtgtccacaagcttcgtggaatataacacccccaaacccattatctatagcaacagtcatattacctgctggacagttctttgcataaagcatcgtatgagctattctcgctgcttcctttccgtgatattctggatcaacactatcaaacatttcaattcccatatgtcttccaggtccttcaaatccagtttggttttcgcttccttttgatgctattgcacttatgcctaaccttgttcttattcttgtatcttgaacatataaaccttcagtgttcgcgattaaaatattttgctctttatctgcataactcgtaataacttgagaaatatcactgttataattctttgctgcattatacgcactttttaaaattgctatttttctatcgtatgcaacatccttaggataatacaatattggatgtattgtagatatactcttctcagtcaatactattgaatttatttcatttttatttacatcacctaaggctaaagctgctctataggcagtgtctaaaagaccacttaagctattattatttgtataagcatatacactgttcaatcccttgaatattcttattcctataccataacttcttccacctatggcatcatctactttgccgtcaattaatgctatagaattattaattgaattttcttcaaatatctcagcaaaatcgccaccagttactaagcactttgctaatacctctgctacaatattttttgataacatcttattcctccttattcctaatataaagataattttcagtaatattataattatatacattctattattaagattattgttataaattataaccttagtgcttccatgtatgcaaatctaattatatattaatagtttatcattaattattcctatttcaattaattgataaaaataatatttgtaccaattatataaaaaaactatgtcatttttatttattttaatttatgtaaccaaagtttagctacataaattaaaataaatgaaaatcaacatagtcatattaggctatttcataattttaaattcatatccttgttgttttagatatttgattatttctggcaatgctcttgcagtttcctcttttccataagtatcatgcattaatattatcgctttttctcttcctgatacagtttttataacttcctgttttagctggtctgcatttttatgtgccccttctgcatcttgagacaatgaattccaatctatttgatgatagtctttttcatgaagagccttatccattgcatcagcccccgatgggtccttcttatcccatgtcatttgacctcctgggaatctaacagctcgtgtagaaaaatcctgtcctaaaatgtttttcaaagactgattagttttttcaaaatcagaaatacaattttctaaatttatttttccatttggatataaatatccataattatgtgaataagtatgattacctattgcatttccttctgcaaattctcttttaactatatttctattagtttcactttcatctattgcttttcccacaagaaaaaaagtagcatgaacattttctgctttaagagtatctaaaacttttggagtcacagtttctgatggaccatcatcaaatgttaaataaacaactttctttccatcagctccatcaggcatttgacccttcatctgctgatttaaatatttttctataaaagcaacatcctctacttctgaacttcccgctgaattatatacgttactatctgtctggtttttatctccttcagaatatggattttcatttgcattaagagcttctgctgtttgcttattcataacaaatttttgtagcgtaatagcgattcctataattatagctacacctattatcgtaagtaaaatagcaaattttcttttttttatacttttgaaatcttcttcaccaacttcatcgatctcaaatggccttatattatcactaatatcattggtctcagaattacctttattggttttagaattgtcatctatctcactattttcaatagattcatcagcttcttttgcttcattaacctcactggttccattactataattcatactattattaatgtcatcgctcatattataatacctcttatatttcaatagattttattattaattattccgtagtatctaatttaattattaataaatttcacatccatatatagtataagtttttactctattttatacaacaaaaaaaagccgatttctcgactaaaaattcttttattataaatatggctccgcgaagaggactcgaacctccaacctatcggttaacagccgagtgctccaccattgagctatcgcggaacgtcatttgaaagaatataatgttctttcaaaattgcatataattttaatgtatattacaacttgattatattggtcaagccctcgacctattagtatcagtcagctaaatatgttaccatacttacacctctgacctatcaaccttgtagtcttcaaggggtcttactagcttatgctatgggaaatctcatc

SEQ ID NO: 61 - DNA, 35867 bp, Clostridium beijerinckii
attcaggctaatataagaattaatgtaggttattctaattaatatagtaacaatatttattactaattaagtcacacaaaaatatactatatattgtaacaaaataaattacatttttatgtaatcattaatgtattaatttggaaatgtgctataatattaatagggattaacttttaaatttaaattatataattattgaaaaactcttataaaataaaaatataagagttttttgcatgtatattggtaaaactcacgatatcataaggtattctccacttttcgtttattaatatgttataatatgttaaagaatgttgcttgcttcacagctctaaggagggattattatggttataagctatgataagttatggaaacttttaattgataagaaaatgaataagaccgagcttaaagaaagtgctgggattacatataatattatagctcgtcttggtaaatgccagcctgtgaatttagagagtctatacaaaatctgcaaatgcttaaactgtaatatacaggatattatggagtttaaaatagaatcaagttaaacttgatttatgtggagtttgatctccatctgaatcttagttgaacttataaccacaaggatcacaatgtaccataagtgggtatatagtctagatttatgatacttttatctgaagctcaaagaatcgggagtgttacaatgtctagatattagataaattatatgtattcatattaaaaacacgggaatagggggatttagtttatgggaaagagagatttgtcagaagaagatattaaagcacaatatataacaccagcaatcgtagattctgggtgggatttaaagaaacaagtccgttttgaatacgcttttactgctggaagaataatacttcgtggtaatgtcacagctcgtggaaaacaaaaaagggctgattatgttcttttttataaaagtaattttcctttagcggtaattgaagctaaagataataatcatccagtaggcgcaggcttgcagcaggcaatagattatgcaaagtctttagatatttattatgtatatgcttcaaatggcgatggttttattgagcagaatttgataactggggaagtgcgcgagcttagtcttcatgaatttccatcaccagaagaattgtataaaagatatataaaagataaaaatttaaatgaagtggaagagaaggcagctctagaaccttattattatgtgcctaattataaaaaacctagatattatcagcgtatagcagttaatagaactgtagatgcagtagcaaatgggcaaaaccgagtattacttgtgtgtgccactggaactggtaagactttcatggcttttcaaattatatatagactttggaaggcaggcataaagaaaaaaatattatttttagcagataggaatgtattagtagatcaaactatctctggggactttaaaccatttggtggtaaaatgacaaaggtggagaagaaaactctagatagttcctatgaaatttatttagctctatatcaacagctttctggtgatgatggagaggaagcttatctacagtttaaaccaaacttttttgatttaattgttatagatgagtgccatagaggaagtgcaaaagaggattcagcatggagaaaaatcctggattatttttcatcagccactcatgtaggatgtactgctacacctattgaaacaacagaagcttcgagtcagacttattttggagaacctatttatgaatattcactaaaccaaggtattgaggatggctttttagcaccatataaagtaataagaataggacttgataaagaccttgaaggatatagaccagagagtggaaagcttgataagcatggctatgagatagaggatagagagtataatataaaggattatgatagaagccttgtaattgagcagagaacaaaggtaattgcagctaagattactgagtttttaaagaagacagacaggtttagtaaaaccatagtattttgcgtggatattgaacatgcagagaggatgaggcaggctcttattaatgagaacaaggatctatatgcagaaaacaacaaatacataatgcgtattacaggggataatgatgaaggtaaagcacaacttgaatattttatagatgaagaaagtacataccctgttatagctgttacaagcaagctcatgacaacaggtgttgacgctaaaatgtgcaagttaattgtactagataataatatcaatagtatgacagaattcaaacagattattggtagaggaacaagactccttgaggattatggcaagacttatttcacaataatggattttcgtaatgccagcagattatttgctgacccagaatttaatggtaatccagaagtagtaattgaattagatgaaaatgatccagtaattgaaccagatgctgataaagctcaggatacatatgaagaaggtgacaatccatatgcagatgaagcaagagaaacagatggagaatatcatactggcagcactgatggctttgatgatgaggataaacctaagaaatattacattggggatgtattggtaaaagtgctttcagaaagagttcagtatgttgataaggatggtaaattaataactgaaagtcttattgattatacaaagaaaaatatcataaaacaatatgcaaatttagatgattttcttaagaagtggacagaatcagcgaaaaagcaagcaattattgatgagttaaaagaagaaggcgttatattggaagcaataaaagaggaaactcaacaaactgatttagatgactttgatttaatctgccacttagcttatgacaaaatgccgctaactaaagctgagagggcaaacaatgttaaaaagaggcattatttatacaaatactctgacatggcaaaacaagtcctagaagctttgcttgataaatatgcaagtgacggtatcaaggaaattgaagaaacaaaagtacttgagcttaaagaatttacgaagtttggcagccctatgaagatagtcaaagcctttggtggaaaaggagcttatcaaaaggcagttcgtgaattagaaaatgaaatttattatgcatagaattatataattatgagataaaattattatgtatgtattttgctatgattatgataaagataaggagaggtgaattagtatgtatgctaagaatatgcactacacagaagatgattttgaaaatattcaggcaaattataatggtaaagctgaatatagtaacggatatattgtattatcatctaatacttccattgaacataataaaataatatcaagactaaattttaaattaatgatgtttcttgataaaagtaaatgcgatgtatatacagagtctattgaaataatttttaaaaataatgaagaagtgtacaaatataaaccagatgtatttgtaatgtgtgaagaatctactaggcaaggtgaaagtttcacatcagctccaaagattgtatttgaagttatttcaaaaagcactgcatcccatgactatataacaaagttagatgtttatcaaagatttggtgttcttgaatataatctagttgaacaagaaggctatatagtacaatattcattaataaataatcagtataaaataacaaatgtctttaaaaataatgatgattatataagcacagtttttccagatatgtctataaatctagaagatatattcaaggcataaattgtaaatgattgataaaaagccataggcttttcttaaaaaattaaaagaaagcctgtggctttcaatgataattgatcattgaaaactaaaatactaatgaaagcaggaaagaaaaatggcaataacaaattttgttaaaagaattcaagatgttatgagaaacgatgcagggatcaatggtgatgcccaaagaatagagcagattgtctggattctatttttaaaaatatatgatgcaaaggaagaagcatgggaattatatgatgataattacaaatcaattattccagatggcttaaagtggagagactgggctgtggatgaaaaagatggagaagcacttacaggcgataatctacttgattttgtaaacaataaactattcccggctctaaaaaatattgaaatagatgaagaaacaccaatgagtaaggttattgtaaaatatgcatttgaagatgctaataactatcaaaaagatggggtactccttagacaagtggtaaatatcattgatgaaattgattttacagaatatgaggaacgtcatgcttttggtacgatttatgaatcattcctaaaagatcttcaaagtgcaggaaatgcaggagaattttatacaccaagagcagtaacagattttatggtagaggttataaagccagttttaggtgaaaagataggagactttgcctgtggtaccggaggatttttagtttctgctttaaattctttagaaaagcaaattggaaattcccttgaaaatagagaaatatataataattccgtttatggagtggagaaaaaggcacttccacatattttatgtataaccaatatgctcttacacgatattgataatcctaatataatccatggaaatactctagaaacagattataaagaatatagaaaaatggaacaattcgatgtggtccttatgaatccaccttatgggggaaatgaaaaagacagtgtaaaggttaattttccaagtgatttaagaagctctgaaactgctgatttattcatgaatatcattatgtttagattaaagaaaaatggtagatgcggtatcatccttccagatggattcttatttggtacagataatgcaaaagtaaatatcaagaagaaattatttagtgagttcaatttacatacagttatcagactacctcatagtgtatttgctccatatacatcaattacaacaaatatactattttttgataacacacataaaacagaagaaacatggttttatagattagatatgccagaaggttataagaacttttcaaagacaaaaccaatgaagttagagcattttgaaccagcaataacttggtggaataacagagaagaaatagaagtagacggattcccaaaagcgaagaagtacacagttaaagagatagaagacttaaattataatatagatttatgtggcttaccacacgcagaagaactgattttagagccaatggagctcatacatcagtatcaagaaaaaagagcatcactaaatgctgaaatagaccatgtgctagagcagattacatctatgcttggaggtaatttgtagtatgaatgcacaggatttaaaaaacagcatattgcaattagccatccaaggaaagttagttgaacagagacaagaagaaggtaatgctaaagaattaataaaagagataaaagctgagaaggaaaggcttataaaagaaaagaagataaagaaggaaaaaccactggcagaaatagctgagagcgatataccttttgagattcccgagagttgggagtgggttagacttggagattgtgtttcgaataaatcaggagtatcctacaaaaaagataatcttaatcttatttctcaaagtatgactagaattttaagaggtggaaatatattagatttaacatataaatttaaaagcgacgatattatgttagataggtcatttgtgaagagtgaacttttattgaacaaaaatatgttgattacaccagcagtaaccagtttggagcacattgggaaaatggctagaatcgaacaagactacacagatgttgcagttggtggatttgtattaatgttaattcctcatataaatattgatgtgttttctgaatttcttctttttgcattaagttcgcaatatcatcgcaatttatgtcgaagtattactaataaatctgggcaggcattttataatttatcaagagaaaaattaatggcaatacttgtccctataccaccactagaagaacaaaagcgtatcgtggctaagatagaagagataatgccttatatagaaaaatacggcacagctcattctaaattagagatatttaataaaaagttcccagaggatatgcagaagtccattttgcaatacgccattcaaggaaagttagtggagcaaagagaggaagagggtactgccgaagaactttataagtatatacaagaagaaaaagaaaagcttataaaggaaaagaagattaaaagggaaaagccactccctgaaattactgaggatgaggtgccttttgagattccggagagttggaagtgggttaggttagacaatatttcatataaaataggtgatattgaccacaaaatgccgccagtagtagaaggtggatatccgtatatttcaccggtgaatttcactagtaacggtatagattatgataatgctaagacgataggaaaggaagattttgataacctatcaaaaaagattaagcctacaagaaatgatataatatttccgaggtacggtacaattggtgttgtaagaatggttgaaactgatagagaatttttagtttcttattcatgctgtacaattaaaaattttcaagaatatgttctttcacaatatattttttatgttctacaaagtggtttgataaaaagtgaaattaatagatatataaataaaacgacccaacctaatataggattagcatctataaagaggtttttaatcccacttccaccattagcagaacaaaaacgtatcgtagccaagatagaagaaatgctgcctcactgcaaacagttagtaaagtagattaataggttaagcaaacaattgaaggtgtatagagtgtcgcaagttaaatctccagcacttaaaaataaaagttattctgtagctatatatgtatcttaattcattacatatatagttacaataataataacaaaataaagtcacttaataagtaacgttttttgttacaaattttataacaatacttgtaactgaaatcacaatataagttttatttcacttggttttatgcataactagatatcttaataatatagatatctagttatctatttatctatatatattcttgttttaagcgtataatttgaataataaatatggaggattaatatacaatatctaagtgcagttaatttaatgtactataataagatttatatcagcctatacctttatgcttaggaattatttaagatgaaaataaaattattatacagcgatgagaattggaggaatctatgaaaaaatattttttatttcttgatgagtcaaaacctaatggaagtaacttaaagcatctttgtttaggtggagttataattgaggaagatacatataaaaaaactataataagagaaataaattctatgaaaaattcagtatttggtaatacagaagtaatattgcatgaatctgaactaagatctgctaaaggtgagtattcagaaatgaggaaagagaaaaaaagaactttcttttggaaggaattaaatagaatatttgtaacttataatataacaactataggagctgcaattgatgtagataaatatagatccttttatgaaacaaactctttaaatgatgaatacttcatagtattgcaggcagttttagaaaatttcatacattttctccaaaaaaacaatgcactaggctctgtatttattgagtctagaaatcataaagaagatactgacattagaaatacatattataaaatcatggcaaatggtaccttatatttaaatgcaaattcttttcaagataagcttttaaataatttaaactttgttataaaagaagacaacaacattggagtgcagcttgcagattttgttccaggaacattaaatagaaaatgcaatggtcttaatcctaaagaaccaaatatatatgaagttatagaatcaagtttatataatggaaagtgtaatttaaaagaaagatttggctttaaaataatgccttgataggacaagcttaatggagttaaaagttaaacaaaagtatagtaaatgtataacaaaacctttgacttggtatcgaaacaatactataataatactataacgtacttcaagaagtacgtcataaattaagttaattttgaagatcacgatagttttcttcactaatataatattttataagggaattacgatagttcttcgcttatagttttaaaaaaatctttaccgaatagctaagattttttttgttttggttattttaagttattttgggtcatactatttggtagaagagatttttaataaagatctctgacaacttaaaattttttgcatactatataagtatagaattacgatagttcttctatacatgtttattttatgattgaattatgaatattcttcaattataaatttttaaagaaaccttctctgtatagtcaaggtttctttttgttttttaatttagtatttctatgagtttattatctattatattaatttttgtgaactaaagagttaaatctaattagctaaaatggtaaggaagctaagatttatgtaatttaaaaactaaaacatgattgaatgaagggaaatatcaagatactttttaaattatgcagacagtgtctggacaatttaaggtaaacttatagattttagattatatctaactataaccttttgatagtggatatttttaagtaaaacgtatttatggtattttaaaaatctattaatattaatgattttttatgacctataaaaacaacaacaatatatgttttcttattattttacaaatagtttaaatcatttataaaacaataagtttttaaatataactttttgatagtgaaaattgatttaatataacctagatatgatgtgtttctaagtccaactataacttatttatggtacttatgatctaagtataacttattgatagtctgttgttgttttatatagttttatatatattgttttaatatgttttcggcatagttgaaagccttgatatatctatgtttcaatagctcaaatataaccttttgatagtcaagtataacttattgatagtgaaaattacttaaatataacctttcgatagtgaactgaactacagtatctaaatcaagtgatatcaatattttgcctagattttttataaaatattttaacttattgatacccaattacaaataagttatatttataatgcgaggtgataataaatgcttaatgagctaaaaagcatgatcaataattggatatatcaaagcaatagactgattgaagcatcttatacattaactgttatggaacagaaattaatcagactgctagcaagtatgattaaaaaagatgatgatgattttaaagagtataaatttaaaaccaaagaactaataaaaatattaaatacaagcgatagcagattttatagggatattgataatattacagattccattatgcaaagagttattaaaataaaagacataaatactggagagtttgaaaaatatcattgggtagatatatgtaaatataaagatggcattttaacattaaaggtaaacaaagaattaaagccattttatttaaatttagattggtacaccaaatatcaattaaaaaacataatgcagtttaaaagcacctactcatttagattatatgaactcctaaagcaatatgaaaagataggaatcagatcaattaccattgatgattttagatgtgtattagatattgatgataaacaataccctaaatatgcaaatttaaagcagaaagtaataagtgttgcagtcaatgaaataaattcaaagactgatttatatattgaatacgaagaagagaaagcatagatgatgatattaacattgtaaaaaatattattggagatataagctatagtgaagcttataaaatacttaatgctgctgactatgatattgaaaaggttaaggaaaaatataatatcataagtaaacttaaaaatttaaataatttagtaggcgccatgatgcaggcaataaaagatgattggacagtaactgaggttattaataataaattcaataattttgaagcaagaacttatgattataacgaattagaagtaaatctactcggttggaataaggaataatggatacattaaataacaaattatgttataaaataagttaaaaatgttgttacaaatttcataacaacatttttaacttattttataatgtatttgtgattttagatagttttatatatagctagatatcttattaatatagatatctagttatatatttatcttttaagcgtataaagagaataataaatatggaagttttaattatagtagagattaaattggaaatagaaaaataaatattaattattttctccatgttctaaagattccatatactcaatcaaatcactaacatttgtataaggattactttttacaatgttttcagcagtaatttttaagtaatcactttcagcatttggaagtgttttacctaagctttcatgatattgtttaagtttttttaatctagctatagcctcgttaagataaggctttagttgatcataaacatttttgtttttatcatagtttgcaatatgcttatctaatctttgtttcacatcatcataatcctttaaattagctgtagtgtactcaaagtgcataaggtaccatagctcaaaacaagggtttgatattccaagtcttatgtgatttttattagataatattttagccttttgtatttcatctattttactttgcactgcgttattattgttataatttatatcaacatcaaatacacaccaaactcgatctccatctttttcatttatatcgtaatctttattttgaatttcaatagctttttttactaagttttctggatcagtagctcttcctttatttttaccttttgaatttctgtctgcaattctaacatcaactttagtatatttagaattaaaattttctaaataaattgtttcagtatctttaccttcacatataataaggatcgtaggattctgttttcgcttttttctaagctgttccctggatttttcagcagttctttttaatcctcccatttccaatcaccctttaacactggaattgcaccatatttcccttgaaggtaacctttttctatacttatattttttcgtaatcctttaaagtcatataaggaataaagatcagtacttttatcttccttcttttcggtaaaccaaatttgatcacgtcttaaaagatctgaattaagtaggtttgtatcatgtgttgaaaatattaattgagcgtttttcttattcacatcaggatctaaaaacatttccatgagtttttttactaaaagtgtatgaagtctgatatcaagttcatcgattacaatagtatatccttttacgagtgcatcaatccatggacctaaaagaccaaagaatttttgagttccatctgattcttgattaaattcaaaaggacaattaataatatttccatctttatctttataattatgaatcatcttaatatctataaaatttgaatctttagcttcacttaatattttatctttgatttcggcaggtaagaagctaagtttttctgaacttaatgcatcctcagttttctgtatatctatagatacatcatctatcccaacatctgcaagttttatatacttcttaacaagtgaatcaaattttttatccttatgcatatttgatccagtgtatgcctccaaacgatcatgattaattaaaacctttaaatgattattaagccattcaaaaggagcttttgctttttcatattcccataaactttctatagcaataaataatttattttttgagttaaatttattttttaattcagattgacgttctacatcaattgtaaatgtatactcatctttatttctagtaaaaattgtactttgtctaccatttggatagtaatataaatattcttcaaaaacttcgtcctcggttacagaaaagccataaaggtattttatctctttatgaatgaaaataatttgaaattcactaggtttattatgaaaatcttcgtcaagcttgaaagtatcaattggtattttacgaccttgctgcatttcatgagaatgacttataaaccatctgaaaaaccgtaatgcttttaatacatttgtctttccagaagcattagcaccatatataacaactgattttaaagcatttttaattttctttccgtcttcatatggtaaaagattatcttcaaatgaagagtctttagatgctaccatacttaaagttacttcatcctttatagataagaaattttttaccgtaaattctaatatcatttcaatcctccatataacatttttataaatatattgtgcatatacgtatattataaccatgtttttgcaaaaaagatacaaaaataataaataaagttcattttactcgcgatttattttaaaaataatttgacaattcttaattcttgggttaatataacagtagaggtaaaacagcactaaaaagttctttaccttaactatttgcaaaatatattaaaaaatcgattgtaaatatcgatgtaaattatattgagcaaataaaaaaaggtagcgccaactaccttttaagagaaaacactgataggctttctcacactatatttaataaaatctaagcaaattgtaacacaaatatagtgaaacttcaactttctatcagagatttggaggtttatatatgatatcaattagaaaatattgtaaaaaaattgttccttcttagatatttgaaattttcagctaattaaaaacaataaaaattttaaaacaaggaaggagtagactgcttaagatcagtcacacaaagaatatgatacaatcaataaaaaacttagaaatattaactcaatcagtaactatagatattactgcattatcaagatatgagaatgcaaaaggtgatatcgcaagaataacatcaaatattagactagcaaatcctttaacagaagaaataaagtttgttttacctgattgtagtgaagttggacaagttaagttttacttgcctaatggtgaacaagcacaacaacaagactttgatccaacaagtatagaaaatgttgctcagcttgaatctttaatgaggcagtcattagataattttatagcagcaccaactgttgaaggtgtaaattcttctgttaagactatggaagaatatatggaattaaagaattctaaacaaataataacaattccagcaggtcagcagtactttacatttacttttagtaaatatataaacaaaaatcaaaacgaagaatttattttagaaacggctgttccttttaatggatttactataaatccaagtttaccatcatcacaagccaacattataatacttatgccattcgaaataggtcaagatataactaaagtaatagatgcaaactggactgcacctaattctcaagttcaacaattagacagaaaaattgaatctggacgagtaatgttatcaaaatattggcatggcgatccagctgtatatgtaagatataagtattagtttattctaaaagtgatttgcaaaattattatataaaattttgcaaatcatatataaaatttaattagttttatatattaattataatttggaggtactaaaaaatgaatagattgcgtaattacattaaatcgtttgataatatatcaagttcaagtaagcatgaggaatatattaacgttaaaagtgaaatcaaagatagatgtaaaaatgatagtagatatgaaaatgttgattttatagatttagaaattgaaagaatagaagaaaatatagaaactaaaaagtcaccatacttatctatattatatgctttttttgcgacgactctttcattactaattcctaatcttattaatttaaatacttttaacaaaggtcaaacggctactaaatcagatcagctttttaatgtattatttatattagtaatgatagtttatatagtagttgtttttatagtgtttattaacaaattaagaaaacaagaaggagaatttcaatgttatattgtatataaaaaggttctaaatgaattaaggcaagagattgaaaatagtaatgactaaaaaagtcacattaaatgtaacaaattccgttacatttaatgtgactttaattaaaatgtaatatacaaactttcgtcatatattaactccacaaatgtttgattatatatatttaggtaattattttcaactaaaattatttgatttaaaggttataaattatagctgttttagcgttaggattattaattaaaaaatcttttaaattattatccatggtagtctactccttattaataagcttttgaatttcatcacccaattgctttaaataatataaatttgactcatgagctgaaacatcagactcatcttccatggctttcttaatctttttttctaaatttcctatgctaactacatatgatggttttactaattcatcatctagttctaattcttgaaattttttaactaaatctataggtttattatcaaaattatataatattaattttcttaattcatcatttttattgtttatagctgattcatatagatttattaaaataaccttatatggagctttatataaatccatgcaatatataatcttatttataaatttctcttcttttaagctgttataataattataaacatttccaagcattatcatagcagcaaaatagtctgcttttctttcatttaaatctggatctattaagacattatgagaactttctgttaagctctcatcgtataataaatgataaacttcatgccaggctacaaagtattgatatactcttggctgtgcagtattgagtactggaattctcttattttcttttttataaatagccccaccccaaaatctatcttttattggcagttgtattaatcctttatcttttaaaatttgaaatgctagtttttcttccgcttttacagcattatttaaatttaaatcattgagcaagcggtctctataataaattatatcatctttaattcttaaatttttttctattacttgatctaaatttttgctggttataagctctgacatgaatttcacctactttttaataatataattcacataaatgtaaaatatcatctaatacattaaacatttctttggctttagggtcatgctcatgctcagttggagcattatctgaaaaaactgctacattttgagcgattttattttcattgtaattaattatttcttctaatgtgatattaacagtttctataattttagttatatgagttgtaaatgtagtcttgttatcagtttcgcctttaaataggttatttaaggttggtctgcttatacctgttactttagaaaatgataccttagtatgacctttagatttcattatttctagcaatttggaacctacagcttttctattatcaaataaattatctatagttatattacttgcaaaatttttcatgcaaacacctccttaaccttattatatgttaaaatgtaaaaaaaatatacagattgtaaaatttttttttacattatgctaaaagtggatagatattagcatgttgtaagattgattagtgttgcaaaaagaaaaacttaaattcatattttcaaacaaaaaaacaacagttgttttaatgtatttaatgtatttaatgtatttaatgtatttaggcaccatttgagcccagtaaacaagccatttttttgatgttaaaactactttttaaggatttaaaactaccttttaaggacgtaaaactactttttaaggacgtaaaactactttttaaggatttaaaactactttttaaggaaaaatttacgatagaaattcattaaaaactaccttttaagggcgtaaaactactttttaaggaaaaagatttatctataataaagattagtagattcaatcatatattttctattccttaggaatttatattccagtaaaatctgtggagatcttaaaaaaggctgattggatagtttgggtattttaaaatgaataaaaataaaatatatgtatacaatataattacattgtatttacaaaaaacatatattatcatataatgtatatatagaactaaaaggagtgatattatggctcaaacaacagttaatgttcgtatggatgaagaattaaaaaaacaagcagaagctctttttgccgattttggcatgaatatgacaactgcattcactatttttgccaaagcagttgtaagggagcgtaaaataccttttgaaatcactgcaagtgatccattttatagtgaaagtaatatggcaaatttgaaaaaatccataactcagcttaatgaaggaaagggtttagtagaagacattcttgaggtagataataaataaagtatggtctgatgaagctttggatgattatatttattggcagtcacaggatagaaagacattaaagagaattagtcaactaattaaagatattgaacgtaatgcgtctaaagctggtggatataaaattagatttgtaaccatcagctttttttttatgaaactttaaaccaaagtttcagttgaagaatatctaaaatttttatattaaaactactttttaaggatttaaaactacctgtttgaagattagtagttttaatgatattatttatttaataagacttaggcaaaagcaaaaaaataatagaccaatatgattatctattatttcctttcatgtgcctaaactggaggctcatatgaattctgatattagtatagttgatgaagagaaagcggaagatattagtgaggtactttttaagagtaatacgcttattaaaagtaatattaacatcactagcgtggaatataagatttttaataagattttatataaatgccaaattgagaaagaaaatgacagccagttaagagctgttttaacaattgatgagctaagcagcattgttaagaataaaaaagaaaatacagtgaaagcactaactgaaagcttagaaaagtttataaaaattcctatcagatttgaaaaacaaaaaagttatgtgattacaacacttattaacaaagttgtggtagataaagatactcttaaatttaattgttacttggataaagatctttatgaggttttaatggggtataaggagcttggatattcaccaattaatttaaagatgataagacaggcaaatggttattatactcaaaggttttatgagttatttagagtctggagcgggcataataaggaagttacgcatacaatagatcagcttaaagagtggcttatgattgaggaaggcacatcttatgacaggtattttaacttcaaaactaaagttgtagagccggcattaaaggaaataaaccaaaagttaaatatgaaagtgtcttataaagaaaataaagcaggaagatcagtaaaaagcttaacttttattgttgaagatttagagcctagaatatatgatttcagtaaagacaaggctataaataagcaaatttcaattgacgagttggctttagaattagatgatagctcttatgaagaatctttgttaaaagataaaaaggaaactttagatgctactgaatacttaaaaaaatcaggatttaccatagcagattcaacaatacatagacttaagttaaaatatggtgaggttctggtttatgatggggtatctataatgtgtaacaaatcaaaacaaggaaagataacagcaccagttaagtatttgacaggaatacttgaaaatttaaataataaatctttaaatgacgaagcagatgattctaaaaagctacggtttaataattttgaaccaaggcagtatgattatgatgatctggagagaaagctgcttggatgggataagtaaagattaaatccataaggaaatctattaaattaggtttccttttttggtgtttaagattaaatactatcattcataaagttttttgaaatttaagcatatttcccaagcagaatataataagggaactaacagaacagataagttaaaccttttagattcaataaattcaatcgttaatgaaataaaaaataaatttaattaaatttaggtttacaaaattcatagaaatattcttttagtaagtgtaaagcaaatgagttagctaacctcaaacagcttaataaaatttaattaattaaggagacgatattatgtcaaatacaaaaactgtatatacttttataccaaaatcagaatttgaagcaagatttggaactgtagctgaaattgatgcggttgtaaattctcataacgctactaaaataaacgcagttgtgtccctatttgctgctcttgtaaaaaagagtgttcctggagctttagctgttagtactatacaaggtgctgtagcagccgtatatgatgatttacaggcaactatagcaaagtataattctaagtaccctgattggtgcgtagtaatagaaacaactctaggctgttcaggttggggtactggtagtccaaattcttctggtggatatcttacttatgatagaatagtttcttctagtggttatgttgaagttggagaatattaaaattattttaaaagtttattttcaacataattaatatatataaaaaacaagattatagtatttatgactattctcttgtttttttatatttttattgtatttaacttgaatattacttaagccaactttcctattataagcctataaaccattgaaattactaggttttattcttttctgatcactataagataaattaaggattagaagagtttcgcagaaaagtttggctaatgtacgtaacaatctcaataataaaaaaggattttcatatactatgtttaattaatatatttataataataatcagtaatattaagagaaaggaccattgtatgtttgaatatattgatttcttattaaaatatttatttggagtattattccttatatttgctataatgggtattagctgttactttaatatatttacaaacattattaattttaaagttaataatgtgaaaaaaaaatatgttatccttaatgaaaaagaatatttacgaattgagggtatatataacataatggtaagcatattaagtttaattgattttttaacaattagttttaaagaaaattggatttttcctgttttattaacaactacagttatgataaatattttaatttacttctcaaaaaaatttgaaaaagaacttttggaaaataaggggtaatctattgtgtacctctttagccaatttatcttcatttcttatataaagaccattctagtatgcaaaacaatgtatataaattttattttcatattgctaattggaattatagacctttgattgtctgttgaaatataatagcaatttatcattaaaatttatataaaatcatatttctatattcaagcccacaaaccatttcctaacttttaaagaaattaagtataaattttaaaaaagctttatcatgaatattctcttatctgatcaacctttattctatgtgttttgagtaaatcctacagataaaatgcatgtacaaaataggaaaagattttcttgtcacattttataaagaatacggtatatgatgattatgacggattaatacaattgtgagatgcaatatcattgcccaatggtgcttgcataatggattgaacgaatttgaaacaatactgcatctatttctggtgagaatgtggtaagtattaaattattcaaaagaatggactatatgttaaatttctatttatttagaaaaagtaatggctatttcccccttaccaactattgctataagatcagcattattaataaaacctaaatttatagattcattttcagtatcgaatctgttataaaatttttgattaccagttgagtcaactatacttaaacttgtaatgccaccatttgctttaacaagtttagctgtagcacgaaatgggtttgcttcagaaatgtcataaataccttgtttataaacatctgatttaacaagagcttttggggtttctgtaaatgcaattattgatattaaaaaaattgctaaaaatttattgattttcatactaacacctcacttcagtctattttttgtgtttttgattaaaatatacattccatataatatccaggttagcattattttttacaaaattctaaaggatcaatacccaaataagttcagttttacactgtcaagaactgagtgttacatttttttgtgttgaaccattctaaaaggcaaaaattttagtttcgtatcgtcactatgagtactttgaatttattaaaagtcgtatgggagagattcatgtgtatgagtttatgagaaaaaggaactaggaaaaatatttttgagggttacatacttaattgtttcactagatagttgtcagcatagtatgtttatatatattaatttagagcgtggttgttatggctgagatacaaagagaagtttcttctaaagctgacgcattaataggattattaactaatgtaccaaaagaaatattggatgagcttggatataaatatcaaagtcaagataataatctagaacttactatcttatataggggtactccagaacaaacaaaagcattcattgaaggattaggtggaaaatttcaagatctaggatttaattttgctgtagttaatatacctagagaaaagttagagcaattatcattaagtaatgcaattcagtatatagaactgccaaagagtctgtatgaacaagatcaggaaagtaatagagtctcttgtattgcccaattagctcctaactttgatgtttcaggtgaaggagtattagttgggtttgtagattcaggaatagattatacacatccagcatttatgaatactgctggtacgacaaggatagaatatatctatgatttaagtactggtggaaatatttataataagcaaatgatagaggaagcaataaagtcttctaatccatattcgatagttccgtctattgataatacgggacatggaacacatgttgcaggaattgcatgtgctggtggtaacataaaccctatgtatagaggtgcagcgcctaatgcatcaatagcgatggttaaagcagcaagaggaactgcagttttaagttcacagattatgcagggaattaagtttctactagatagaagcaaagaactaaatatgcctttagttattaatattagcttaagtacaaatgatggagctcacgatgggagtagtctattagagcaatatattagaacggttcaaagcctagagagagtagctattgttattgcagctggtaatgaaggagatgctggacaccatgttggaggcgaactaacaaaaactcaaaggaaaatttttaatattgcaagtgaagagaagtcaattgttatgaatttatataagccgattttacctgatatatcaattaatgtaataaacccaatgagtcaaagtagtggaaatattactatacgggaaggatacattcaaggaactataggaagtaatagatatgatatatatgtatcaggtccaaaaccttttgaactaaatagtgaaataaaaataatactttctgctagaactggatttcttgctgaaggtgtatgggcattggaaataaatgttttgaatgaatatttaggcgaatattcaatatggctcccagtacttgaagggcttaatccagcgacaaaatttttagaaccaaaccaatataatactttagggataccagcaacagtagacaatattattgcagttgggagctataattatagaactaacaatctatcgtcgtttagcggacggggagcacaaaataaaggagatttagtaaaacctgatttagtcgcaccgggagaagagatagttggaccagtaccaaatggaggatatgatagtaaaacaggtacgtcaatggcagcaccgcaagttgcaggaatatgtgcattaatgatgcagtgggggataatcaagggaaatgatttatacctatttgggctaagattgaaatattatttattaaaaggtgctcagagaagacgtacagatgtaacgtatcccaatccattatggggctatggagaagtatgtgcacttaatagtttcaatttacttcaagctgacttaaattctattttatctaggcgatatgtaaaacataaagaagtgatagtaacaaataatactcttagaaaatataatattatgaaaaaaaataaaaagaggaaatctatgaacaatagaagtaatggaaatggtaaatcaaacactggcggattaaaagttcagtgcttttggggcaatgactatattccaattaatggagttaagataactgttagaggaacaacaggttctgaaaatgctaataatattgaattacttacaaatgtagctggattaactcaagtaatagaattacaagcaccacctatagaatattctttaaatccaaatagtaatcaaacaccgtatagctcatacgatataactgttgaaaaagctggatttaatccagtagtaataaggggatgtcaggtatttcctacacgagttgcttaccaaatagttaatttagaaagcaatttaggaagaggaagtatgagacaggaagttataaatatacaaccacctgtattaaatggaaattatccaccgaaaataccagaagatcctgagaagccactaccaccaccaacatcaggagttgtattacccgagcctgtagttccagaatatgttattgtccatcaaggagttccagatgatccatcagcaccaaactataaagtacagtttaaagattatattaaaaatgttgcttcatgtgaaatatattcaacttgggcagagtcagcattaagagcaaatattttttgtataatatcttttacattaaatagaatttttactgagtggtatagagggaagggtaagaactttgatattacaagctctacagcttatgaccaggcatttaattatggcagaaatatctatgataatataagtcagattgtagatgaggttttctccacctatgtgaaaagaactggaaagaagcagcctcttttcacccaatactgtgatggaaagagtgttacttgtccgcaatggttaagccaatggggaagtcaagaattagcacaacaaggtaaagcaccatttgaaatattaaaatattattatggaaatgatattgaattagttacagctgaaaaggttgctggacgcccaatgtcatatccaggatataatttagtcattggagaatctggtccagaagtaaaggcaatacaaggtcaattaaatagaatagctagagattacccactaattcccaaagttgcagaagatgggctctatggaccgaaaactgcaaaagcagtaaaaacatttcaacaaatatttggattgccacaaacaggaatagttgattatgcaacgtggtataagatatcggatgtttatgttggagtaacaagactttcagaacttactactactgaatcaagtcgaatagtgagacaaaatatgtttatacctccaattatacctggcttggataataaaagaggaattccaaaattttattattaaataaattaagataaaaaaatatttttttacgcaattctaaaattgaacaaattgtagatagtataagttaatcatgtaaaaaatttgaaaggataatcttaatgtaatgtgtggagtgattacaatcgctacattaagtagttatttaaagggagaaacaactacttctccagtgccgagcactatcccaatatctccctcatgaagagtgcctagttttacaatttcatccgtttcatctaagtgtataaattgcataagcttaccgatactatcagctgttattaaggctgcagtggcattttgagttataatttcgcaggaacctcatatcaattgaacaaagaaagtgaatagataccttgtttataagtggttgaaatagggaatatttgttgttctggaacttcagcaattggagatggttgtatttctgcaattatagtaaaggtgaatatatattaaaaatttctttattttcataatatatactcccgtttattattattttgtttttttattgaatatatattccatgtatagctaaattattcaaactataattagttatattgtttttgaagtattgctttatgcagagtaaattcgtggtattttttatacgtaatactatactacagcactgtgcagataaataagaagttcaaaatacgatagcgaagctaaatacggcaagggtacacgccctggatactataaaggttataaactacactgtattgcagcagttagtgatattataattcctttatattttcatttaacaacagccaatgtttatgacaatcaagtctcagatttactatatgaagctaaaatttataatccatttttagtgcttgcagatgcagtatataattcagtagaatggtttgaaattgcttctagcttagaatttaatttattaactgatataaatatacgtaaggctaaaagtattgagttgtttactgataaacgatatgaaaatgctttgtttattcaatctcatatcggatccaaattatataaaaatagattaaaaatagagcaattattctctgtatcaaagggattatataacttagaaaacccaagactttatgggtaagcctgatacggacgtcatataaagtgggtattattagcatacttaatagatgaatttaataaaaagcagcaagggataaaaactagaaaatatccttgaaatctataatttcttagataattatttgtaaaaattagttattcaacaacctagaatactatatcataaatgtataagatagttatacattatttaccccttattaaataaataataaccactatttagaatgatctattatccactagtatatcattctttttatttatagaaattcatagatttaagagataactaatgccaataaggaagtaataggcaagcttattattgctgcagtatttatataaaagtgtgttgatattgcatagtcccagctgcaggttattttattaaagctagcctattaccttgattttaactcgcttacgctcaagcaaatgaaaagaagtacaagctgtaacaagacatttaagcattttttataagctctattcatctagtataaattacctgaaagtatcgtcttatagcttgtacttcttaatgtttttatggcctgcggcagcaatgaataaatttattaaggagcactgcgtgctcctttgtggctgagccactccatagtttttgcttatttttctacgtaagtaattattaatatattcatatacatctgattaatcatatatgcttattcctatagatacattagttactactatatacgtattttttaaaggataagttattttattcagtaattctctgggcgcttaatccatcacccaaaaagggacaggtcatacagcatatatctctaagcatataggagttttccggcaagctccaacctcctatatactaagagctattatgcattagactagtcccttgtttgggtacctgatgggcgcagaaggcaagtacacttcgctaaataagtcgttgtcccgataatgtccaagctaaaataattaaagattatgatattatttttgttattagattttacttaagaaaatgtaaaaatgatattgtattctttatatttcagctagaacacttcgggaaacgttatttagctaaatgtacaggctatcttgacatacattaaattattttgtgccacaagggcaaaatcaggcttatagagaagatttaaggtgaattaaagaaagaacattagagagagtaggtcaggcaagctgacaaggaaattggggacttggacctgccctcacaagtataggggaaaattttcctgaagtgcgagggcaggcccatcttatacaggcctgcatgcgagtcccattatgggctcgcttttgtctttccgctcgttgtgtcctatagcaaaaaatatatttgaaatttaaagaatgtagatatttttagctaaaagacacaacttcgcttcaatccaatcgcaaactccataaaggaacaagccgcaggctagtacaagaccgccccaattgtgaatagaattgtaactattatagagaaagggtgagatagttttagtagaaacttggatgatgtatattttgacagtaatggagcacaagctagtttatgtgaattgctttgcaagcaaggattaagagagcataaatcgtaccaataaggtaaaggtataggtgtttttggaacacaagtctatcataataagtgttatatataaagacacgctgcgcttttgctctttacatataacacttattatgaggtatagtctttgtcaaaaacatgccaatggcttgtccagttatgcaggttctcaaggttgtccactttggacaataaaaaggggcagggactagaattaatcccattcattttgcagacatttttgccaatgtgagcatttttcatgataatataaatcagttttttgtgcttcatctttggataaaaaagaaagccattgtttgtagtgagtaagtgaattgaagctttctttagtagtaagccatttggtaaatgtaaaatatctcatgttaagacctccaaatctttatattataattattccctaaaatgggaacatatattctgtattgcttgcaccaaaatgtattatttttgataccaattattgtatataatctggttatatgggcacaatatagcaaagtgtaataattatcaaaggttcttccaaacatacaataaacgtgtacttatgggggcaccaaaggaggggaaaaacatgccaaatgaatataggcctaagaaagtaaaaccgccaactaagcaagctcattttgaatgtgaagtgctattatatacggactttgaaaaatattgttatggaaatggaaaaagcgttgccgagtccctaagggcatatatgaaaatgtgtttaggtagataaaatttcaacataaggtattccaaaatggatacctttttttgtaccaaaaattgtataagattttttaaaatgggtacaatataaataaggggtgaggtactcgaaaggtggtagtcagaaatggataaaagaaaatatttaactaaaacactaatcgcagagtatcaatccttaagcaacttagaagattgtaacttttcagaggttgcttacaggcttaaaactggtgaaaaacttatagaatttaatggagcacgtttaagtatttatggtttaactatagcgtttaataagcatataggcagaaaaggcatttacagcattactgataaagagtataaaacgtggaaatctataagatcaagagaaaaggaaggatattttattgacagggaagagattcgggaagagcaacttttaaaggactatgagagcgtattaaaatgtgtaggttcagatgaattgccgttttaagtacataaggggtgagaaatcccctatgaataaatttaaaaatttggaaagacttaaccgcatctttaaaaaacggaaaatcttttagggctatcaaatcccacccaccactcataaacatggacaagcaaagcttgtctcttcgagcaccatacgaccacatagatttttcatattgactacgcatatttatttaaaattatagtcaagaccaaaagcatagcgtgtctttactataattttgaataaatataccctggtggttgaaaaaacttgttaaaggcgttctccagcatcacacagggggcggtcttggataggctttttgatactttttcttatctaacagtaagtaacagcgaggataaatcgtatccctaaaaataatttccagataatattattcattatttttagagattggatttaccgaggggatttaattcctatactataaaggtttatagctatgcctgtacaagatggacttgcacttacacttcaatatatctctgttacatttgtgagtgcatgtccaagcccaccaaaagccttgtcagcttgtctgacctacatactaaagttttagtattttcctagggtgggactagttaccttgtcctaaattgatagggaatactatttttatccctattagtttaggaaatgcaacctgtcccacccgccaccacacttggagtcaaccacgcatagaccaacgggataagttgttgtttgtctagctctatacatagaggaaagaacaatttatgaataaggttacattatgagtacaaactagactattccatgaataagagaaaagaaaaaagcctggcctttaaaaaatgtgtatataggtgtaatgctattaaaaatatatatagtaatatagaaatctacttatctagttattacgtacgtaatatattaagaaattgagtggccatgccacaaagaccacgaagtgggctttatatatttattccttgctgccgcaggccatctcatcaatgaaaagtacaagccataaatctatataataagttttcatatgctaagtgaacaaagcttatctaaacataagaaatattaactatggcttttacttttcttacttttgtgtgagcgtagcgagttaatttaaggtaataggcaagctttaaagaaataatcttaaggtagattaatgctttatcaacatacttttttatcaattatggaataaaaataagcttgtttattactacctttgacttgaaggtgaagcctttaaggcactagctttatttggagaatccactaaggaaagtaacaatgttagagcttggagcatagcggaaaggtttaacgggttgtttctttccgcacctggaattaaagataaaattatgagtgaagatggtagagggaaatattcacctcttatttaaatatttttaataaattatactatgttttgctacacaaaaataaagggtacatgtttaaaatttatagttataaataattccaaaaagaatattaagctgaaaaaaatgccttgagaaaacttaaacattatacacttgtttaaaaaaatagtttataataatactgtactatattctgtacagaaaaaaggagatgattaaatgatagcagttaattatacgaatatccgcgaaaatttaaaagcatattgcgacaaggtaaatgatgaggatgagactgtaattataactagaaaagataataaaaatgttgttttaatatctcaaaatgaatataataatatgcttgaaaatataaagattttaaaagatcctaagtatttgattaagctctataaatcattaagtgaactggaaaatagtgatttaaaagagattgattcatagatataaattgttataaagtatgtaatataattagttataaattatattacgtttttagtgtattatttagtaacaaaaaatgtactaatctatgttatatatttgtaaataaatttgtaacataattagtaaaaaatttggttaaaaaaatagtaacccaaatagtaaagtggcattaactatttgagttactaaagtagttatagaatatgttacaaaattggattaatttaattgtaacagaatctgtaactaaatcaaagaaaatgatatacagaggagtgacaaaaatgggcattgtaattagtattttaaataataagggtggagtaggaaaatcaacatcaacatataacttaggatatgaattaagtaaaatgggtaaaaaaacactaataatagatctggatccacagagtagtttgagtgtatatgttggacttgacccactagaacattatgcaagtatagaaaatgtatttaggggagagatgaaattagaggaggtaatagttccaactggaaatgaaaatttatttatggttcctagctgcatagaattttctactatagaaatgtatttaatgggagtaatgggaagggaaacagtatttgataaagctctagaaaatgctaagaaaaattttgattatattcttatagataatagtccatcacttggaaatactacaataaattctttatttgcctcagattatgcaatagctccaacggatgcatcgtatctttcttttagagctcttggaatattaaatgaaactgttaaacaagttcaagaatttaataagaaattaaaagatgtaaaagtacttataactatgtatgacggcagagctaatcacagcagagaagttgctgagatgctaaaagaaaaatattatgttttcacagattacattaaaaccagcactaaatttaaagatgcagtaatgaggtttgaaagtataactcaatatgctggtgaaaagtttgatggttctatagcttataacaatgtagcaaaggagataatatcatggtaagaaaaaagaaagatgtaataaaaccggttgtggctaaaccgttaaatgatactgaaaagagaaatttggtgacaagttttgttacgaataatataaatgaatctgtatcagataatattactaataatagttcagaaaatataactaatgctgatactgataacgtagcagaaaatgttaatataaatgatataaatattgtaaataataaagatactaaaaatgttattgataataatacaattagtgtaactgataatgttattaatagcgatacagataaattaactgttaatgatacaaataaagttaataaaaatagtactaaaaatgtaacaaagaaagttacaatagttaaaacaatttccattggaaaaaaggatataatagctaagtttaccagtgataagagagtaagacctaattacaatttatcacaagatacagtagaaaaaatagaaaaaatatcagaaattttaggatataaaaaagctgaatttgttgatatatatttaaatggaacattggagaaagtattaaaagatttagagaaaaaattataaaaaataatatataaaatgatttaaatgtcaattttatatactctcttatatgtaaaatatagtagtatcattaagaatatttaatgatactactattaactaaattgttatttaatatattgaattaactcggaaactaagtcttgaaccttagttcctggattcattttagttggactaattatattagaacttttgtaatctgctatcaatgcattgctcctttttatagcaatatttacatatggagatatcacatcaaaaatatcataaatatttttttcgtacttacctttatttaaattcttctttttaaaatgagtatttaatttatcagtataatcatctctatcaatagctgctgttagatcttgaaaatgaagtaatatccataactcaaaacattcatttgaccatgcagtatttaatccattttctttagcaaaaattatagcttcattaaaatctttattatcatctttatcaaatactacccaaacatcactataggaaggatttaaactacgttttttcatagcttcattaactaaaactgtagtggaacgcccaagacctttaacatctaaatcaactttttcaacgataatattatttctaaaccgctctttaataattcggcttatattttcaaaataattaacttcagtttctgtgccttcagtcacaattaaataattgcctggttgaacttctttggttccttcatttcttttatgcttacggccagctctatttaatttcggcatcttgattcctccacatatcataaccccttaagatagggacagaaccgtatttcccaagaaggtaatctttgttgtaagaagcatcttttctaacctttttatcatcatctgacttatattcagctaaggaatataaatgagatactgcatcagaatccttttcgacaaaccagatttgatcacgtctaaaaatatctttagttaatgtatagttgtcatgggtcacatatataagttgagctccatttctatttatattttcatcatgaaacatggttaaaatgtatcttaaaagtagtggatgaagtttggcatcaagttcatcaataaatagtcgacctcccaatgtaagtgcaatttgtaagtacgtaaatagtgtaaacattttttgagttccacttgattcttcagaaagtggcatctggtagtaatttattttatctttcattagatgttttgtataaattttaaattcatcattttcattttttaacttttccacgataataccatctatatttatgtctatagaagttaaaaaattaactagctctttctgataatctttattttctatattgggtgaatgtattttggttaacccactttcaaaattaatatttccatagtctataataaatactctaaaaaaccaatcaaaaacatcctttgtataaggaattttagcatttgaaattattgatagaaataaagttttatcttctataatagaaataaagttttcagcaccttttaataatttagaattacaatctatgccttgctcagatctttcaaataaagtaatatatttatctttgctattttcctttttaacataaagccattcttcaagaatttttttgttatctaatgaaaatccatattgatattcgtgattattatatttaaaaaatacttcaaattcagcaggttcttttaatgcttcactatcaaatgcaaagcgtttaattggtatatcttcagtagttgatgcctgtttaaaagaatctcgaatccaatttctcataaatgtataagcttcaataacagaacttttaccacttgcatttgctccataaattgcagcggttttaatatatttttcatcaccggaatttattaaattatatgggtgctctgtaattgaagttgcagtcatatctaaacttgtatcatctctaaatgatttgaaatttttaaaattaaattgtataagcatttttctcacatccttaaaattataatactacatttacgtgcaaatgtgaataaatatgagattttttctcactaattatgataaccatatttttactatatattcatattagattcaatttaattatgatagaggaaacatttgataattcaaagtcctaatcgtgaattaaaataatgattaatgatttagattaggaatttaaaacaaagtaatttgaattgatgaaaatatactttaataaatatttacttgataaaataattgttatatacaaaaacagatgatataatttatgtattaaaagtgtatatgaggtgggtagtatggagattaatgagaaaatagataaattaataaaaaaagaagaaagggatagtatctattatatattgtacattggagtatcggcatataaaagactcttagaagataatccagaattagaaaaatctaagtcattttcagaaattagaactagaatcttaagctttgttataaaaagacaatttgaagaagatgttttatctatggagtttccttttaaagttgagataaaggacgttaataaatttaagagtaaagccttatttttaaataataaattgatacggcttaagataaataaaacaaccaaaagaaatacacttcataacagcaataaggtttcagattatatgttaaaagaggcagaagttaattccaaagataagaaacagattgaaatgttgttttttgacaataatgaagctgaagttggagagaaaaaacatacttttatgattttaggatatggagtcaggggaaaagaaatagatcatctagattttatgattcctagctgtaatatgaaaaaggtagaagaagcatttaatgcattagatgaatataatcaaacaatattaatggatgttaacaaggaacaaactgaaaaaagaattatgttacttaaagatgaggcaaaagcgttagtaaagtagaattaggaaggtgaaattatagttatgaaggtgatagagtttggttctatgaaaaataataaaatagttccagcaaaactaaaagaggctagagttgcgagggggctatctttagcacaactttcaaaactaataggcatatcaagtcaagcaatatctcaatttgaaaaaggagaaacaaaaccaagtccagcaacattagttaaattaatagaaactttagatttcccaataaattttttctgctcaagttataatggagccttagaaaatgaggtaatatattttaggagcaataaaaacataactaataaattaagggatgcgtgtaagtccagaatttcatggattgaaaaagtatatttactaatagaatcatattttcaattacctaaattagaaatacctaagttagaagacttggatgtagatagtattgatcatatccaaatagaagagattactttaaaattaagagactattggggactagatcaatcaccaatagaaaatttaatagatatactacaatcaaaaggttttgttattactaaattaaaaataggaacaaaaaaaatagatgcattttctgtttggaaaaatggtgtaccatatatttttataggtgatgataaggagtcagctgtaagattaagatttgatcttgcacatgaattggcacatttacttattcataaatatatagataaagaagaattagaggaagataaagagttatataacaaaattgaggagcaggcaaattattttgcagcagcatttctattgccaatagaagcatttaacaaagaagttatatcatcctcaatagatagctttattctgctaaaaaaaagatggaaggtctcaatatcagcaatgataaaaagatgtcaaaatgcaaatattttaactgataatcaaataagatatttaaattcacagatgataaaatatggctattatagaaaagaaccattagatgaagaaataaaaaaggaaacaccttatttatttaagcaagcgtttgaaatattagtagagaataatatttatacaaaggaagctatattagaaaagttagaattaaataaaaatgaagctatagaactttattctctagataagtcattttttgaaaagagtaataatatattgaagttgataaagtgaaacttttcaggtggagttttatactccacctgaatttagttgaactaatccaggagcgtgcagccgttatcttcgacttaagcatataaggaagaggtgtttcaactacgaaggagtgttacggatgctagctatcggataaaataggccattaagtaatagtaacgcttttatttaatataaatgcatgctgaataaaaaaaggggctgttgcaaaactaacatagttagtaaaatggttcctatgtcaaggacattttgaaaaaggctaggcagctatgagctggtttctgtattgtacaggagccagctttttaagtccccactgatatctataattattataatactccatata

SEQ ID NO: 62 - DNA, 35629 bp, Clostridium beijerinckii
gaggtgtaagtatggtaacatatttagctgactgatactaataggtcgagggcttgaccaatatagtcaagttgtaaatacattaaagaaactgtgtgcaattttgaaagaacaaagttttttcaaattgaagatctcgtgatgatggcatagaggtaacactccttcccatttcgaacaggaaagttaaggtctatagcgccgatggtactgcatgggagactgtgtggcagagtaggacgttgcgaggtaagatggctcgatagctcagtcggtagagcagaggactgaaaatcctcgtgtcactggttcgattccagttcgagccaccataatacggctcagtagctcagttggttagagtgccggcctgtcacgccggaggtcgagggttcgagccccttctgagtcgccaatttaaataaaacttaatatggctccttggtcaagcggttaagacaccaccctttcacggtggtaacaggggttcgattcccctaggagtcaccaagttgaaaaataagttctagtttatctagaacttattttttttcatataacaaaatatttgaagattaaagcatttgttagccaacaaagtgattaacatgaataatcggataaattattaaaatttctagacttttgaccttgcataaatgatatattcaatgttaaaatccaagttgatatatattataaaagttgattttaataaaattttaaaaaattacgttaaataatattatatactgcaaaagtaattcttcatcataattctaaaaatattacaagaattttagccgtaattgtgaattgcaacatatatattaattatactttattatgtaatccgaattctatatttagatacaatgttaaaccaactgatagtggtagtgtatataaatataggtgacagtatatgttaatataaacgaaagagttaggaggcaggtctatgactaataaggaaaagattagaataaagttgaaagaactttctcttaaaatagatggaagcatggaatacggaataaatgctcttactatagcagataaacttgggcttcaaagaaatttagtaagccatgtattaaatgagctgactaaagaggaagaagcaataaaaataaataagagacctgtctactttatgagtaaggaagtgtatgaagaagatagtgataggtttacactgatttctgattatattaaagaaattaactatttaaatactaataatgatatagataattttaaggaacttataggggcgagcggcagcttaaaggatgttgttcagcagtgcaaatcagcagtctcatatccaccaaatggattaccatttttacttattggaagttcaggagttggaaaaagttttttagcacaaaaggtatatgattatgcgagaaattgcagctatataaaagaaggtgccccttttgaaatatttaattgtgcagaatatgcaaataacccagagttattttctgcgatactttttggatcagccaaaggggcttatacaggtgctgatagtgatagaataggtctcattgaaaaagcaaatgggggatatctatttctagatgaaattcacagactacccccagaaggtcaagaaaaattattcttatttttagataaggggatatttagaaggcttggtgaaacggagaaaaaaagacacgccagcgtaaggttaatttttgcaactacagagaatcctgagaataaatttcttcagacatttttaaggcgtataccactaatattaaagataccaagctttaaagaaagacccttaaaagaaaagctagaccttatagataatttttataagagagaagccttaaatataaatagagatattattgttaacagtcaggttataaatatattgattaatagtaatgctcatggtaatattggtaaaattataaatgctataaaactcagctgtgcaaattccttgaataatacgcaggagaaaagaacaaaagtattaaaagtaaaaattaataatcttcacaaggatataatagagcgggatgaggatattagttttaataacttaaatataaataatatgtttataagctgttcggaaaaaaatgatcgagattatttaaatactcatataaataaggcatcaggaattacagaagaattaaatgaagctatcaaggaattagaaaaaggcaaaataacagaggaagagttttttattaatggaactaaaatatttaatgacttgattgatcatatagtttttaatgagaaatatagaaactcaaaaaatgttatatataggtcaatagaaaaaacagttgaaagtactttgcattttatgaatttaaattatggaatcgattatttaacaaatagttcagaaattatggctaatcttataacatattttgttgaatttcaaaacgaaggttatattaaagaagagatttcattaatcgaacaattgagtaaaaagttccataaggagtataagctggttttaaagataattgaagatattcataataacttagatttagaaataaataaagaagtagaaatttatttactaatatatataagatcattggataagtctattcaaaataatgttaatgcaataataatagctcatggtcattcaactgcaagcagtattgcaggggtagctaacaggctgtttggtaaatatatttttgagccatttgatatgcctatagaaagttcacctttagatataagtaataagatcttagaatatgtcaaaacaatagatacttcaaagggacttttaatacttgtagatatgggttctcttgagactatttatatattattggaaaaagaaatatacggagatatagctatagtagataatgtttctactaaattagttttggatataggaagcagaattcttagcttacagccattaaaacaaattgcagaagaatcatctaagaaaaatgtaagtaaagtaaattatatagaatctactaagaagaaaacagatgttataataacaacttgtataacaggtattggaacagcaagcaagataaaagatttgttaaacagctgttttaatgaggatgaagtaaaagttgttgcttatgattatgaaagtttaaaagaaaatggaaaagaagattttgtatttaaacaatataatgtaaaactcataattggtacaaacgatccaaagatagagaatattccttttatatctttagaaaatcttataatgaaaaaagcagattcagtattatttaatacattaaaaggaattgtagataataacattattgaaaagataaataaagaagctgttaagttatttacattagaaaatgttttaaattatcttacaatattaaatccggataaaatagtagatcaagtagaagatgctcttactaatttagaaagaagtctaggctttaaactagagaatgatttaaagataagtttatatatacacataagctgtatgatagaaagattagtaataaaagatcctattatgaattacagagattgtgaagattttgaacagtgtcatgtacactttataaaaatgactagaaaagcttttagtgtaatagaaaatttctatagagtagagattcctatatcagaaataggatttatatatgatagtattaaaaataaagttaaaaactttgatctttaataaagtttttagaaatataaagaaaacaagcaaatacaaggctttagattgttctggtgaaattaaataagtaaaagaatatatggattcctataaaaaagccccatgttaagtagtaatatgtacactacttggcatggggcttgctttatatataagcataaagattaaggaggaattaaatatgccaaatatattaatgacaagaattgataacagattagttcatgggcaagtaggtgttacttggacgacatccctaggagctaatttactagtagttgtagatgatactgcagcatcagatacagtacaacaacaattaatgtcaatgacagcagaatcttcaggggttggaatcagatttttcacaattcaaaaaactatagatgttatacacaaagcgtctccaaaccaaaagatttttatagtatgtaaaacaccagaggtagtaagaaaattagttgatggtggagtacctataaaagaattaaatgttggaaatatgcacttttcagatggaaagagagctattactaaaaaggtttatgtagatgataaagatatagaagatctaaaatatattgaatcaaagggtgtaaaagtatttgcacaagatacacctggagatattaaaacaaatattgaataaagggaggaattataatgcatagtataacgttattacaaggtattcttcttgcaattatggcaatgatagttggatttgatttctggttagaaggattatatatatttagaccaataatagtatgtacattaacaggagccattttaggagatataacaacaggacttatcgcaggaggacttactgaattagctttcgcaggacttactccagtaggaggaacacagccgcctaacccaatactagcaggtattatgacaacagttattgcgtatacaactggagcagacgttaaagcaacaattggattagcactaccatttagtttcttaatgcaatatgtaattcttttttactattcagcattttcagtattcatgaataaagctgataagtatgcagaagaaggcgatactgcagcatttacaagattgaatataacaacaactcttatagttggaataacttatggtgtgattgtattcctttgtacatatgttgctcaagaaccaatgagaactttagttgaaagtatgccagaatggttaaaacacggatttgaaatagcaggtggaattttaccagcagttggatttggattattacttagagtaatgcttaagatagaatatgttccatttcttattataggatttttagtagcttcatttgtacaatttacaaatttattaccagtagcattaataggagcagcttttgctttatatggatatgtaaatgataaaaataaagctcaagttgtaaatgtagtaaattcaaatcaagggagagaagattatgaagacggaatctaataacaaattaaccaagaaagatcttagaaaacttgcctttagatcagttttgctacaagcaagtttcaactatgaaagaatgcaggcagcaggatggacttgtgcgttactacctttcttaaagaagattcataacaatgataaagagaaagtatcacaatctatgaaggataatttagaatttataaatactaatccaactttggtaggatttcttatgggattagttttatcgctagaagaaaatagtgaagatagaagtcttataaaagggttaaaggttgctttatttggaccgctagcaggtattggagatgcacttctttggtttactctattaccaatagtcgcaggaatcagcgcatcatttgcaagtcaaggcagtatcgtgggacctatactattctttggtgtttatgtatgcgtattcttatctcgtataatatggacaagtgcagggtataagctaggagtaaaagctatcgacattttaaaggaaaattcaaaatctatttctaaagcggcaacaactcttggagttactgtaattggaggattaatagcatcttatgtgcatatcactttacttccaagcattccaataagtgcagatcatgctatatcactacaaactgattttgttgataaaatattacctaatatactacctatgggatatacattacttatgttttatttcttaaagaagaaaaatgttaatccaactatcttaattttagttacatttgcattagcaatattgctatcattattgggggtattataatgaagactaatatagtcatagctggacatggaaattatggcacaggagttgaaagttctataaagcttttagctggacataatgaaggcgttgaatttattgattttttagaagaagatacagatgtaactttgaaggacaagataattaatgccttagttaataataaagcagataaaaatctatttgtctgtgacattttaggagggacaccttttaaagtatgtgttgaactttcttatgaaaaagaaaatatggaagttgtagctggatgcaatataggtgcaatactagaagcaattttacttaaagattctatgggaattgctgaattagcagatagtgttgtaaatgctactaaggatacagcagtaagatttataaaagttaatacaacaaattcaacatataatgataactcgtctatggatgatgggatataaactaataaagaagaattaagaactttagaatgatgactgttacaaaatctagtgaaatagattgtgtagcagtcccattttatagagatgaggattagtattaaggagtgattattaatgagaattttaggaatacaggaagatgaattaaagagaattgatggatatcatacagctttagaaatggaaagacagttagaattatgggaagagggaatagaaacaataaaaaggaatacagacaaaataagagcttttctaaataagatagaagaagtagaaggacttaaaatatacctagttggagctggaagctctgcaaaagcagctgcaataacagaaaattatttaagaagaattactaaaaaggaagttatatcaatagcttcaacaactctcatagaaaatgaagatagttatattttggataattcaccagtgcttttagtatcattaggaggatcaggaaatacaattgagggtttagaagcagttgaaattttcaagaaaaaaggaattgaattatatcaacttcttataatttgtaatggaaaaggggaaattataagtaaatatggagaagataaaaatagtttatatattcctattcctccaaggactaaggataagagtattgcagcaacgggggaattcacacttcttatagagtaccttcttttgatttttgacattaataattatgattattatgaagatatgtttaaaaatattattgaagatgctggcaggtttttaaaagaagatatttataaagctcatgctataagtaataaaatatatgatacagtagcagcacttggaactggagctttaaatccattagcatcggaaatgtgtttaaagataagtgaattatcaacggggcttcaacgtacagaattccactcaatgttagaatttagacatggtccaaagcttacaatgaattcaaagtgtttaatatcatttttctttagcaatgattctcacagtataaaatacgagttagatgttttaaaggaatgttatagtgataaaataaatagtactatagctgctatttctatggattatgatgaagaaatagataaacactgtgattattatttctacttcaacaaaaataattttaagcataaagatgatagtcatatagtatttcagtattcactatatcttcaaagttttgcaatacttaatgctattagaagaggttccaagacagatttaatttgtgagtcaggaatagttaacaaagtagcacaaggtgtggtaatatataaaagataattaataaacatatcttgaggtgtattaaaatggttggtataatagcaatttcacatggaagctatgcaaaagcactaataaattcagttgagatgatatatggtaagcaggaaaaaataagaactatctgtcttgaagtagataaaagtatagaaagtcttaaagataagatagataggactattgaagagctaaatgtggatgaagttttaatacttgtagacatcttaggcgggacaccatataatgcggcgtgcttatttatggacagaaaaaacgtaaatataattacaggtatgaatatgccaatgattttagaaataataccatatatggttcaggatttagagaaaatatcttctttagctgaacattttggtcaaaacggtgtaattaatataaggcagcgttacaatgatatacaaaagtaaagcgaaaggagcggtatagtgctaaaaatagttagattagatgataggctggtacatggtcaattaataaataattggtgcacttatgaagatgtgacggaaataatagttgttaataaagaagttgcagaaaatgatataagaaaaacttttatagaattatccgttcctgaagatataaaaataatattttgtgatactttaaaggctttagaactatatgaagaggaatgtgaatatgaagatgtaataatgatctttggaaatccttttgaagttcttaagtttatagaaggtggaggtaagataaaaagtctaaacttaggcggaatgtcatttaagaaagataaagaaaaaataaatactaatctttatttagatgataaggagatagaggcattgaagaaaatttcagattctggggtggaaatagagataagaattctaccaacagataagaagacagattttttaaatactctaaaagcaaggagaaggtaataatgtcattaacacaagccttacttatatttttatttgcttcaatatgtggtattggatctgcttcagaggaatttcaaactcacagacccttagttacagctacacttattggaatcgctttaggagatataaagacaggagttataattggagcccaggtagaattaattgctcttgggtggatgactattggggttgcaactccaccagattcaactttatcttccatagtggcagtcatactttgtgtgcttggaaaacaaagtataggagtagcaatagggattgcaattccattagctgttgtaggacaaatgctttttatactgcaaaaaggaactatagatgttggtataatgcattgggcagaaaagggtgtagataagggtgagctttggaaggtgacagcagcacattttataacagccattccaagtgctttaaggatggctattccagcaatgttagttgcattatttgctgatgcaaatatattgaatagtattttaaattatgttccagaggcaataactaaaggacttcaggtgtctagtggctttttagttgtagttggatatgcaatgattcttagaattttaaatgtaaaagaaatgattgcatttttcttaatgggatttttagtaatgacattttctcagatgaccttagttggattaacttttatgggaattagcttagcactaatatatttacaaatttcaaatatgattgaaaaagcaagtaataagactagaacaaagagagagcaatttattgaaaatgaagaaaacatcataaaagttaaagttactaaaaaggatttaatgagagttttttggagaagtcaattttatcaaatatcttggaactatgaacggcttcaaaatctttgttattgttattgcatgatgcctattctaaaaaaactatatagaaccaaggaggagttacaaaaagctgtaaaggttcacttagagtactttaattgccagccatttatttcaaatgtaatacttggagctaatattgcagttgaagaaagtatgcaggaaaaagtagatcaatcaggaatagttcagattaaaatagcactagccgggccgcttgcaggtataggagatccaattatatggggaattataagacctgtaatagcagcggtatgtgccggaatatcacttagtggaaatgtcgcagggccaatcttattttttataatgattaatattgtgagattaataatacgatataatggacttatgatagcttatagagaaggaacgagtataattaataaacttaaaggtgcggtgccaaagtatagaagtgccttagtagtacttacttatactgtaataggaggattagttgcaaagtggactataataaaagtaccattcgtcctttatactttaacgcaaggaagttcattaacatcctatacaattcaggagcagttagataacataatgcctaatatactaccattgatgctgacttttctgatttattggttactccagaaaaaagtatctcctcttatatgtatggttggtttaatgatatttggagttataggatactcaataggtattttaggtatatagggtttgataaaagtatgtttattctttgtttcaaactaaaaattaagaaatcctcgatagtaatttcgaggatttcttaattttagatttaattcaacattcaatttcaagatttttgttgtatatggtaaattgattttttccattttctttagaactgtataatgctatatctgatttatgaattaaagattctaaagtatctccatgtttagggtaaaaggcaacaccgatgctcgcagatacagttatttcagtattattgccaatatatgtagcattaagattattgcataaaatactaattttatcttttataaatgaaatagaatgacttggtttaaatacacaaaattcatctccgccaaaccgtgaaataataacatctgtaccgttaaagacgtcacaaattttatttgcggtatcctttagcacttcatcaccaaccatatgtcctaaattatcatttatagatttaaaattatctaaatctataaaaatcagcatacagttatcatttttgttatctataatataatttttaactttttcatagaatgtagatttattatatatttgtgtgagctgatcatattcagatcttagctttagcagagaatgttcttttacgatatgatcgatatcagtaattttgcctatcactctgacaatcttattctctctttgtatatagtttagttttagctcacaccaaagatagtccccattactcttcattagtcggatttcttttataattgactgtttgtttaaagctttcatgtcatcggtgattttattaattaatatcttatcatcaggatgtattttcaattcatttaaaaaacctttattataatcttgaatatttaatgtccatccaaaggtttcttcaaacttagaggaacttaagatttttttctcagttatgtcaaaatcaaatataatatcatttaattgttcaacaactataaaatatctttcgcgttctaaatctaagtcttttaaatattttgactgttcccttgcttttatgacaaggcagtaaaaagcatctaataatgatatacaaataatacctaaaataatgaatatgaaagttttgtaattattataaatatagctagtaaaatttatgaaagtgtataaaggggcgtcttcgcttatactgttttttactgcagcaaaagccgtagtattgaaagtaaaattaattatggctataaaattatatataaaaagtagtttgttttttctatattcaaatcattcacctcttgattattaattgaatattgttatcaattagtctactaattcattttatataatatttttataaaaatcaataaaaatccaaattatattcaacttggatttttgtgtaagctaaataatataaactacattgtatcttaatacgaggaattagctgtaaagttaggagatatttaatttgtttgctataataattctatatctaatacaagattgagtgaaaataatatatatttgcgtaaaagaaaggtaaaactaataatcgatttaaaggttattaagaaagatattttaagtaatgcgtggaagtgaaggaggagttattatgtcgaaagaacatcttgtttggttaaaaagttatttagaggaaaattataataaatctatacttgaaaattttcttgatcctcaaattgttgaagtcatagagggaaaagttatatacgaaatgaaaattatagataggcattgtaatatatatggatacatacacggaggaaccttggcttcaattgcagatgttgtaatgggagtttcttgcacaactctaggaaagcgtatagtaactacggatttaagtattagctatataaaaaacgtaaatgcaggaagcacaattacggcagtgggtaaggttgtcagcgatggtgaaaatataatgagatgtacatgcaaaatatttgatgagcatgagaagatccttgtgcaggctcaggcttcatattttgttattggaagttttgatgaggtaaccccaccaaaagttaaatgattatctttaataagctaaataagaatgctagttacgaaatttttgttaagtaactagcagttttgcttttgttcttttttaaataccaccttttctacagcagtatttgtatctgataaattaggggaagcattaatgaattaagctttccataacttatatatagctaaaaaaataaatttgaaagaagtaagaaagttaaactgattccaataaaccttttttacaattaaaaaaggaaaaaaattaagaatataagaagttacagtgttactttcttatatttttaactttttatgagaagaattttaagttgtacggttgattgatagtaaaataatggaatataatgtaagtattaagttaaaataatgagacacaattaaataaataagaagaccatttgtaagcctatgttccatcatgctacatttacaaattctcccaatagatgggtaccatgagggtaatatatcgcctcgccttgtctaaggaaaagaattcaaagaaactttggacttgctatttattttcatgtgtctaaagagtggtgaattataaataatgaaattttttaacaatgctacgaatacaattagatattttttgaattggaaacgttatagtataaaagcaaaattgttaagcatatttataattatttcaattataccaatggttcttagtcaagtttttttatataagctgtcacaacattatctcgaaaagaagattacaaatcttacggataggaatttattttacataaaaactaacatagaaactgatatgaattattataaggatattttatacaggattgcagcagataatgattgcttggaattagagaaaaagtttaacgacggaaatgagtttgaaaaggcagcttctattaataaaatcagagatgcctttgggtcttattcttattcaagaaatcaaattagagctataacctttgttgggaataatggaagaaatgtatattatgataaaggtaatcagggaattaacaatagaatatgggaagaatatagtaattctgacaaaagtaaaatttattctgaaatcttaaatagtaatactcctgtaatattacctacaacttgtaatagctttattcatggaaaatctgagtatatgtttcacataggactaaaagttagagatatcagaactaaaagtgaaatcggcataattattatgagttttgatgaacaaattctatttgatgtttgcaatgttgagatggataaggaagattttgaggaagacaagcttaatatgtgctctgtaatagttgataatgatgggagagttatatcatttcaagataagaagtatattgggacatatgtaaaagattattctagcagtgagattaatgatatggataatatggaaacactaaatcaattaatatattcaataccgagttttaagaatagaaatatatctgttagcagtattcctatagataggtgttggctggaaagtaattaatgttgttgataaagataatttattttatgaagttaagttattaagaaatttaacttttgtatttttaggattgatacttataatcttaacaatagttattataatattctcaaataaattatatgagtcagttaaaattattgtcagtggaatgaaggaagctaagaaaggaaatttcaatgtaaaaataaagctaagcacagaagatgaaatgtcatttataggagacgaatttaatgaaatgttgtctacaataaatatcttgataagggacataaaagatcaaagtaattttattgttgaattatcaaataaaagacgagaagctgagataaaggcaattgttgctcaaattaatcctcactttttgtataatactttagattgtataaactggatggcaattaaaaatgagaattatgaagttagtgatactattggaaattttgcgcaaatactaagatatagcataggcgatattaataaggaagttactatttatgatgaagttgaatggttgaagaaatatgtatgtttgcagcagcttagatttaataatagcttcgtattggatttagatgtagatgaaaatgtcttaggggctagaattcataaattaatattacaacccttaattgaaaattcaattatccatggatttaaaggatatgatagtgaaagaatattgaaagttagcataaatagatttgaaaataattatgcaaaaatcgtagtaaaagataatgggttgggtatagaagatagagatcttcaagaaataataagtaatatgaaatcaggaaaagatgaagatgaaaatataggtataaaaaatgtatatgacaggataaagatttattatggtgaagatgctaagtttagtattgaaagtgctaaaggacaaggaactacaataactttgattatttcattgatattttaagggggatattcatgaaaattttaattgtagaagatgaaattaatgccagagaaggactggggaacttattaggaaagattaataaaaattacatcgtttgtggaaaagcatctgatggagagcaagggttacttttggctaaagagtataagccagatcttatttttactgatattgaaatgccgaaaataaatggattagatatgctccaaaaaattaaagattgtggtcaaaatccatatattattatacttagtggatattcagattttaagtatgcacaaaaaggtataaaacttggagtgaatgaatacttattgaaacctataacttatactgctttaaaaaataccatggaggatattgaaaaaaagcttaatttaagtaaggaaaaagatgcacttttagaagaaggtatacttaaggaagaaatattaggacaagtactactaaataaaggacaaaatttagagcatttttacaaaataattgaaagtaaagtaaagcaaaatgaaaatatatatgttgttaatttgcatcttagagataaatacgaaaataaggttgaacttataataaaagagatttatgaagctatgaagaattacaatatcgtaaatttctattactctatcttaaaagagtacagttatttacctattttggtaattactaaaacaccttacttggaatttataaaaatgctaaagcataagatattattttcacttaggcagaagggattcttaaatactactattagtattattaatctagatgaactatctgaaattaaaagttcatttaaaaggctacaaggattgtctcgatggcctatttcatttggaaataatgaagtgatctatgaagaactaatatctaaattaaaaataaatcgttgtaattatccaagagagattgaaaaggaagtggtaagggccataaaaaacaatgatcagaaaaagttagctgatattaataaaagatttatatcatatttgaaagaaaacatctacgacccatgcgagataatagatgttagcagcaagtatattttttcaattttaactgcgtctaaaagctataatagcaatctttacactgagtttaataatgaaggcgttttagattcaattaagaatagttttacatttgatgagttaaaagaacggctaaattatgtaatccgtaagatgtgtgaaagaaatgatgagggaactaaagtaaattcattgattgtaagaaaagctataaattatataaaagagtattatagcgataaaatttctcttgaggaaatagcaagtggaatgaatataactccagaatatttaagtaggttatttacaaaggaacttggaaaaagtttttcagattatttaaaagagtttagaattcataaagcaaaggaattattaggaagtaataaactaaaaatttatgaaattgcggagaaggtaggctatagtgattctaaatacttttgcaaagtttttaaagaatcaacaggtatgtctccaaaagaatatatgaaattttattaagagatgataaagaaagaataggtcagtatgcttgctattttatttaataagcttaaatacttggaaaaacttttaatctaagaatcagagccatcaaattcctaatgaaacatttcacaaaagcataattcttatttctagttgggatatatttcatagtgtaaatctcacttatagttggggtatctatatatagataagcaatttaagaattagatttgttagatgaatatatgtatagagttgctaaaactttaagttcatatcttcactagaaatcataaatatttttctggtatatcaatatattctaagtgtaagtcaaattctttatattggaaatctataaaaaatctaaaggtgcctaaaacttagtgaaggagacctttaaattgaagcaaggtaggtgaaaataattttgaaaaataaatatagcagtgaatttattaaggaagaaagaaaagggtacatatttgtgctcccagcactaatatttatgctggcttttgtgggatatccgattatatataattttattttaagtcttcgtgatgtaaatgtaacgacttttagtcagcctgttaaaccatttgttggtattgaaaactatattgaagtgtttaaagacccagcaatgccaataagtatttggaatactttagttttcactattggaagtatatcaattcaatttattataggactcggactagctttgcttttcaatttaaaatttaagctttcagaacctcttagagggcttatggtagtcagttatcttgtaccgatgacagtaactgcattattgttcaaatttatgtatagtacaagcggaggtataataaacgaattacttatgaaatttcatctaatatcacagccaataggatggattatagacagtaaaacctcaatgttttcagttatattaacaaactcatgggttggaattccgtttaatatgttgttattaacaactgggttaagtaatattccgtatgatttatatgaggcagctaaagttgatggggctaatgtgattcagagattctttaaaataactctgccatcattaagaccagcgattttatctgtattagttcttggatttatttatacatttaaagtttttgatttagtatttgttatgacaaatggaggtccagttaatagtactgaactaatgtcaacttttgcatataaactttcatttacgcaattttcatttagtaaaggggccactgttgccaatgtattatttgctattttattctgcgtaagtttaggatacctcaaattgataaaggaagatgaggtgattggataatgaagaaggttattcttaaggataaacaaaaaaatataatattatgctgtgtatcaatttgcatagcttgtattatgctttttccaatatattggattatagtaagttcatttaaaaccaatgctgaaatctttgcatcacctccaacttttatacctaaagattttacattaagtagttatacagaccaatttacaggaaagagcagcataatagtaacactaggtaatagctgcaaggttgcattcgcttcaatgatcttagcatgtgtattggctattccagctgcatatggcttggcaagatttaggatgagagggaaaaaggtatttatattgatcttcttagtaacccagatgctcccagtagcactattacttacaccaatgtttttagtttataaaaatttacatctattagatactctttgggctccaattttatcagatgcaacaatatctgttccttttgtagttcttattcttagaacttattttcttgctttaccaaaagaacttgaagattcagcaaagattgatggatgcaatacatttacggcatttacaaaaataatgcttccaatatcttatccagggcttataatgacaggagcattttccttcttatatgcttggggagatttagcttattcactaacatttttaaccagccctgaaaagagaactatgacagctagtatatataatttcatgggcaagtatggaatacagtggaattccataatggcttatggagtgcttttggttttgactgttgttttaatatttatattccttcaaaaatatataattggaggattgacaaatggtgctgttaaaggctaagcatgaatttaattatttaaagattggagagttcatattatggaatctaataaggaaattaatttagatgatagtgtttttgaagcttacggaagtgtattaattcgcaaatatgactgtgaaacgttacgaattgagccttggggaaaaaaaagtttacgtatacgtagcactaagcaagcagaatttatatataatgattgggccttattgccacaagaaaattgtgaaattaagattaagattgaaaataatgaagcatatatagagaatggaaaaattcgtgcaaggattgataaggaaggaaaaattacattttataacgctaaagacgatgttcttttagaggagtatgtaagaaataggaaaaatgtaaatagattttgtagtgccttagagatagaagcacgtgaatttaagcctattcttggtggagattatactttaactatgagatttgaatcaaatccaaaggaaaagttatttggaatggggcaatatcagcagccaaatttggatttaaaaaactgcgtacttgaacttgcacatagaaattctcaggctagtgttccatttgtattatccagtttaggatatggaatgctatggaataacccagccattggaaaagttacttttggaaaaaatattacagagtgggtagcgaattctactaagcaattagattattttataacagcaggtgatactccagccgaaatagaagaagcttatgcaaaagcaactggaacagtgccaatgatgccggattatgctatgggtttttggcaatgtaaattgagataccaaactcaagaagagttattaagagttgctcgtgaatataagaaaaggaaccttccaatttcagttatagtggttgacttttttcattggccaaaacaaggagagtggaaatttgatttagattattggcctgatcctgatgctatgattaaagaacttaaagaaatgggcattgaattaatggtttctatctggccaaccgtagataagacaagcgaaaattatgataagatgcttaaaaaaggttatttagtaagagttgataggggaattagaacaactatggactttttaggagatactgttttttatgatccaacaaatccagaggctcgtgactttgtatggaaaactgctaagaaaaactactatgataaaggcataaaaatattttggcttgatgaagctgaaccagaatactcgatttacgacttcgagaattataggtatcacttaggtccaaatgtacaaataggtaatatatatcctgctatgtatgcaaaaacgttttttgatggcatgaagaaagaaggcaagggaaatataattaatcttcttagatgtgcatgggcaggaagtcaacgttatggagcacttgtgtggtctggagacattgattctagttttgaatctttaagaaatcaatttgcagcaggtcttaacatgggaattgcaggtataccatggtggacaactgatataggaggattccatggtggaaatccagatgatccagactttagagaatgcataattaggtggtttgaatatggagcattttgtcctgtatttaggttacatggcgatcgtgaaccacattcaaagccacttggaactagcggtggaggactatgtgcaagcggtgcagctaatgaagtatggagctatggtgacgaagcatatgaaatatttaagaaatatatgtttatccgggaaaggatgaaaccttatattactaaaatcatgaagcaagcacatgataagggaactccagttataaggccgttattttatgacttctcagaagatgagatttgttgggatattacagatgagtatatgtttggaccaaatgttcttgttgcaccagtactccataaaggagataggtcaagaaaaatatatttaccaaaaggtgcaaattggaaagatgtaaattcagggaagatatttagcggcggacaagtaatagactatagtgccccattagaaataataccgttattccttagggatgaagcagaagtttcaattatttaatgagaaagataagtaataagagtttatgctaagtaaactcttatttttgtttaaaaaacgaattctatgtttaaaatttgctattttataacaaaatagtaatagtacattaaacatagaggtttcattttatttgatacatcttgtagtatatgactcaatagtattttataaatttaaatgacatttaaaggagggcaacatgaagaaattatcgaaaaaagtattaattttgattactattataaatttttttggaatgatttttgaaggcagtgctggaagatatgatagtagagctatagtaaccaatgtatcagaacaaaaggatagattacagttgataaaagaaaaaggagagataactgttgcttcaccacaaaatgatgtttcatatttttatatagatccaagtacaaaaaagttagacagaactgaggctgatataataaccgaaattggaagcagacttggaattagtaaaattgaaaccaggaactcaccatttgtaaatttattagataaattaaatactgatgacagtatagatatcgcgtcaggtggaatatttataactccggaacgggaaaagatagtagccttcacacagccaatatacaaagccacagaagctgttgtagttccaacattttcaaatataaattttaaaagcgatctaaaaaacgcagtagttggagttgaaaagggcacagtatatgagagcatgggtgaaagatggaaaaatgataaaataataaaggatataacaatctttgaaaattcaactgaattattggatgctatatataaaagaaagatagatgcagggttcgataaattaaatttgggggacatatgtattttttttcgtaataaatggttaaatgaaagtattatgacaaaataatatttatatttatataaatttgctataaaaagcaagaaaacattgcaactttgtcaaaagtgtattagtatttaacagtgaaaattaaatttttagaggaatatattggggaaataatagctacaaaaattcgcatgattataaaatacttagaacaaaatcgcaggcgactgtggttaagttccgtattgtgcttcgcactcttttcatatgtgtagattttttcacgcatctgccttttcgaacgtatgtgagaaaaatttggcaggcgaataagattccttttttattagttttaaaatataaaaactaattaatctaccttttttaagttatccacagattttattggaatataaatttctaaagaataaaaaagcatttatctatgtgctttgataaatatggaggaataaaatggataaatcaacatcagaaaatcaaaatttatcgagagggctaaaaaatcgacatgttcaattacttgctataggaggtgcaattggaacaggactattccttggttcaggaagatcaattcacttagctggtccatctatcttatttgcttacataataacaggaataatatgcttctttgttatgcgtgctctcggggaattattactatcgaatttaaattatcattcatttgtagactttgtatatgattatttagggaacggagcagcatttattactggatggacatattggttttgctggatttcagttggaatggctgatttgactgctgcggggttatacatacaatactggcttcctaatatacctcaatggcttccaagtcttattgttcttgtaattttactaattatgaatcttacagcagtaaaattatttggtgaaatggaattttggtttgctttaattaaagttgttgcaatcttagcactaattgtaattggtatatttatgattattacaggattttcaacagatgctggtgcatctagctttgcaaatctttggagccacggcgggttatttccaaatggaataaatggttttattctttcattccaaatggtagtgttcgcttttgctggaattgaattggttggccttacagctggtgaaaccgaaaaaccagaatatgttattccaaaagctattaacaatattccaattagaattattattttctatataggcgcacttattgttattatgagcatatatccttggaactcaattaatccagataaaagtccatttgttcaggtgtttgcagcagtaggaattgcagcagcagcaagtattgtaaacttcgttgtattaacatcagcagcatctgcttgtaatagtgctatcttcagtacaagccgtatggtttattcgcttgctaaagaagaaaatgcacctgaatcaatgaaaaagctgacttctagtcaagtaccttcaaatgctacaatgttttcagcaattgtcattttgatttcagttattttaaattttgttatgcctgaaggagtatttgtgcttataacaagtatatcgacattttgttttatatatatttgggcagtcatagttatttgccacatgagatatcgcaaaactaatcctgaacttgctgcaaagagcaaattcaaaatgccactttatccaataataaactatataattctagcattttttgctttcattctagttgtattggcacttaataatgaaactcgtgttgctttatttgtaacacctgtatggtttatagtacttggtattatttacaatatacttaaagcaaaaaagaaaaatgaagaaaatacttagtagcatttatatatagttctgaaattttaatagaaagaaaaaagctatcttttacaggatagcttttttcagtgtaattattaattattctataaaagtagcatctaatggatttctatcaactaatctattataactatactttgaatatccaaccataacggcacctacgacttttttatctttaggaatattgaatgatttaagcagtggtgagtcttcaatggctatgcaatgctcgaaaattccagcccagcatgatccaagtcctagggaaggggcgaataattcaagataagttaacttgactattacttgcagtaggagccaatcttgcaatatcaattaattttgtcaatttttctcttgatacaggttcagttttgtaatttcttatggaacggcgagatcttaagaaatattctgcctgcttttcgtttagtttagcaaaatcttttaaatcaatctgatcttctaaaggtgattttttattatctatcgcactattaggacatatagcagtgcaatgtccacagggaaatacaatgattgttttcaatttcttctggtccatgtgaacccatctttagaaaagccacaggacattctttaatacataattcacattttatacattttgcttcattcacagtaataagattcattttattcaaattcaaaatcaccacatttaaataaattattttgattttccatttccatcaccaatatgcatatatcaagaaatttatttatgcaaattatcatttagtaatgatatgaatgcgcagtaatcttagttcttgcaagaaatatagctaatcaatcatggtaattttatcataatcctaggttaatataacctaaaatatattcataaaaaaatttttatattagggattgaaatatctggtaccatgtgttagaatttacttgtgaattggtaagaccaatttacgatatcgtatacaaaaaataaattagcgatagtatttatttgatggtgatttttaccaccaagatacagaatggttttatcaaaaaacaatttagcaatttaaaaggataaaggagagggaaagtatgcagattctgttatgtgtaaagcaggttccagatgattcaattgaaatccatttggataatgaaaagaaaaaacctaaattaaatggagtcagtttggttgcaaatgcatttgatacatatgcattagagctagcggttcgttttactgaggctcatggaggaaaagttagtgtattaacagttggagcagatgattctttaaacacattaaaaaattgccttgctgtaggagctaaagaagcattttttgtaaaagatgacttatatgcagatttagatgctatgggaacagctgatgttttggcagatgctattcataagattgaagcagataaaggtgaaaaatttgatttgattctttgtggaaaagaatctacagatgaaattactggtcaagttggagctatgctcgcagaaaaattaaagacaggctatgtcagcagcgctattgaaatcgatttaaaagataattctatggaaattcatcaagaaactgaagaaggatataatttagtttcactagaatgtccagctgtagtaacagtaagcaagccagattatgatccacgttatcctactataaaaagtaagatggcaagccgtaaggcagtaatcccaacttattcagcagcagaaattggagaggtaaaacaagcaaaagtacgttgcatagaatatgttgcacctcctaagaaagaggctggtatcaagattcaagagaaggatgctactttagcagtaagtgctgttatggagcaaatgaaaaaagataaggcaatctaattaaggaggaaacgaaagtatgaaagcattattattcattgaaacagatggagaaaaggcattaggtggaagtattgaacttattaacgcagcaaaagcattagatgcagaaggaacagctcttgtagtaggaaataaagctattgcagatacaatagcagcatttggaattccagttatttttactgatacagctacagattgtgatactttgacagaattattatcagaaactgttaaggaagaaaatccagatattgttttattagctaatacaacacttgctaaagatgttgcaccacgtattgcaggtcgtatgaatttgggatgcgtaagtgacgtaataggaatgagtaaagctgatgataaagttatatatactagaccagcttatggcggtacaatcttagaacatattgaagtagagggaacagctgtagtaacagttagaaatggaagtttccctaagccagaagccacttcaaatgcagacgttacagaaaagaaaatagaaattccagctgatgctattaaggcaaaaattattaatacagtaaaagaaatttctgaatctgttaatttggaagaagctgaagttattgtttctggtggacgtggaatgggaagtgcagaaaacttcaaactagttgaagaattagcacgtgtacttggaggcgtagtaggcgcaacaagaccagcaattgaagacggttggatttctcgtgcacaccaagttggacaatcaggaaaaatcgtagcaccaaaactttatattgcatgcggtatttctggagcaacacagcatacatcaggaatgacaggttccaattatattgtggcaattaataaagatgaagaagctccaatctttgaagttgctaacgtagcaattgttggaaatgtaaatgaaatccttccaattatgattgaagaaatgaaaaaagcaaaagcagaataaatactttttccagataagataaatggttatcccaccaaaaaagttggttggataaccaaaaaaataaatctcaattcacaagaaaatgaaattatgtataaatttcacacttgtatacttggagaattgttaaaaaacataattgaataagagacgcagcatataaaaaacaactaaatccgaatatatgtaaaaatagtattgaatcaacaagtgggaagctatgtaattaagaccaaaatagtaataacaatttttaaaaggttataccatttaaaaattgtatgaggaggataaaagaatgttgttttttaaattcttaatggcgatattacctatcatttggcttatagttgcactcagtggattaaaaatgccaggttataaagcttgctctattgcacttgttcttacaatgtttttagctatttttttctggaaattaaatgtggtttatactgtgacaggagtatttgaaggagtactcaacgcattgtggccaatctgtttagttatcgttgcagctttgtttacgtataatttaattttacgtacaggtgcaatggatttcataaaggaaatgttggccggagtttctatggataaaagggttttaacattaattattggatggggattcggtaatttcatggaaggaatggctgggtttggaacagcagttgctattccagcatctatgcttgctggtgttggattaaatccattttcagcagttctagcatgtttggttgctaacagtacaccaacagcatttggttcagtaggaataccactcgtgacactttcagcagtaaccggagttggatcaaacacattggcagtaaatacagtaataattgaaggaattctttgttttataagtccatttattatggtatgcatcgtaggtggaggaataaaggcattgaagggggcatttcttgttacattagtcgctgcattatcatttacagtacctgcttatattacagcaacagcagttggagcagaacttccagatatagtaggatctatctgttgtatggtatgtacggttgtagcagcaaaaatctttaataaaaagcctcaagacgagtattgcattcaaattaacaagaaaaaagaagaaactgctttatcatttggtaaagcagtacaagcatggtgtccatttatcttaatattcgtaatgttaatggctacatcaacattatgtgcaccagttcatgatgcaattgcagtatttaaaactagtacaagcgtatatgctggtaaaggtggaaatactctaactttcagctggattaatacaccaggtgttatcattcttgttgcagcagtcattggcggtctcgttcaaggcgcaaaaatatcaacaatacttgatgtactgcgtagcacattaaaagcaaactggaaaacaatcgttacaatttgtgcagttatgtcaacagcaaaggtaatggggtatagtggaatgatttcagatattgcaagtcttttagttgtagtaactggaggagcatacccattaatttctccattaattggagcaattggaggatttgtaactggatcaggtacatcaaccagtgttttatttggaggattacaagtacaaaccgcacaaaaccttggactttctggtgcatggatggcagcagcaaatactcttggagcaggtataggaaagatgatttgccctcaaagtattgcaattggtgcaagtgcaattaatcaatcaggttcggaaagtaaaattttaaaaagcgtatttaaatactttgtgtgttatgtagttatagctggaatagtatgttttgttggaacactttaaggcagttgatatatattacaggtgaccgtttaaagtttaccaggaaaattcagtagtttttagaaaattaaagaactttattcaaaagcctacattttatacccttagggtataaaatgtaaactgaattagttcggcgtagtaatttgctaaagaaagataaagtgaattttacatctaatatcttagaaaggaatgaatattatggctgagtataatcaattgacagaggagataatctcaaaattacaggaggcagcaccagggcatattttaacaggagctgatataaacgatgactatagtcacgatgaaatgcctatctacggaaaagtagctccacaagttgtgtttatggcacattctacagaagaagttgctgcagtggtaaaaatatgtaatgaaaataaaataccagtaactccaagaggagcaggaacaggacttacaggtggagcagttccactacttggaggagttttaatcgatattacaaaaatgaacaaaataatttcttatgatttagaaaactttgttgttaatgtagaagctggagttctattaaatgaccttgcagaggattgtttaaaacaaggattattatatgctccagatccaggtgaaaaatttgcatgcctcggtggaaatgttgcaacaaatgctggtggaatgagagccgttaaatacggtgcgacacgtgattatgtacgtgcaatgacagttgttcttccaacaggagaaattactaaatttggtgctacagtatcaaaaacaagctcaggttatagccttttaaatctaatgattggttcagaaggtacacttggaattattacagaactaacattgaaagtaatgccagcgccaaaggtagtagcaagtttaattattccttttgaaaatttagatgattgtatttctactgttccaaaatttagaatggaacacatgaatccacaagcgatagaattcatggaaagagaaattgttttatctagtgaaagatatattggaaagagtgtattcccacaagtaattgatggagttactgcaaatgcttatttactcgttactatagatgcaggtaatgaagatgaattaaataatcttattgagcaagcaagtgaaatagtattagaagcaggagcaattgatgttcttgtagctgatacacctgcaaaaataaaggatgcatgggcagcgcgttcaagtttcttagaagctattatggcagaaacaaaattattagatgaatgtgatgttgtagttccagtaaataaaatcgctccttatcttgcttttgtaaataaaactggtgaagagtgtggattaactattaagagttttggacatgcaggggatggaaatcttcacatataccaatgtagtaacgatttagaagaagaagaattcaagacaagagttgacaaattctttaagattatttacgaagaagcaatcaaatgcggtggacttgtttcaggcgaacatggaattggtagtggaaagatggcttatttagctgatagcgttggagaaataaatatggaattaatgaaaggtattaaggaagtattcgatccaaattctattatgaatccaggtaaggtatgttgtccgatagaaaattaagctcataattaaaaaatttatatatatattaacatcccatgaaataaaaaaggaaaagatgaaaaaaagaaaggtaggaaattaaaatggattttaaacaagatgaaaatcaccaacaattactagaaatgtatcgtgaatttgcagaaaatgaggtaaaaccaattgcaaaagaaatcgatgaaagtatgcgatttccagaagaaaatgtagcaaaaatggctgaaatgggcttgcttggaattccatttcctgaagaatacggcggagctggaatggacacattaagttatatacaatgtgtagaagaattatctaaatgttgtggaacaacaggtgttatagtttcagcacatacaagcctttgtgcaacaccaatttacacatttggtacagatgctcaaaaagaaaaatatttaaaaccacttgcttcaggtgaaaaattaggtgcctttggattaactgaaccagtagctggaactgatgcttcaatgcaaaagacaacagcagtattagatggagacaattatatattaaatggaagcaaaatcttcattactaatgcaggatatgcagacacatatattgtatttgctatgacagataagagtaaaggaacaaaaggtatttcagcatttatcgttgaaaaagacttcccaggattttcagttggaagccatgaattaaagatgggaattcgtgcatcttctacatgtgaattattctttgataactgtatagttccaaaggaaaatcttttaggagaagaaggaaaaggatttggtattgcaatggcaactcttgatggaggccgtattggtatcgctgcacaagctcttggtattgcagaaggtgcaatagaagaaactgtaaaatatgttaaagaacgtgttcaatttggaaaatctattgctcaattccaaaatacacaatttgaacttgctcaaatgcgtgcaaatacagaagctgcaaaacttttagtatatcaagctgcatgtgcaaaagatgatcatcaaaaattcacacatttagctgctatggcaaaattatttgctgctagaaatgctacagatgtaacaaatcgttgtttacaattatttggtggttatggatacacaagtgattatccaattgaaagaatgatgcgtgatgctaagataacagaaatctatgaaggaacatcagaagttcaaatgatggtactttcaggatggatgcttagataatatcataaaaaactagttaaaatgccctcacattaggcacatgagaaaataataaatcaacctgcatactgatttattattttcagattgtgaattaaacctatttaaataaactatatgaaaaagactaattaaaatgccctcacattaggcacatgagaaaataataaatcaacctgcatactgatttattattttcagattgtgaattaaacctatttaaataaactatatgaaaaagactaattaaaatgccctcacattaggcacatgagaaaataataaatcacctgcatactgatttactatttttggattgtgaattaaacctatttaaataaactatataaagataacaagttttctacaattgtagggaacttgttattttttatgcctttatatagataagctaactgtaaactttcaacactaatttaaaatacagactaaaatatacatatagttcgaagtacgaccacagaataattggaaaacattatcgatttccgtatgcataaaaaattgtaacatagttaataatttctttaacaaaacaattatctatatcgtaacaaataaatatttttgtagccacaagggtcataatatggagaatggaatttgaaaatgagctgctaaagatatttagcttatggttgttacactttgacttgtcacacccaaggcgggagcatgtttaagtgaccacaaccgtgagttcactatcttcagcgatatttttatagccattccaagcaaacatatttattgatctctagagaaattttaaaaggaaactcgacttacatacgttcgctgagtaagcgattcacaccgaatcacagattcgggttctctgcttaaaagccaaggtcttctccaattagtataacctttatcttttttgcgggcctgctagttcttgttgttaccatttgcgaacaaatacaatctgggcttagacagtctccacagctgccatttatatagcatggagtcttcatatcttgaaaatgctgcatatttgatggtgcagcaattgttctagctctttgaattgcatcatcaagagttttcacaactttattcattccagctacaactatgacgcttttaggtccaaaaatcatggctgctacacgattcccatttccatcgatattaaatagctgaccgtcttcgcttatagcattgctgctcattaaaaatgtatcacataaaagtgcttttctcataagttctgttcgttcttcaggactctttccagtatctctatctataacttgatagcatttttcttttacaagttcttttatgccaatttcagttaaggtttcagagccaccccaagacacaacatggttttctggaatcaaatccaaaatttgctgaactgcttcgtccttagtcttgcaataaaaagcatcaaaatgacgctttttcaaagcctcaattacctttgtgcttaacttatcataacgttttattaataaagattgtcttgtcattttaaaggtcccccttaattcatatattttattttattccttgcggagaaagttaaattgatatttctataatatatttataacataatcaaccagtttatataagagcgcacttttctgtaacatagtataaaaaatgatactaaaagataagtgaatataataatttattaggaatataattaagtaatgaaatcaaaggagatatggatttgaagcttgatttagataaaaaagatttaatttctttagttaaaggaacggacccaaatttaaatgtaatggagcatcctaaaataagttgttgtggaaattatagagtgcaaaatagtagatgggattggaatcaacatgtttttgaaaagtatactgatgaagaaatatatgaaatatataagatatgcaaaaatagttggggtgaatagatatccaaatttaaagctagatttatgtggtacttaccgaaatcataaatattttgttccgaaaagctatgaaaatatcacttaaaattctaagttgtaggtttcaccactttagcatgctcctactttcagtatgacaagctaaagtggaacaaccaacaactaagaatattagcagctcattttcaaatgttttctccatattatgacccttgtggttacaaatatatttatgatttctagtgaagatatgaacttaaagttttgaaaactttataaacatatttatctaataagtcaaattcttaaattgggtatctataagcgtggaggaatacacctctaaatataacgttaagtaaataagtaggttttgattcttggaagtctctgaaaatgcggcgttaacttcgcgtaaaatgaacttagtattgcaatcaagaagttactttttcattttagggggagagtgaaaaaatacttgacttagagtccactcaaagtagtagaatttagtttgtaataagaattacttaaatatttaattcaatttatgaatgagggcatgaaaattacaatttaatttactattttaaaagagttaaggagaaacgaagagatggagaagaaaaaattaggatttggatttatgcgtcttccgctaaaagatcaagaaaatcaagaaagtatcgattttgaaatgttaaataaaatggtagatacttttttggaaaggggctttacttattttgatacagcgtatatgtatcatgcatttaagagtgaaattgctttgagagaatctttagtaaaacgtcataagagagatagttttacagtagcatcaaaactaccaactatgtttttgaaaaaagagggagatcaagaaagaatttttgacgagcaattagaaaaatgcggtgtggattattttgattattatctccttcacaacttaggtgtatcaaattataaaaatgctcaaaagttcgatagctttgcatttgttcaaaaaaagaaagacgaaggaagagtaaaaaatatgggcttttcttttcatgataatgcagatttattagatgaaatcttaactgctcatccagaagtagattttgttcaattacaaattaattatattgattgggacaatgaaagtattcaatctagaaaatgctatgaagttgcaagaaaacataataagcaagttgttgttatggaaccaattaaaggcgggactcttgcaaatgtaccagaagaagcagagaaattgtttaaagaataccataaagatatgtctgtgccatcatgggcaataagatttgtagcaagtcatgaaggaataatgatggtattaagtggaatgtcaaatatggaacaacttcttgataatacaagttatatgcaggattttgtgcctttaaatgatgaagaaaaagaaattattaaaaaagctacagatattattaatagtagcattgcagttccatgtactgcatgtcagtattgtgtagatggatgtccaaagaatattcaaataccaaaatatttctctctatataataactataaacaatttggccctgggatttcacaggtctactataataatttaactcaagagcatggaaaggcttctgattgcataggatgtaagcaatgtgaaggacattgtccacaacatatagaaattacaaaatgcttaaatgatgtagcggctgtatttgaataagaattggattaaaatgaaataaattatttaagagctaagcaaaaaacaattttaactattgtttttacttggctctttattttatctctaattgagaggatatttaaaaaatatataaagaactaagctctatcaatgtccttaattagtcctaaatgttctggcttccatccaagtctttcttgagttaaagcattggatgctggaatatctgcagcaataagctgtcctagagctccaaaatggttagttgcctcttctagagatattgatttggttggtacactaagacgacggccgatagcttctgcaatttcgcgcataggtacaccttcgttagctactgcatgaaatattgatccggttgatgctttttctagtgctagtctataaagttttgcagcatcaagtctgttaacagctggccagcggttaaagccatcgcctacataagcagagaagcctttactgcgagctatttcaataagtatagtaaccaagccatatttttcaccatcaccatatactattggtgcaggacgaactactgacacacgcacgcctttagatgctagcgaaagtgccaatgcttctgaagccgctctaggacctgcggttaaactctcactagctctatcatcttcagttacgacatcgccaggcttgatgcctgcagttccaaatgtaactactaatggtttattagttcctgcaagtgcagagcctagtgcttcaatagcattacgatcagtttcgcagcaagcttcaaaatcagtaataaaattatcatgatcaaaggctgcatgaattactccgtctgataaagaagcaccactgcgaagactgtcaagatcctccaaagagccatgatgggcggtagctccaatagcagtaagtgatgcagctgatgcatctgacctagtaagtcctattacattatgtcctgcatcaagtaattctttaacgattttagatcctataaatcctgtagcacctgtaacaaaaatacgcatgttaaattccacctttcaagttgaatatgttatcatagttaaaagttgtgagttacaaaatataaaatgtgtaacttatatatgaattataacatttaagtttacgagttacaagtatctttatatgtaacttgataatgtaggatattttctttttccaataaaactttttaacaatgaaaaaaattaaaaagttacaaat

SEQ ID NO: 63 - DNA, 35008 bp, Clostridium beijerinckii
gcatattccctatcggggcgtaggcaaagtaataaattagaatattaaaaataataagaggtgtaatgttcgttagaaagataaatagttttctatcaaatgttacaactagattatacaaggaggttagtaatgaaaactaaaattaaaactaaaatactaagtccattcttatactttttaaaaagtgagtcttctagtggtataattcttttaatttgtgctattgtagcaattataattgcgaattcgagtttttcagggagttatgagcatatattgcacacaagtataacaattggatatggtgtattttctttatcaatgtcagttcttcattggattaatgatggattgatggctatatttttcttagttgttggtatggaaataaagagagaggttgtatttggtgagctaaaatcttttaaaaagacaatactcccaatatctgcagccataggtggaatgattgttcctgcaattatttatgcattatttaactataaggagccaactattacaggatgggggataccgatggcaacagatattgcatttgcaattggaatgctttctttagttgcaaaaaatgctcccaaaggaatagttgtatttcttactgcacttgctatagttgatgatttaggcgctattatagtaatagcaatattttataatagtcaaatttcatggatggcgcttttattaggattaatagtttttgctgcgcttatcttggctaataaatttaaaattaaatatatatctatttatattattttaggtataattctatggatttgccttttgaaatccggtatacatgcaacaattgcaggagtcttactaggcatgtcgttgccaattggagaaaatattcataaatttaaaacttcaatattgtataaacttgaacatactttaacaccatggtctagctttttaattatgccaatatttgcgtttgcaaatgcaggtatagtaattaatacagataatttttcaaacaatttgttttcatcaacttcattgggaattatatttggtctttttgtaggaaagcaaattggtatatttggaacttcatttattttaataaaattgaaaatagctaagtttccatctaatgtaaccaaaagacatttatatggtgcaagtgtttttggtggtattggatttactatgtcaatatttgtgtcatcattgtcatttgcagatgccaatatattatctgaagcaaaaatgtgtattatgattgcatcaattttagctgcaacatatggtacaatagtatttaaatttataaattttaaaaatgagaaattaaactacaaacaaagctaaaggctataagcattgaattttcaatgtttatagcctttacttaagccactttattagaatcatcactaggatctatatcaagttacattatcatattattaagttaagaatttatggtaggcttatttgggatcttggcaattaaaatctctgagcatttcagtaaataattctagtttagaatcgtcccattttgaaatacgttcataaaatagagattctttctcttttagcgcatcaattgttttttttcgtccaagttcagttaaagataataatattccacgacgatcattaggtgatatttcactttgcacatagcctagttttttaagttgattgacaagccggctgacagaactccgatccatagctgttgattccgctaaaaccgtggcacttgctggtccaaatgagaaaagccaacgtacaagtaaaaaggcagcaggttgtaatgttgaatcgaaacgagctgctgttttaacatttaatgcatgggatgcacttatgagtgcatttaattccctacctaattttaattctaattctattcttttaatattattattgtccatattacacctcgacttagtaattaaattatatgatacttgacatatgtcaaacaaacaaatataattgacatatatcaagtatatttgtttgtttattacatgtcaagtaatattaacacatgtattatatcaataatactttagaggaaaatcctacaagaaatattaaattagtatataaatattaaggaggattattatgagtactaatccaatagttataataactggcgctactaatggccttggacagatcgttgcaagtgaattagccaaaaggggtgctcatcttgtattgacagctaggagtaagagcaaagcagaagcgactgaaaggcttataaaaaatatagcgccggatgcagaaatagattttttctttggagacttatcactaatgaaagatgttaaaagaataggaaatgaaatcaaagattcatatccaaagattgatgttttagtgaacaatgctgggcttcatgcttttgagcaaagaataacttctgaaggttttccagaaatgatagctgtaaactattttgcaccttggttattaactaatatattaatagaatcattaataaagtctggaaatgctaggattgttaatgttgcttctgaagcatcacgcaatcacggtgagttaaaactgcctgatgatttgactgatataaatacatttacgtctagacagtcttcttctctttatggaaaaacaaagttgctaaacattatgtttacgggagtactttcacgcaaacttgaaggaactggagttactgttaatgcacttaatccaggatttaatgttacaggacttggacgtgaattatggtttgcctctacacttgaacatatattgaaatttctgcatattggagatccacgtagaggggcggatattattcttagattagcattggagaaagagtatgaaggtgtaacaggtggatattttaatgttggaactggtaaaccaattataccagtacaacctgcaggtaatactgatatagaagataaactttggaattatactaaagaattgctagaaataaattttttagcgcaagtttaggaaaaacaagcaagaccaattgaatagataaaagctaatggtgtgatttttaaaaaagagataatttttctaataagaatgttatctctttttgaaagtttaaaatgataccaatcttctttttaaaccactttattagaattattactaggatttacatctagagcgattccaagttttgctgatattatagcatttaatttattaattgaattagataggcttccaatttgtttttccaagcggattagtaaatatgcagctactgctataggaaaaccattgttagccacgagactaattaattcattagcatccatcatgttaccacctcctattaaggatatatggctaacatgtgtatttaacatggtaaatttaaatacacgcttatatttgatgattagtctaataatagaatatttaaaattgttaaattctcgatattattaatcaccatttatagtagtgtttttatgaaagtaatacagttccattagtgaagattataattgagtaatcatagtcaagtggcggtaaaatttgcttagggaccttttgatttagccttactaatgcctgcatggtctgatcagaatcgataactaagattattgatttactgtcaggtggagtaattcttgcagtaagtgaagaacctatcaataagttagtatctcttgcattataaacacctgtagtaaaacttctagtaggatttgcaaatgtagttgttatatttattgcaaagaatagaattatagaagtaaagaaaattgtaatatttttcttcattatttagccacctttcagtatctttataataagtaattagattgtttgattatattatttctaagttagaagaaaatattctgtctattgaactccttaaaatgcttttgggagagttaatgtttttaaatatgagcattggatagatttataaataacatatattctaatatagcaaagaataaatattgtgaagaatattaccatagaagaatacatatttttcagaatattagaatttagaaaattgatgtataatgtattaagaaatatcaataagaaaaggaggggaaataacatatgcttgtacctaataaaaatccaaaagtatatgatcaagttatagagaaaattaaggataaaataaaatatggagaaataaaaaaaggagataaattaccgacagaaagagagatggcagaatctcttgaggtatcgcgtgcatctgtgagggaagctataagggctttagaagtcataggattaatagaaagcagacatggtgctggaaattatatacgaacaaattttaataactctttgcttgaacctctttcaataatgtttatgctgcaggagagttcgccaaaagaaatgtatgatttaagggaaacactagaacttcaatgttctaaattagcagctaaaaatatagacgatagtgagcttaaactcttaacagagttattggataagatgtatgttgctagtagtgaagaagaaagtgttgaattagatattaagttccatcaattaattgcaaaggcatcgagaaatgtattattaattaatgtacttaatgttatatctcaacttgtagacgaattcatacggaatgctagaatgcaaatttttcatgagggaaatacaaaagaaagcttattatggatacatgagaatttattaagaaatttaaagaaaagggatgaatcgctagctcacaatgctatgcaagaacatttcgatctaattaggaaatcttatggatacgaaaattagaattgttcttgtaaatagaatattgatatcttataaagtaaagatccaaggccttaattaactttggatcttttaaacaattatatttttataattatatagaaatataattagagattttcttaagcgtaactttctttctaaggatagccgtagaataacacatatcttttaaataagcataatttttaactgtattattcttgaagaagagaaaatctataagttccatctcatcttttgttagattatttaaagctgatcttaattcatcataatcacatctgtcgcatagcaaatcttctaggggaacttcttgcgatgggatatctttttcaaaatcatcatacaaacgtagagcagcatttccttcagtcgaacttctgtttttaattttcctaatcaaatcatttatattattcttaatagcatttgtagcataagcaacaaacctatgtttatctaaattgtacattgaaacacatttaaaaaggtacttataacattcatgttgtatgtcatatatatcataaccatctatgaaagtctttttagaaatgttaaggattaaaggcttaaattcatttactaactgttcttttgctaattcatcattatttttacacttggtaactaaatcttcaatataattaaaatccatgtaaacctccttttaatttaagagtaatgaatgaaaaaacgtttatttcacatatattgtggttatttataaaattatatctatatttagtatatatggttgagagacatatattatatgaaaatataaaattaatcttttaattttgcatataaaattggtttacactgtgtttacaataataggaatatatgttattctgggtaaaaatgtatattcgattagaaaaagaattggagaatattatttaggatctgcagaagatttagcatggataattaagaagacggaggaagaagaagtgtgaaaaaaggagacaagttatttgtaagaattgattataagaataatgaattagaaactacagaaaaagatttccaagatcatgtaaaatatttaaatgatattgctagcgaaagatactttgttggaggaggattcgctaatgctagtggtggtatgattatatttaaagccaaggatttacaggaggcaagaatgattgctgaaaaagacccgataattaaaagtggactatatagagtacaggtttatgaatgggatttgctgatatcatcagataataattagctgtgcagtagaaaagatatattttataatctttcatgtgaagtaatactttttacacctaatatgagaggagtaggataatttgaataaaaatccatatgaacaatttccacatatttcagatgatgaaataacactaagaaaaattgttgatactgaccttgacggaattttcgaaatatatagcaatgaagagctttttaaatattctcctattatgattaaaaagaataaaaatactgttgctaatatgataggacattttgaaagagattttcataagaaaaaatgcatatttcttggtatatgtctaaataatgaacctgagaaggttgttggaatagcagagatatttgactattctagcgaggtaaatatgataactataggctacaggttgaacgataagttttggggtaatggaattgctactaaagctgtaagggtaatggtagactatttatttaatgacattggaatcaatagaatacaagcatttatcatgccagaaaatattaaatctcagaatgtattagaaagaaatggttttattaaagagggtacaattaggcagggatatacttggaagggacaaggtgttgttgatttgaatctatattctttattaaaatctgaagctgaaaaatagatatttttatttcctaaatttctcattttgtataccaacaatcaaatcacatataatactataaaggataaaaccaaggagcttattttaatgctagatgtagaaactaattttgatgaattagtggattattctttgagttagaaaaaagtgataataaatatctaatctgtaaatttaagatttatggaaagaaaatcctaataaacatagattcttctctaataatatgttactataattatatccataatattactagaaaacaccaataaaggtaagtcagttagaaatacttggcatgccttttttataaattttcaaaattttatatgcaaaaatcaatcatgaagcagaaataatcatattaattgccaggaaaataaaaattaataagaatgtatattttactttgttcttataaaagtattgttttatgaaatgttgggaatacttaataatgggaaaagtctagtaaactataaatcataacttgcttctacaagtgatgatatgcttgacaaatcaaaatacaatatttttataaggaggatatttatgaaaacaggtacagtaaagttttttaattcagaaaagggatttggttttatagaggtagagggagaaaaagatgtttttgtacattcatcttctctttcaggatttagtatacaagaaggagataaagttcagtttgatgttgaaaaaggtacaaaaggtcctcaagcaaccaatattcaaaaagtataaaatagcttcttgatgtttattaacaacataataggtgatttttgccgccttgtttaaggtggctttttattgaaataaagtaaaatttgattaaggtgggggattggaatcaccatctgaatcttagttgaaccaatcttagggcatgttactgttatctacaacctaaaaagaggtgggagtgttacattgtctagagatcagataaatttataaaaaagaaagaaggggttaatttgggaaataaggtatttagtgaattaggtcttgatgagagtattcttaaggccattgatgcaatgggatttgaagaaccttctaagattcaagctgaggtaataccagttcttttagaaggtcatgatgttattgggcaggcacaaacaggaacaggaaagacactggcatttggtgcaccaatattaagcagaattggaaagcaagatggtaaggtaaatagtataatactaacgcctacaagagaacttgctatacaggtaaatgatgaattgaatcgtatagctaaatttactaagattaagttgcttcctgtatacggtggtcaacctattgacaggcagatttcagctttacgtagagggatagatatagtagtaggaactccaggtagagtgttggatttaataagaagaaaagttttaaatttgagctctattagatttcttgtattggatgaagccgacgaaatgttaaacatgggatttattgacgatatagaagaaataataaaaaattcaaatcaagacagacagacaatgttgttttcagctactatgcctgaagaaatcaaaagacttgctaaaagatatatgaagtctgaaacgaaacacatagccattttaaaaaatgcaatgactgtagctacagtggatcaatactattatgaaattaaaaacaaggatagatttgaaacactatgtaggatacttgatgttgatgaacctacatctgcaataatcttttgtaagaccaaaaggaacgttgatgaacttgttgaaggtcttcagggaagagggtatactgctgaaggaatgcatggagatatgaatcaaaatcagagaataaataccttaagaaaatttaaagaaggaaatttagaattcctgatagcaactgatgttgctgcaagaggcatagatgttgaaaatgtaacgcacgtaataaattacgatttgcctcaggacgtagaatcctatgttcacagaataggcagaacaggtagagcaaataggaaaggtgttgcttacacattggttactgcaagggaatatatgtctcttaaacatattgaaaaggttacaaaaagcaagataagaagaagagaaattcctactgttgatgaaatatttgtttcaaagtacaaaaatatgttttcaaagataaaggaaactttggagcaggatagctataagaaatttataccaatggcaacagaacttgatgaagagtttaaccttgtagaagtagcagcggcattaatggatatggtatatagtaaagaagtgaactatgactatactgaaaatgaaataggttcgaagacagattacaagagactgtttttgaatgtaggacgcttggataagattaatccaaggaagctagtggatttctttaatgagaatgcaaaggtaaaaagagaagatgtcggagatattgatattcttgaaaagttttcatttgtaaatgtaacagaggctgcagcggaatcaataatgaagcattgcactggaaagaaatttgctggaagaaagctaaatgtcgaaatttcaacaaaatcaaaaagataatttaaaactatacctatgaacaagacacatgaagaaagtgtttggtctataggtattttttttattgttcttggcgtagggacagaatactagaaccaatatggtaatattctaaaaaatatatattcttgagaatatgcacattaaaaagaaaatggtagaacttacatctattaaggattccgaagtttcagagatatttatgatttattaatgctaatatttagtattgcattttgtaatttccaatgttatacttcttttaaggtactcgtgtaccttaaaagaagtataacattcgtagtatttagattttgtaaattctagattattaattggattagtagagtggtgacttatctccaatggccacaaaaatgttatcttatacttgctgttataagccagcaagcactatcgatagaattagaaatcgctaatcatggttcattaatagaagatttaatagctttatttaaggttttagatccaatctttgaaattataaaacctaatgacctacgagatgtaatttcagatgaaggcataaaatagattagtttgttaaaggagtaattaatttatgaagaaatatgtattgctaattatattaccaacgcttataggaacctctctttttacgggatgcgctgtaaaaaacaataagaatgaaaatgctattcaagtagaagcggttaataagcaaaattccatatatcttatggctggaaggattgagactgataatcaagttaatgtatcttcaaagatttctgctagagtttcagatgtattagttaatgtaggatcaactgtaaatcaaggtgatgccgtgattaaattagatactcaggatcttcaagcacaggtagatcaggcacaagcagcagtaaatactgcaaatgcaaatttaaataatgctatgaatagcactcggcctgaacaaatatcacaagcagaggccgctttggatagcgctaaagcaacctatgatgttgctaaaaagaattatgatcgtacaaaagctttagttgatgctagcgcagctacagaggttcagcttgaaactgcacagcagcaacttacctcagctgagtcaggacaaaagtctgcagaagaacaattagaaatgcttaaaaatggtgctacagaaacaagtatagatgtttacaaggctcaagtacatcaagctgaagaagcagtaaaaacagcgcaggtggcattaaataatggaactattacagcacctatttcaggtaaagttactgttaagagtataaataaaggtgaaatggcagcacctggcagtacgcttatttcaatatctaatcctgatgctttgtgtgtgaatgcatatgcacctctaagggttataaaagatttgaaagaaggacaagctgtagaagttaaagtatccgaaatagaagattcagaatttgaaggaaccatatcagtaataaattcaacattaaactctcaaaactccaatgttttagttaaaatagttttaacagattcaaaggggcaattgaaaccaggtatgtttgctgaagttggtataaaaggctaagaaaggatgacagggatgaaagaaaaacgtaaaacaataattttattaatattatgtgcaatgttaattacccttggtagagtaggtttttattactggtataacaatgaaaactttgtttcaacagaagatgcaaaggttgatggagattttatcagcataactccgcaagtatcaggtaaacttcttgaatttaatgcaaaagaaggggacaaagatgtaaaagatcaaattttaggtcggctagatgctaatggcttagcagatgctaatattgattcagtgttacttagagcaccaactaatgggataattattaaaaaggaaactgaggagggacaatatgtttcggctggatcgacacttgcagtaatgattgacccagaaaagctttatataactgctaatatagaagaaattaaggttgaaaaattacatgaaggacaaagtgtagatataaaaattgaccaatttgaagggaaatcatttaaaggtaaagttgagtatataggaaaagcttcaaattcagcattttcacttttaccatcctcctctggtggaactttcactaaggttgttcaaaaggtacctgtaaaaattgaatttgagaaaaatgatgctaatcttctacctggtacaaatgcagatataaaaatacatataaagtaggtgggagcatggaaaataaaaaagaatcttcatctaaatggcttattatgagcgttgtaatcatggcgatttttatggcaaatcttgatacaagcattattaatatctctattactaaaatgatgcagacatttaacgcatcaatagatcaaatacaatgggtcgttagcgcatacactctaactttgggagttacaattccatcaacaagttattttggagatagatttggaactaaaaatgtatttgttactgcgttgattttgtttactttaggttcgttactgtgtggtgtttcatggaatgaaactataatgataattgcaagagtaattcaaggaattggaggagcttgtataatatcccttggtatgacaatattaatgactacttttgataaaagtgagctaggaatggcaataggggtaatgggaatgtgcgtaatggcggcacctgccctaggaccaagtttaggtggatatatcattcaaaatttcaattggagatttctcttttttataaaccttccagttggaatagcagctacaataatggctatacttatatttaagaaatcggaacataagtcatcaaagaaattcgatattattggatttttaacttcaagtattggaatgtcatgcgttctctatgtacttggaaaaagtgatttggactggaacgacataaaaaatatcattcttatgattattggatgttacagccttttaatatttgtcgtgaacgaattacttattgaagaaccattgcttgatttaaaacttttaaagaattataccttctgtatgagcaatattataatgaatgttgcgatgttagcactttatggtggtgtgtttctgatgccaatatttcttcaacaaataaagggtcttgattcgatgagtacaggcttgattttatttccagaagcaatagccacagctatatccatgattttatatgggaaaattggtaataaatttgacgttagattatttgctgtatttgcgttgattttgataggcattaacagttatagtatgtcaaaaattacgttggatactgccaatatagagattacagtcttattaatgattagaggttttggcgtaggatttcttatggcacctgttcaaacagtaggttttagtggattaccaaaggcagctatgtcaaatgcatctgctttgacaaatacagttaagcaagtagggacttccataggtgtcacaattattacaagtattatgcaacatagaaatgtggttgattattctaacttagcttcgcaagtgacatcttttaataaaaatagcatgaagttatttgaaatgcttcaaggtgcacttattaagggtgggatatcaggcagtgatgctaaaggaattgctttaagtaagatttttggtgaagttgcaagtcaggcacagcttcaagcacttaatgagacaatgtttataatttcaatcataactgctattgtaataattccaacacttttattaaaagaaggaaaacaagaagaaacaagcgcagtagtggcagaaggataaaaacgacttaataaggtattttaaaaataaaatcattaattgtcagaatgatatagaattaataaatatacagttacaattgtaagcatatttttcatgaaatctattaagacattaataataacagctctaaggtaaagattgaccttggagctgttatactttcatcttatgcctagataaagtaaaaatttatagatataaggagtagatgtgtaaaaatgagcagtttataatagtagcaggccgtattattataagtggacatattggttgtgaagttattgataggttagtttagaatgattgaattattaaaatactagcattgattaacgatgaataaagtggtattttatattataattatgttaatttatgagagaaagctaaaaattagccatttaggtggggcatactttagcgaaagtatttgattaacaaagaaattagaaggagatattgtaattatgatgataaaaaaacggctagctatgtcaaatctttttatgttgatagtcccagcaatattgatagtagttattgcagttggagttctagaaggatttacagagatatatggtaagaaaataaaagtttttgaagaggatagtggaatatcatttattcagaaaactttatttatgtataataaagaaattagaaataattatgataaaattaatgattataacaagacgaaggaagatcttaaaaatgccggttatgattttataatcacaagtgacggtgatacgatattttctaatataactgatgctgataaagttgctatgtctaggcttgaacgtgacgttcttacatcttcagattcaatagtccttgaggttaattctattagtttagttaaaaatagtttaactaaagatggaaaaaatattaatatgcttgctgtaaaatcaaataataatttaatgagcagacagcaaatgaaagcagaggcaagaacatttctattaagttacatgggggttgtattcatagtagcgctgcttataattattttaactaatgggatattatcgtcacgagtagctaaaagtttgattaaacctttagagctactaagctatggtgcgggacaaatagaagaagggaaccttgattttaagctgagttatcaagggacagatgaatttgcaaaagtttgtagggattttgataaaatgagagtaaggcttaaagaatcaattgatatgcagctaaaatatgagcaaaatagaaaggaattggtcgcaggaatatctcatgatttacgtacaccattaacaacaattaaaggatattcaaaaggattaaaggatggaattgcaaatacagatgaaaaacgtgaaagatattatgaaattatatatagtaaaacttgtgatatggacaagcttgtagataaattatttttcttttccaaattagatactggaaaatttccttttaactttgaaaatataaattgtaatgagttctttttagatttttttagcaatgctatactagaatttagaggtaaggggcttgatttaacttataaaaataattgtaaagataatatttttattagaatggattttgaagaaattcgaagagtgcttacaaatatactcgagaatagtgtaaaatacaaagtgaaagaatatggtaaggtagatattaccatagaagaagtggaagacagcgttgttttaaaaataaaggacgatggaccaggggttttagaagaaaatttgtcaaaactatttgctagtttttatagggaagaccaatcgagagccaattcaagtgaaggaagtggacttgggctttcaatttgcgaatatataataaaagctcataatggcacaattactgctgaaaatgacaatggattagccattattataactttgccgattaataagaaaatttagcatatatactctaaaaagtttaatttataaaaatatatcttaagctagaaggaattgtgtactaaacgataaaaaatgaattgtattgctttaaattcgtatattgactgttataagaaaaattatattgtttatcaggcttaattgcatataaacataatgggagaaaagaagatgcgaaaaatattgataatagaagatgataaattgattgcagaactagaaagggattatcttgaggtaagcggatttaaaactgaaattgcctttaatggagaagacggattaaatttcgcattgaatagagaatttgatttaatactgcttgatttaatgcttccaagtaaagatgggtttcagctttgtaaagagataagaagtaataaagagatacctatactaatggttacagctaaaaaggattcggtagataaaataaaaggttttaatcttggagcggatgattatattgtcaagccttttgacccaagtgagcttgtcgctagagtaaatgcacatctttcacgctatgatagattaacttcaatggggaaaaaagataatataaataatggagtcatggtgtttaaacgattaaaaatattgaaaagggaaagaagggtatatgttgctgataaagaagttaaattggctaacaaagaatttgaacttctgctatttttagcaacaaaccctaatatcgtattttcaaaaacaattcttttagatagaatttggggcatggattcctttgctgatgttgcaactgttactgtgcatattaatagaataagagataaaattgaggaagatagtagtaatcctcaatttattgagactgtgtggggcgcgggatacagatttaaattatagttcgttattaaaaatatcacaaatgagataagcaatattacttatatttaagttataatttctaatgaatatgtaagattgaagttttgacaaatttgtaaatatgtttatttaaaaatttgaatgtttaaattatatatctataaaattaagaaaagatcttaggctaataataaatttattaatctaagatctttttattttctagtatttataatactagaaaggagcgaaacttttgcgttttcaaaggcagttatataaataaatagacaaataatatggggctaacttgcaaaaaaagttatcaagagagtgtgttgcgtagccacttatgtttttatcttggaatttatatcgttagtttcagattatattttaaaatctaaaaaagtttagaaattgtttataaagatatgaaaaaatatacatagatgcccagattaatagtgttctacataatatggaaatataaaatataactaatgacaatgggattagataaaaattatgcttctaagaattacggataagttaaatgttaaattctcggaagtttaataaacatgagcaaaaatgaaaattatcctataggagcgtttaagaggagtggaagcacaagaaaatgttgaagtaattatataagaaaagcaaatacatggtgtgttataaatagaggaggatcacaatgaaaaacgtaaaaaaaatagttgtgtatgctgtgattattgcagttattgcagggggagcaactgtagttaaaagtaagttatcaacaagtgctaaaggcaaaccaactcaggcagttgcaagcaaaacatcggtagaagtacagacagctaaaacagtagaaaaaaatatgggagatacatacaaggctagtttagaagctgttcagcaaggtacagtaacaagtaagatagcagcaaaaattatttctgtatcagttgaaaatggacaatatgtaaatgcgggtgatacaatagcaactttagatgatcaagatatacaaaatagtataaaaactgcacaagctcaaataactgtaaatgagaaacaagtagaagtcgcagagcaatcattaaatgtatcccaggcagccctgcaaaaatataaaattaatttagatgatgctcagcgtaattatgatagacaaaaaacattatttgatggtggagccatatcacaaacagatcttcaagcatctgaaaaaactttaaattcagctaaggcagattatgattcaggaaatgcaagtattcaaagttcacaagcaagtattgaaacagcaaaagcaaatttagaagcacagaaggtagctttggataaaaatcaaagtgatttagccaatacagtaattaaagcaccgataagtggagtgataagtggtaaaagtatgaatgttgggcaaatggcatctacaggtacagcccttgcaattgttaatgatgtatcatctgtatatgcaacaatacaggtaccacaagaaaaaataagtgaagtaaaaataggacaggcagctaccgttatagttgaaggaagtgaccaaactcataatggaacaatacaaaccattgatgcagcagctgatccaacttcaagggtatttaactgcaaagttaaaatagataacagtgataagtctttattgccaggtatttatggaaaggtaacgcttgtaagtgatcaaaacaatgaaataatcactgtaccagtcaatgctttggtaggaaatgagggcgactattatgtttttattaatgataatggaacggttaagaaaactaaagttactattggagaaactaatggcaataatgtagaaatagcatctggcattaaagatggagatcaaataatctgttcaaatacaagtacactgcaagacggtagtgaagtagatgcagtagtaaagcaagatgacagcacagaagacacaacttctaagtaggagggaccataggtgaatatagcaaatattagtattaaaagaccagtatttatcacagttatcatgttagtttttgcgattgtgggtatggtatgttatgaaagattagttgttaatgacatgccagaagctgagaatgcatcagtttcagtttcgattacagaaacaggaggatctccaacagatatagagacaaatgttacaaaaactgtagaagatgcagttggaaaaatttcaggagttagtcatataacatcaactgtaacagaaggaagttcaaggactaatatacaattcgatttagataaagatccagaagttgcagcgcaagaagttagagataaagtttcaagtatcagggggttaccaagtgatatagatacaccgattatttctaaattcgattcatcagcaacatcaattttatctgttgctgtttacggactagatgataatcaacaattatcagatgttgttgataatattgaaaagaaattatacacagtttctggtattggttcagtaaatatatctggtgaagatacaagggaaatccatataaagttagataataataagcttttaaagtatggacttgcaacaactgatgtatcaaatgctattaaaaaagataatgtagaccaatctacaggtaaaatcatcgataaagataatgaaatttctgttaaaataagcagcaagataaaaaaagtagatgattttaagaatattttaatagctaataaaaatggtacagaaattagagtaaaagatattgcagaggttgaggacggagttgcagatagaagcagttatgcatattacgatggaaagccagcaattggtattgatatagtaaaacaatctggttcaaatactgttcaattggcagatgatgtaaaaaagacattgactaagcttaaatcctctttaccaaaaggggtacatgttgatattgtaagtgatgactcagtatcaatacaaagtacaatagatagtgttttagaaactatgagagatgggtgtatattagcggttgtcatagtattcttatttttaaatgaatgggaaagtacccttataagtgcaacaacacttccaatttcaataataacaacttttgtttgcatgaaagtaaaagctttttctctaaatacaatgactttaatggcattatcagttgcagtagggcttttaatagatgatgcgatagttgttatagaaaacattgtgcggcatttgcatatgggaaaatccccaagagaagcagctagagaagcgacgtctgaaataggctttgccgtaatagctacaacatcagctgttatctctgtatttttgccggtatcaatggtaagcggaacaattggaagatacttctttcaatttggacttacagttgtatttagtatggcagtttcgttatttatatcctttactcttgtgcctatgctgtcatctaaaatgctaagaataaaaagaaataagaaagaaaatattcttagcaaattctttaagggatttaatagtaagtttgaaatattagcgcacaagtattcaaggcttttagttatgtctcttcatcatagattagtaattataatagttgcaggagttatgtttgcaggaagtcttacacttatttcatctcttggatttactatgatgccatcaacagataataatcaagtgactgtaagtgcaaattttgattcaggtataacattagataatgcatcagaaaaagctaaacaaattgaaagtattattaagaaatatccagaaatcaatggcatgtatactactgtttcaaaaagtagttcatcaattaaaatagaactaacagacaaaaacaaacgtaaagaaaattcaagagattttgctagaaaacttagtggaaatctacagaacataccaggagcacaagtttcagtagcagctgcctctatggcaagtggtggaagatcatcaaaagatgttacttttgagcttgttggagacaatagggaagagcttcaagcttttggacaaaaagtaaaagaagaattggctaaagagtctggggtaagagaaataagtagtaatgataaatcgggtcttccagaaatagctttagaagttaatcgtgataaagcagcagatttaggagtaagcagttcggatgctgcgactacattaaagactttatttagtggtacgactgtcactaagtatgatgatggaaaaaatagagatgacgtagtattgtatttacaaaaagatcaacgtgcaagtcttgataatcttaaacaagtttatgtttcaggttcaaataataagcttgttcctttatcagaagtaacggatgaggtttttgaaacagcgtcagcacaattgactagatatgatagacttgcagaaatgcagatttcttgtaatatttcaggttcagcttcaggtactttcatgaatgccttcatgaaaaagattcaaactcaaatgaatatgccagaaggaatctcagtatctttaggaggaactggaggatctatgacaagcagccttggaagtttagaacaggcaatggcaatggcagccttattcttatatttagttatggcagcacagtttgaaagctttgttgatcctatatccatattattctctttgccacttgcaattattggagctgttttaggtttatttgtttgcaaaactcaattaagtttaatgtcaataataggtataataatgcttatgggcttagttgcaaagaacggaatattgcttatagatgcggctaaacaaagaattaacgaaggcatggaaagagaagaggctataaagcaatcgggtttaatacgattgcgaccaatagttatgacaactttagctatgatctttgggatgattcctcttgccgtatctaagggtatgggttctgaaatgcgtgcaccaatggcagaagctgtaattggtggactagttacttctacaattttaacattatttgtagtaccaatcatgtatacagtttttgatgatttgaaaagaaagtttagaaaaaagattcattctaaagaatcacaaggcacagaagatatcaatggaaatataggtttataaggtgaaagataaaagagattattcaaaattcagttttggatagtctcttttaactatcaagaatgaattcaactatgtttagacaaggagttatgatattattaaaattaacaaatatttttaaggaatggagtgagaatggtggagataactaattggttaagaataatattagattccttacatgatggagttcttatagccgataaaaatgggattataaaatatactaatccggcatatacaaggataacggaagttagtggagaagagataattgaaaagcctttgtctgaggtgagaacaggatctagacttccacatgtaataaaaactggtgaaaagttattaagggttcctagaaaagtaggagatgctgaatatatagtaaatatggtgccaattattgaaagtaatgaaataattggtggtatttctatattgaatgaaataactgaaatatataaacttacagaacaattaaataaatcaaatttaataataagtaatcttgaaaaaagagttaagagcatgaataaagtcaagtatacttttgatgacataatttgtgttgatataaattcagaggaaactaaaaaattgtctcaaaaagctgcaaggagtgaatctaatatacttattactggtgaaagtggaactggtaaagagctatatgctaattcaatacatgcatatagcaatagaaaaaatggaccttttgttgcagtaaattgtgctacgtttgatagtaacttattagaaagtgaactttttggatatgaagatggtgcatttactggggctaaaaagggaggaaaagaaggactttttgaattggccaacggagggacgctttttttagatgaagtatctgaactagattatggacttcaggcaaaattattaagagtacttcaagaaaatactattaggcgtgtaagtggactaaaagaaatacatatagatgttagaataatagtagctactaataagagcttagaaaaaatgatagaagaaaataaatttagaaaggatctatactacagaatagcaatatttccaataaacataccaccattaagaaatagacgccaagatataaaaccattagtaaataagttcataaatcaaatggcttataaaataaaaagaaatatcgaaatttctgaagaagctgttaatttactatataattacgattggccaggtaatatcagagagttgaaaaattctattgagtttgccgcgaatatgacagatgactatattattaatcctgaacatcttcctaaaattattcagacagaggggataaaaaagaatattatgaaattaaaatctcttgaggaaataataaaggatgcagagatttcagtaataaatgaagctattactgtttatggagatactgttgaagggaaaaagaaggccgcgaaagctttaggaatttcattggctacactttacaacaaattaaaataatatttctaaaatattataaattatgcattttgtatttcttagtttttagaataaatttttaaaacttaattacagggttataatctattgaaaatgttaacctatacaatgttaaaaagataacaaggattggaggtattaacgaccaattaactagtttttgataaaccgtcagaaagtaattctaagattttagaatatttattgacggtttattaaatttaatataaaaatcatgagagtaataggtcttattttatattaataaattttgaagttaaagatgcagaaatccgcattaactataataatcaagaacgttttcaacatatatgaatagtgctttttttcatatttttcttaatattctaaaataaatatgataataattaattttggcacagctattgctatatataaaagtgaaaatataaattaaaggagggttattaatgttagctatacttggtttcataactatagttatcctactagcactaataatgacaaataaagctacgccagtgacagctctcatagctgtgccgacagtagcagcactaataggcggatttgggaaaagtacaggtgattttataatcaagggtattacatccatagcgccaaccggaactatgttcatttttgcaacgttattctttggaattttaactgatgcagggacatttgatccaattatcaagaagatatttaaattagttggaagagatccagtaaaaattgtattaggtacagctattctatctatgtttgttcacttggatggtaatggagcagtaactttcttggtagtcataccagcattacttccgttatttgatgcagtaggaatgaaaaggaccacattagcaaccgtggtagctttatcagctggtcttgttaatatggagccttggggaggagttcctcttagagcaatgtctgttcttaaggtatcttctacggaattattcaacccacttcttgtacctattctagtaggtgctatattcatattatttatagattatagattagctaagaaggaagttggaagaattggaaaggaaaaccttttaaatactgatataggtgaaatgataattgatgaagaaaaacaaaaactttttaggcctaaattattttgggttaatattttaactattattattacaattggaatacttataaaaggaatgtttgcaccaacagcagtattcatgatttcattcactattgctttaattataaattatccaaatgtaaaagagcaaaggaaaagaattgatgctcatgcaaaggaagctcttttgatgtctagtatattatttgcagcaggtgcatttgtaggaattatgcaaaattctggaatgattgaatcaatggctaaagtattaatttctatagttcctaatgcgcttggacaacatcttgcagttattgtaggtattataggaatgccagctagtttaatatttgatccagattcattttattttggagtgttaccagtaattgcagaaactgcaaaaggatttggtgttccagccatagaaataggcagagcagcattacttggacagatgactactggattcccaatcagtccacttacaggttcaacattcttattgataggactttcaggagtagagcttggagagcatcagaaaaaaacaataccttatgcttttgcagtaacaattgtaatgctaataacggcggtactcataggggtaattaaattctaaacatatgtattaataaagtactatatttaagattataattatttagttttaattgagttttaagtggaatttgtaaaatgatttaatctattaagaagttgttaaggaatctagaattttagaaagtagtactaataattcttaaattctagaaattcaagtgatgctgtaatgattggatagattcatataaggtagagggcggttaataaagttttatttctagtattttagaaataaaactttgcctagaaagctacatattccttaatataatattctgagaatagtacattaggtaaatttagaaatttaagtttacaaaattgcagatttggcacaatagttgctatgtatactaatatataaattattgacaataaggaggtcattaaagtgaaaaaagttagaataggttcaggagctggttatgcaggggatagaatagaaccagcagtagagattatgaaaaagggaaagcttgattatataatatttgaatgtttagcagagagaacaatagcaataggacaacaacaaaaattgaaggatccaagcaagggatataatgaactgcttgaatatagaatgaaacatgtggtgcctctatgcaaaaagaataaaatgaaggttataacaaacatgggatctgcaaatccagtggcggcagccaaaaaagtaagtgaaattgcaaaagaattagggattgaaggattaaaaattgcagcagttcttggagatgacatttttggaaatatagataaatatatggattacaaaatacttgaaacaggagaaaaattggaagctataaaagagcaaatagtttctgccaatgcgtacatcggaactcaggggataatagaggctttaaataacggagcagatattataataaccggtagagttgctgatccatcactaactttagcaccattaatgttcgaatttggatgggataagaataattatgagcttctaggtaaaggtactttagcgggacatttattagaatgtgcaggacaggtgactggtggatattatgctgatccaggatataaggatgtgccagaactatggaacttaggtttcccaatagcagaaatatcagagaatggggaaatagtaattacaaaacttgaagatgcaggtggaatcgttacagaggatacttgtaaagaacaaataatatatgaaattcatgatccggaaaattattttacaccagatgttatagcagacttctcaaaagtaactattaaagaaattcaaaaagatagagttttagtaaagggtgcaagggggaaagcgcaaactgggttatttaaaactagtgtaggttataaagattgctatattggtgagggggaaatgagttatggtggctcaggagcctatgaaagagctgtgttagctggagagataatcaaaaagagattagagtatataaattcaccaattgaagagttaagagtagatctgattggggtaaattcgttatacaaagattctttaagtaattatctaaatgaaggaaagaatgattttaaagaggtaagacttagagttgctggaagaacattgaaaaaagaagacgcggcaataattggaaatgaagttgaggcactttatacaaatggtccagctggaggcggtggagcaaggaaaggtgttaaagaaattgtatcagtagcttctatatttgtgccaagtgaagatataaatataaaagtagtttacgaggaggtatagaaaaatgaaattaagagagattgcacattcaagaacaggcgacaaaggaaatatttcgaatatatcacttatagcttataaagccgaagattataaagtgataaaagaaaaagtgactacagataaagtaaaagaatggtttaaagacatagtacatggagaagttgtaagatatgaattacctaatattggtgcattaaacttcgttatgtatgatgcattaggtggaggcgtaacaagatcattatcactagatatgcatggtaagagtttaagttcagtcttactggatatggagatatagaaatttattttcaatattataattattagcaaaggagaagaggtatggctaataaaattaaaagtgttagtgaagttattgagtttataaaagatgatatgacggtaatgataggaggattcatggcagtagggactccagaaatattaattgatgcaatacttgaaaaaggggtgaaaaaccttacaattattgcaaatgacacaggattgccggataagggaattggaaaacttatcgtaaacaaacgagtaaaaaaagttatagcatctcatataggccttaatcctgaaacaggaaggcagatgaacaataaagaattaatagtagctttagttccacagggaacattagcagaacaaattaggtgtggtggtgcaggtataggtggatttctgacagaaacaggtgttggaactatctgcgaagaaggaaagcagaaattaaaagtaaaagataaagaataccttttagaattaccattgagagcggatatagcattaataggaggatctattgcagacacacagggaaatattttttacaaaggttctacaagaaatttcaatccattaatggcaacagcagctgatttagtaatagcaggtgctgaaaggattgttgaggctggagaattagatccaaatcatgtaatgactcctggaatatttgtagattacattgttggaggtaaaaactaatggtagtggaaaatgtaaaagaatttattgcaaagaggatcgcgaaggaattaaaagatggggatgtagtgaatttaggaatagggcttccaactatggttgctaactatataccaaaaggtgttaatgtagttttgcaatcagaaaatggttttgttggtttaggttcagaacctgcagaagcagaaacggataaagatattgttaatgcgggcggacaaccagttacaataaaaacaggggctgcattctttgatagtgctacttctttcgggataattaggggtggacatgtagatgcaactgttttaggtgctttggaagtagatcaaaaaggtaatttagcaaactttatggttcctggaaaaatggtttctgggatgggaggtgcaatggatttagtaagtggtgcaaaaaaagttattattgcaatgactcatactgctaaagggttgccaaagatacttaaagattgtaaattaccacttacagcagtagggaaagttagtcttattgttacagaaatgggggttatggaagttacaaatagtggacttgtgttaaaagaatataatcctagatatacaattgaagaaattaagtcagctacagaggcggagcttattattgctaatgatttatgtaaaatgcagtagtgttcatgaaagaatgttacaaataactaagaatataagtatttttagaagtaataatttaagatgtgcttgaagcgggaattggaacttttatagttgagaaacaaaacacataaattatgcagaatttattatgattaattaagttatttaatgactgtaatgtaaattttaaagtatcctatctctaaatattttaagtagttagaaaataactgattaatatataatgaaaagtatttctcttattgtaaattacctccaaataaatggaggtaatttttatgtttaataaagcctataaaaatattatcaacttattctaagaaattagaaacttaattataaacttctaatttcttagaataagttattttgttggttttagtagcttgaggagggaaatataattattatgttgaaaaatattctaaaatattagaataataatctctaagaattaaatttgacttataagtggtatagctatacatctaagcttgaaaacattaagccaaaagttggcattataattgcttaataattaaactatgaaataaatggaaatattagaaacagcgaacagttaataattaagagtaaatatttgaatttatagaaatgtttttatttcctgtttaatgattagattgtagtatataaaaatgtatatcatgattaaagttaattgaaattaacaattttggaaaggtggacactatgaaaagtataaaaatgaaattaatgatgtcttttggaatattagttggaattatatgtatgggattgggtataatttcttttataaattcatcaaagacattaaaatcaaatttgaaaaataccttgcctgaaattgcaaagcaaaccgcaagtaatattcaaggcaggattgaaggtgagttaagttcgctagagtctattgcggcaagaggagatataaaggatactaataattcagcagatagcaaaattccgattctttcagaggaagtaaaaagaacaggaggtattagactaagtattatagacaaggagggaaatgttactacttctgagggcacacatactaatgtcaaagataaagaatattttaagatagctttaagtggcaaaagcaatgtgactgatccatctataagcaaaactgatggatcggtggttgttatatatgcagttcctataaaaaacaacaatgaaatttcaggggttttaattgaaacacgagatggaaataaattaagtgatttaacggatcaagtaaaaattgggcagacaggtacagcctttatgataaataaaaatggtacaactattgcaaatagtaatagagacttagttttaaaaatgtcaaatattatagaagaagcaaagaaagaacccaagattcaagctttagcagacattgaaagtaaaatgattactaaagcaacaggcgaaggtgaatatgattatgagggagaaaataaaattgtagggtatgcaccagtacaggggactgactggtcagtaggaatttcagtgactcaaagcgagcagctatcagaattaggcagcttgaaaattttagtcatattatcatcggtagtatttttgataattggattagctataatttatctgatttcaaatagtatttccaaggggatgaaattcacttctaaacatttgaatatattagcagaaggaaatttatgtgaagaaatttctgctaagtatttgaaatcaaaagatgaaattggtgtcatgactaatgcaatgaaatcaatgcaggaatctttaagagcaatgattgaaaaaataaaagaaaattcttcaaatattaatgggcaatcagaaaatttatcttctatttcagaagagatagcaaatgtatcacaaaatgttactgaggcaatatctgaggttgcaaaaggaacaagcaatcagtctgaggaattaatacatataacagaaattcttaatgaatttagcgataagttatccgaaatggttagagaaatacaagttgtagactctaattctagaggaataagtttaatggcaaatgatagtagcactgaaatgaataggctaaatcaatcagtaataaatgtaagtaattcatttaaagattttaatgataagataaaatcacttggaaatgatataaatgaaataaatgaaattacaagtttgattaatagtgttgcagaacaaactaatttattagcattaaatgcggctattgaagcagctagagcaggagaagcaggaaaaggattttcagtagttgcagaggaaataagaaaactcgctgaacaatcaaaaggttcatcagaaaatattagcaaattaataaatgaaatatcaaacaacacagaaactatagttaaggagtctgttgcaatggatggtgaaatggcgaatcaagctagaattatagataattcaataacatcatttaaaaagataatacactcagtagatgaagtgattcctaaaatcgaagtagttaagagttctgctggtaagatagaaaatgataaggatactattttgaacagaataaatggattatcttcaatttcagtggaggtttcagcatcagcacaagaaatctcggcatcatcagaggaaatgaatgcatcaacagaagaagtggcttcttcagcacaaattcttagtaatatgacaaatcaaatgatagaagaagtaaatagattcaaagtttaaaaaagattttataattattattacataaagctctaagttgtttgaagaattaagataaaaaatagaatttaatatatagaaaagagatagcagggagaatgggggaattgctatctctttttgtgtttgagtttgaacaattatattatctgcagaacattgagaaatattcattaaagataattaaagattacttaaagagcattgtggctagtcaattctttattcctgcgcaggattatttagattatattcaaatatatcatcattatctgacatataaatattgttgtttgaatccacactagtactatagtaatttttatcaggtaaaatgttaagtaaattgccattaaggtcaaatttataatttctattaaaactttttacatataaattatcgctattatctatataaattgtctcaatgttggtatcttcattattaagttttaaatctaaatatttaatgaaatctccattagaattatatacatatatctttttgctatattcactaaagatatagatattaccagagccatctaatgccaagtcagcattcatacctggatcatctttattagctttctttataatattattaaaacgagcaagtattgctccatcagagtttagcttaaataatgtgttttctgttgctgaagaagttagcaaatatatattattatccttatcaactgctaaagggccataataatcatttcccttaaaagttgcggataaactaccgtcagctgttttgtatttttgaatcgtgctgccagaagagacgtataaatttccgttcatatctgcagatagtcctttaattagtttggaatcatttttatctccatttatttgaatcatcttaatgaattcaccagagttattaaactgctgaatcctcccatcagtgtaatctgctatccaaacattattatcagaatctactgtaatatatcttgcgtcatttaattttccagaatctgtaccttttccgccaaatatagcgactaattctccagcaaaattactgttattaatagaaagaatttttatatttaactcttcaagctttttcttgagagtagagttttcaggatccagttttaattgatcttctatattagatctttctaataaataattattaagctgaagctttgttgcgttttcactagtattaccactattgctatcaataatagattgaattttattgtccaattctttaagtttttctttaagattagagttttcaggatccatctttagttggttctctatattagatttttctgatgaatacttattgatctgaagttgtctgccatattcactatcatcattggctataagaacaaaagcttttggataagcttttatatactttacattaaacttgactccagttgaaggatatgagtatctattaagtgaatcgttatgaacaatattaaaatctgatgataaaaagtaagttgaaatagcattgccatcattctctggtttaatcataacattataccgatagactctttcattattatattggtctgatgttggcgaattatctaaaatcatagcttctcctttttcaccaaaattgtcaataataatattagttaaaaaatgtcctacaaagatattagcaataataatcacaaaaaagattatagaaaattttgctaaatagaatctggcttttttggggaaagcaaactgactaatgataccaaaaagaatacatccccaaatactcagcactgggtgagattttaatataaccaaaagaatagctatatatgtcattttattacctccataatgtaaaaaaatattcaatacacataacttgtatttttaagcatgtttttttatatatattcatgatatggctttttagatatattgagcaaatataaagttattctattttcaaaaaattagttttaaacatatgaaatagaataacaagtacaaatagacagaacggttgactagttattttttgataatgccttattataccaataataaaattttcaatcaagaaaggattgagaaatatgttatattgtgccaaaagaatatatatttttggtgaaatttagttccaatatttttatgcagtgtatatttgaaaatcatggagatacatggagatctattaaaagagctagttaatgcataatctatggatattagcacagaaacttaaatgtaatatagacatttaagttagagcataaaatgtcagcatggtatgttataatactattaatgtaaaaaatatggaaaatgaaaatgacagttattgaaaaaaggagtaataaaatgaaaagtggtgtttttagtaaaagaaattattcttccattataataagtggaattttgcttgtacttggttcaggtttacttatttcatgtgattctaataaagaaaagattattgattattctaatggggataaatatgttggacagataaagagtgagaagaaggacggagtaggaacatatacttatgcaaatggtgatgtatatgtgggtgaatttaaaaataataaaagagaaggaaaaggtacattaacttattccaatggttgtaaatatacaggcgagtttgcaaatgatgaaatggaaggtaaagggatatattctagtcctaatggcgatagatatgaaggctcatacaagaatggattaatggaaggaagcggtacatatgcatatacagatggtgatgtgtatgtaggtgaatttaaaaatggaaaaatggaaggcaatggggaactaacttattctactggcaatatctataaaggtgaatttgtaaatgataaaatagaaggaagaggtatatttaattacgcaaatggtgcaaagtacgaaggtgagtgtaaggctggagaaatgaatggaataggaacattagtttatgccaatggtaataaatatgaaggggaatttaaacatggtagagaagatgggacaggcacattgattttgataaatggaacaaaaaagcaagggcagtttttaaatggcgaattccaaggataagatacataaaaagatagtttcaaatctaaagatatattatatataatgattttgtaaaacaaaaatttaaactgtatgcaattcttaataccttaacaaacatggttcagaatacatattctaaagaatatgcactcagaatgcgggcttagagttactttgtataaaatagaatttatatttagtatttttttgtttattatgtgcttcaattatagaattgatggaagaaaaaactagggaataattttataagcagtagctaggtgattcagctactgcttttgtggtttatattcctgataagggatgttaattgtaactccactttcatcaaatttataattggtaccattaagaggattgttgccagaaattagattcattcctattgtgtaaattgcattggcatgagcttgtgaatcttgtacaacagtacctgtcataattccttgattaattaattcttgagcttttggcaaaccatcaataccaacaatcggaatgtttcttgagttataacctttattataaccatatttttggagtgttttaatggcacctattgccatggcgtcattattagaaattattgcttcaattttaccatcaagtgttaataaagttgattccattgaagttctaccacattcctcttcccaattgcagggtattgataaaagctcttgagtttttattcctgcttcattaattgttaatatagaatatttagttctttcaattgtttccggactattagatgggccctttaacatgatatattgaattatattatctttatttttatctaatttttctttattagcattccatgtatctactatgattttgccttgaataattccagactgatcaacatctgtatcaataacaacagaattatgataattttttatgaaatttattattggtttagttttgccatagtataaaattaatggaatatccttttgtgctattttattgagagtatcttgaagctgatccatattggtgctgactggatttaatacaagaagattaaagttatcattgagtgctttgtcaacatcttcattttgaacaacttggtttccatttgcattaaaaaaagtaaattgaactttattttcattttgtttttgaatatcctctaagtttttctttacattagaaataaatagatcattaaaactatttaagaatacacctactttaagtggagtttgagaactaatatccgggctggcatatgaagttttgctaatactatataataaaaatatagatatgaaagtaagagatagtaacttttctaatatcttcattttaatcctccgtgcatacttgtcaagttataatatttaatattagattatctctcaatgaaaaatttatactatatggaaagcattttttaggattataagtgagacaataaatgcaaaataacataaaaaatcttaggtggctgtggagtagcaactttcagaattagtatctcccataacttatccacagatttaacttgaatataaattaccatatgtgttgattaaccaaaaaatagaagtgaaaatatataaaaaatgaggtcattctgtagtaatattaaagtgcgaaccaaaataatacttaaggagaatgccctcatgaaaaatactaccact

SEQ ID NO: 64 - DNA, 34770 bp, Clostridium beijerinckii
atgtaattacaataataaatcattggttagaaatatatttatagatttttaataaatgtatataaattaatatgacaataaagcagttttagaatttaataaaattatttatctaatgtctagtcattattgcattccgatcttacattaagttggggacggtaacggtatgagggctggacattaggtgattataagagttattttgtattaggtttagtaatattacaatggaatgatattcagaagagattagaaattattttaaaattaagatttatttaatttaactataataataatataaatttatcacataataagtaaacgatttaaaaaaattacacgtagtggaggtttttatgggattagagatgagtaatataaaaaatgccattattaatggtaagacagtgcttggtattgaactaggttcaactagaattaaagcagttttaatagatgaaaataatactccaatagcttcagggagccatgattgggaaaataaatatgttaataatatttggacttatggtttagatgatatctggactggcgttcaagatagttataagaagatggctgaagatgtcaaagaaaaatatggagttactattgaaacaataggcgcaattggattcagtgctatgatgcatggatatatggtttttaataaagagggagatcttttggtgccgttccgtacatggcgtaacactattactgaaaaagcctcagaagaattaacaaaattatttaactaccatatccctcaaagatggagtattgctcatctttaccaagcaatattaaacggtgaagaacatgtggccgatatagatttccaaacaactttagaaggatatattcattggaaattaacaggtgaaaaagttataggtgttggagaggcatctggaatgttccctattgatatagatacaaagaattataatgcacgtatgattgatcaatttgatgagttagtagctcctaagaatttttcatggaaacttggagatattttaccaaaggtattgttagctggagaaaatgcaggtgtacttactgaagaaggtgcaaagcttttagatgttacaggacaattaaaatcaggtattccattctgccctccagaaggtgatgcaggaacaggaatggttgcaactaacagtattgcaaagcgtacaggtaatgtatcagcaggaacatctgtttttgctatgatcgtacttgaaaaagaattatcaaaagcatatgaagaaatagacttagttacaactcctactggtaatttagtggctatggttcattgcaataactgtacttcggatcttaatgcttgggttggattatttaaagaatttgcagaggcatttggtgtagaagttgacatgaataagttatttgcaactctatataataaggcacttgaaggggattcggattgtggcggattattagcttataattacttctcgggtgagcatataactggttttgaagaaggacgcccactatttgtacgttcagcagagagtaaattcaatctagctaacttcatgcgcgtacatttatttacatcattaggagcactaaaaactggtttagaccttcttcttaaagaggaaggtgttaaggtcgatgaaatgttaggacatggcggtttatttaagactaaaggtgtaggacaaaagataatggcagcagctatagatgcaccagtttctgtgatggaaactgctgccgaaggcggagcgtggggaattgcagtacttgcatcttatatgataaataaagatgaaaatgagacattagacgattatcttacaaataaagtgtttgcaggacaaataggtacaaaaatagatccagattctaaagatgttgaaggatttaatgaatttataaaacgttacactagtgggcttgctattgaaagaacagcgatagatagccttaaatagaaagtatgattaataaggttgaattcaataaaaaggattcaaccttattatctattatctataaataataaaggaatagataaacaatatataatttatgtttatattataactcacctcaattatagatatttcgattcataaaaattgtaaaaatatcattgaagcgggtaagaataagcttatatatactttagcatgctctgatttctagtttaacaagttaaaagtgaacagtttattgcgacgaatcctagatgtatgcacattggtaaagaaatataataaaattgtacatacaatataaaaaaaactattgctatagtgatgaaaacgatatataataaatacatgaagtacgtacaacatattaacaagtgctatcctctaaaattatagcacattaagagttagagtatgtgtatcagatagaagtgacaagataagctattctcaattcgtacaagcaggatacatatataaataaatgttaatgtaaatttttattatgataataaagaagaatattgatgtacttacaagatatatatcatagagcatatataggaaaatgtattttccatgatatatattcaaattatatgaataatatcaatcaaacattaaacaataatatttactaggataggggaggaattttatgaatgaaaagcacattactttatgtaacaaattattatactatctagtagctcctggcttattactatattttatttctatcgattcaggaataattacttcttcttttggtgtactagctatatttggattagccattttacttggagtaggaataccaatgatttataagagaaagaatccagagtataaattcaatattagtagtaaatatgctaatgctatggctatattagttattcttgagttaacttataatatgtcaaaataaataagaacatgtctgaatttgatgaaaacgtattaataaagtttaatttttggttataagtgtattaaaaaaattatattgttttaataatttagaatattaacttttagtccactttaatttatcagaaatgataactattaagcagattaaaagaaaatataaatttataatttattatatgggaagttgaagggagaaaatattatgaagaaaaaattaatggctatgttattatcaatggcattactaggttctatcggtggatgtagtgtaacaactagtgctccaaactcagatgcagataattctaaaacagagtcacagggaaaaactgacgggggatcaggaagcggaaaaacaataggtattttaatgccaactaaatcttctgaacgttggataaatgatggaaatgacatggtaaaacagttaaaagatcttggctataatacagatcttcaatatgctgaagacgttgtagaaactcaagtatcacaagcagaaaacttaattacaaaaggtgttagtggcttagtaattgcaaatatcgatggtgaatctttaactgatgtttgtcaaaaagctaaagatgcaggaattcctgttatagcctatgaccgtttaattaaaaatactgcaaatgtagactattacatttcttttgataataaacttgtaggaaaccaaatgggtcaatatatagaaaagaaattagatttaaaaaatgcacaaaaatcatttaacatagaattatttgctgggtctccagatgataataatgctcatatgttctttgaaggtgcaatggaagtacttcaaccatatatagattctaagaaattaactgtagtttcaggtcaaactaaatttgatgaaatctgtacattaagatgggatggagctttagcacaatcaagaatggaaaatatattaactgctaactactcaggaggtaaaaaagttgatgctgtattagctccttatgatggtataagccgtggtgttgtagaagcgttaagaagtgttggatatggttcaggggatcttccatggccagtaattacaggtcaagatgcagaaacagcttcaattaaatctataattgcaggagagcaaacatcaacaatattcaaagatacaagaaaattatcagctcaagctgttaaaacaatcgatgcagctattaaaggtcaaaaagctgaagttaatgatgagaagacttacaacaatggagtaaaagttgtaccatcttacttatgtcaacctgtatctgtagataaaacaaactataaagaagttctaattgattcaggatatttaaaagaagcagatctttctaaataagattaacagcagtaatgatagtgcggacaactttgttccactatcattcaaataaggaggggcgtgacgtatgttaaaagacaatgatattattcttgaaatgataaatataactaagacatttcctggtgtaaaagcactagataatgttaatttaagagtgcaatcaggagaaattcattctctttgtggagaaaatggagcaggtaaatcaactttaatgaaggtattaagtggaatatatcctcacggatcatacgaaggtgcaattctatataatggaaaggcatgtaaatataaaggcataaaagacagtgaggcagatggaatagttattatacatcaagaattagctttgagtccacatcttagtataggagaaaatatatttataggaaacgaaattgcaagtcatggagttatagactggcaagaggtaagaattagaactaaagaattacttaaaaaggtcggattagatgaagacccagatacaatagttaacacacttggtgttggtaaacaacaattaattgaaattgcaaaggcattatcaaagaacgtaaaattattaattctagatgaaccgactgcatcattaaatgaggatgacagtgaaaatttattaaaattaatgttagagttaaaatcacaaggaattacatgtattttaatttcacataagttaaatgaagtttcaagagtatgtgactctataacagtactacgtgatggagctagtattgaaacattagatgcctctggagggcaaatctcagaggatagaattgttaaagggatggttggtcgtgaacttacagaccgttatccaaaaagaactcctaaaattggagatgtgatgtttgaaataaaggattggaatgtatatcatccagattatccagataggaaaatggttgataatgtaaatataaaagttagaaaaggcgaagtacttggaattgccgggcttatgggtgctggaagaactgaacttgcaatgagcatttttggtagaacatatggacaaaagatttctggtagcattttaaaagaaggtaaagaaattcatattaaaacagttaaagatgcaattaatgcgggtattgcttacgtaactgaagatagaaaagaagcaggtttaaacctgattgatgatattcgtcataacatttcaatagcttcattaggtaagatttctaataatggtgttataaatgaacaagttgaaattttagcggcagaagaattcagaaaatcaatgaaaatcaaaactccaagtatattacaaattacaggaaacttaagtggtggaaatcaacaaaaagtagtactttcaagatgggtttatgcagaaccagatttactaattcttgatgaacctactaggggaattgacgttggagcaaaatatgagatatatacaattataaatgatttagtagctcaaggaaaagcagttattgtaatttcatccgaattacccgaagtccttggattaagtgatagaatctatgtcatgaatgaaggaaagattattggagaattagataagaaagatgctactcaagaagttatcatgagtaaaattgttgcatcaaaatagggaggtagtaaaatgagtgaagcaagagttgaagaaaaaaaagttgcaaaaaatacatttaataaatttatgaaagacaatggtatgcttgttgcattattagtggtagtagttatattctcgattttaactaagggagttatgttaaaatcacttaacataacaaatttaattcagcaaaatggttacgtacttattcttgcagtaggaatgcttttagtagttattgtaggtactgtcgatcttgcggttggttccgtgtgcgcctttgttggagcaatagccggtgttcttatggttaataaaggaatgaaccctgtagtatctgttgttgtatcacttttaataggtgcagctgttggagctgtacaaggatattggatttcgtataaagcaattccaggatttgttgtaacattagcgggacaattaatctttagaggattctcaatgataatattaaatggtaagacaatcgctccattcccaaatgaatttgcaaacttaggatctggattcatacctccactattctactttaaaatgggcgatatttatttagttggatcagcaatgatcgtaggtgttatattatcggtaatcatggtatttaataatataaaaggaagaaagaaacttcaaaaatataatttcaatgttgatcataattcaatgttccttgctaaaaatataatatcagttgtagtaattatgggtggaagctttgtattagcatcttataaaggtataccaaatatattaataatagcaggagtattaatagcaatttactcattcattactactaaaacagtatttggtagacaagtatatgcagttggtggtaataaaaaagcagcagctttatcaggtgtaaacgttgataagattacattcttagtatttgtaaatatgggattgatggcagcattagcaggactcgcttatgctgcacgtgttaactcagcacaacctaaagctggtgttaacttcgaattagatgctttagcagcttgctatataggtggtgcatctacagcaggtggtactggaagaattttaggagcagttgttggtggacttgtaatgggagtacttaataatggtatgtctttaatgggagttgataataactggcaacaagctatcaaaggatttgtattattattcgctgtagtattcgacttatattcaaagaaaaagaaataaatatagcagcaatgtaagaaatggtttcttcaaactttaaaccatagtttgttaataaaatgtgttaaataaattaagaaaaagaaaatgtatgaggttaaggtaagttctgcactaaatattttatatatagtgcagaacttgccttttactattacgtataatttgaaagatatatcgttaagagtaagtattaaatagtactacttataatactttatttttagatatgtatatgtgttgaaattcacaattcacatttcaacgattcacaattgcggctaaaattcttgtgatatttttagaattataatgaaggattactttttcaatatatatgttaagaaaaaaataactactaataatagtaaaattaatatataatttagtggacaattatatattaatttaggcaagcgttattaattaaatgagttgatagataaagtattagaactacaaatgaaaaagatggaggaataaaatgaatactagaataatagtagacagttgtgttgattttaataatgaagtttttggaaatgaagagtatatggaaagaattccatttaaaattattattgacgatgaagaaatcgttgataagaatgtaaatataaatgatctactagaaaaaatgaaaagcagcaaaaacaaaattaaaacagcatgcccatcgccacatgattttctagaagctttaaaaaagtgtaaaaataattttgttgtaaccatttctggtaaattaagtggatcacataatagtgctatattggcaaaggaaatgtttcaagaagagtttccggaaagttttgttcatgtattcgattgtaagacagcagtatctggagctgatctagttgttttaaaaataaaaaagttaattgaagaaaaagcacataattctcagattgtagagcaagttactgaatacatagaaaatatgaagacgttatttgttttagataaattggacaacctagttaagaatggaagaataagcagtgcaaaagctttaatgggatcacttctgcaagttactccaattatgactgctaacgatggagaaattgtgctaaaagagcaagtaagagggaagaaaaaggcatttaatagactaatagacctaataggtgaagaaggcagcgattttaaaaataaggttctaggaatagggcatataaatgcaagagaaaaagcagaaaagcttaaggaagaaataaaaaacaaatataactttgaagatataataatttttgaaggaagcggattaagtactgtttatgctgatgatggtgggattgtaatttgctactaacttagagtaagcatatttttataagatatataatatccttgtgtttttaagtcacaaggatttattattttattctttaataatgtaaaataaaatccatgtataatgcatgaaaaaaggctatttaatctaaatgtatttaaatttaactacagtaatgacaatatatgactttattatttggatattgtaaattattctagtaaatattcgataaataaatgtataaatttaaattataaatatatttaggaagtggatttatgatatcaaatataaataacaagacaacagttaatagaatgtattcgagtaatatgagtacatataaaaaaatgacaatagactttctttttcagatcaactgaaaaatttaacttatagtaattcaaagctacagaataaaacaaattcaattcaagcaaatcaggaacttgaaaaattaaagaatgaaatgcacgagaaatatgataaattagatggtgaaaatagttttacttctacaacagttatggagaaagtcatagatctagatatagctaatagtaaagataaatatttaaaagcagatggtgaagcagatattaacaaagttgcagatgctcttggaatatctttgtcaaattgtagtataaaagaaataaatagcataacaacacaattgcataatgaaggatttcttagtgataaaactgcaggaaaactaagcttgggattattaatacaaggagccattttatcagcaaaggctcgtgagactggtgagtcagtggcagacatgaaatttgatttaatgggatttctactaagcagtaaggatttttatgaaaaaaatggagatagcaaaacatcggatactatggattatttgattaattttttaaattagataatcgtagcttatctaggcttgatataaacaatatttgtgttaaaatataaatgtagtctgactttaagggggaaatcccaagaagaaagactcttaacacatgatcgttctgaaacacatgagggttcgtcccaaatgacaaggcggtattatagatagagatatgtatgctatccctgcgcctttttgtggcatggggattttttattgcaattgaaaatagtaattgctaattaatacggtgaatttaaaaatattttcttcttgaaaggaataaagaatatggatacaagaatcgcattgataggaattatagtggaagatatgaattcaacagataagctcaacaatattttgcatgaatattcgcaatatatggttgggagaatgggtataccttacagagaaaagaatgtaggtataataagtgtagtgatagatgctaccaatgatataataagttcattatcaggtaaacttggtatgatcgaaggaataaatgtaaaaacaatgtattctaaaactgctaaataaatattaaatatagtaataagtagattagctttaattaatattttagcctttgccaaaattggatgaagaaagcattaatcagaacgaattaaattcaaaatttaaaaatccaattatagaaagaagagtagagtaatgtataatgttaaatcaaaaatagcaacggaatttattgataacgaagagatattagaaactcttgagtttgctaagaaaaataagaacaatagacaattaattaatgaaattctagaaaaggctaaagagtgtaaaggaatttcacatagagaagcagcagttttacttgaatgtgaattagaagatgaaaatgaaaaaatgtataaacttgcaaaagaaatcaagcaaagattttatggtaatagaatagtaatgtttgcgccattatatctctctaattattgtgtaaatggatgtacttattgtccatatcatcacaagaataaacatataacaagaaagaagcttactcaagaggagattgaaaaagaagtaattgcattacaagatatggggcataaaagacttgcattagaaacaggagaagatcctgtaaataatccaattgaatatgtacttgaaagcataaaaacaatttatagtataaaacacaaaaatggcgcaattagaagagctaacgtaaatattgcagctacaactgttgaaaattatagaaggttaaaggaagcgggaattggaacatatatcttattccaagaaacatatcacaaaaagacatatgaagagcttcacccaacaggaccaaagcatgattatgcttaccatacagaagctatggatagagctatggaaggtggaattgatgatgtcggactaggtgtactatatggattaaatatgtatagatatgatttcgttggacttcttatgcatgcagagcacttagaagcagctatgggagttggaccgcatacaataagtgtaccaagaataagaccagctgatgatataaatccagatgaatttactaatgcaatttcagatgagatatttgctaaaatagttgcagtacttagaattacagttccatatacaggtcttattgtttcaacaagagaatctcaaaaaacaagagaaaaagtacttgaacttggagtttctcaaataagtggaggatcatctacaagcgttggtggatatgttgaaaaagagaaggaagaagaaaattcagctcaatttgatgtaaatgatactagaactttagatgaaatagtaaattggctgttagaaaagggtcatattccaagcttctgtactgcttgttatagagaaggaagaactggggatagatttatgagtcttgttaaatcaggacaaatagcaaactgctgtcagcctaatgcacttatgacgctaaaggaatatctagaggattatgcgtctgaagatacacgaagaaaaggtgaagaagtaattaaaaatgaaattccaagaattccaaatgaaaaagttaaaaagatagtattagaaaatcttgaaaacttacatgaaggaaaacgtgattttagattttagatagagtaaattaattaataaagctatatgcatagttaaagtagacttgtgtatagctttattattttttctataattaagtttatggttaaaaatgattagcaaatactcaacatttcgatataagagtagattttttagttgattatataaattaaaaatattatcataataattagcaatatatgttaatttcaacatcttagtaaaacgttttctattgcaaaaagggtaataaatggtcgagattataaatttagagaggggaaaagttatgtttttgagaagaagcctgcctataaaatttaaattaaccttatcatttttgacggtagcaattttaattggcgtagtaggaataataggagcattgtctttgaaaaatgtaaataataaagcatcaggaatgtacaatagaaattttaatcatgtcaatgagatcctatctataaaatcaaatatgacagaaattaaaagtaacatattaatcatgatgtatgaaaaagataaatataaggtagaggaagcacaaaaaaatgttattactgcacttaatgagaatgataaatatataaatgattatgaaaaatcacaaatgacaagtagtgaaacaaaatcttggaaggaatttaatgataatgcgaaggaatataatcaggttagagacaaggtagtgaatgctgtgaaatcagaagatttagaagaagcaaaaaagaggtatttagaaatggttcctctacagacaaaaatgatgtatagcctggataaagttatagatataaatatatctgatgcaaaatcagctaatgaggatatatcatctacttatattaattctaataaaattatgattacacttactatctttggattagtggtagcaattatatttggagcactaatatcaaaggctataaatataccattaaaaaaaatcaaaggatttgcagagagattagcgttatatgatttttcgactccaatttcaattaaaagaaaggacgaacttggacaaacaggaagtgcattaaataaagcacaagaaaatgtgaataaactaattagagatattattcaaaattctcaagatataagtacatctagtgaagaactttctgcaacagctgaggagctttcatcaaaagctgcgagtatagatgaagctgtaagtactatttcactagggatggaggaatcttgtgctgaggcaggaattataagtacgacagtagatgaagtaaactcaaatataaatgatttatctaaaaaagctatggaaggaagccagaatgctaatagatccaaagagagagctatagaagtcaaaaacaatagtaaaaagtctatagatgaaatggagaaattatcaaaggaaaaacaaaagaacatgttaattgttattgaaaatggaaagatagttgataatattaaaattatggctgatacaattggaagtatatctgaacaaacaaatttattagcactgaatgcagcaatagaagcagcaagggcaggggaacaaggtaaaggatttgcagttgtagcagatgaagtaagaaagcttgcagaacaatcatcagaggctgtaacagctatcaaaaatactataattaaagttcaggatgcatttaataacagcattaacactggaaatgatatattgaaatttataaatacagaggtgcatgaacagtttaatgcctatggaaatacaggaaatatatattatagcgattctgaatttgtaagtaaaatgtcagagaatattgcaaacatgtcagaagaaattacaatcactgtagggaaagttaataagttagtacaagagatggcatcgacagcgcaagaatcaaacgatcaagtagctacgataaaagaaagtgtagatgaaacttcaaaagccatagagcaagttgctttaacagcacaaaaccaagcagggcttgcgcaaaaactcaatgaaatgatacaaaagtttaaaatttaaagaagatatgtgatgaaaaataaaagacttattttagttatttagcagctaaagtaagtcttttttaattaattaagtaaattttataccatttcactttttccctctagtttttcatacatcttttcttgttgttttgtagtaaattgaaaatatatttctgtattggtaacagatttgtgtccaagccaccattgaagctcttttatatccatatcacattcagcaaggtgaactgctgtagtatgtttaatggtatgaaaatggtgctttgacttatcttgaatacttgccattgagaaatattgcttcgttaggtggtctagggtttgccttgaaattggcttattcttttgacttgtaaatatagtttgagcttcagatgtaatttcattttcagtaatgtatttgtctaaaacgcttttagttttctcatctagccgcagagtattattcttactaccctttaatcttttacaatatatttctcctttattaatattataattttccaattttaacattgatatttcggaagctctaagaccgcatctataagctaatctaaatattgctaaatcacgtgttgaatgcagctttccagaattttcaattgcattaaatagtgataatacttctttttgcgttaaatatttaatttcagtttcattagatgccctcatatgcactctcctctagaagtaatgatacataataaatattttgtccaattttattatattataagttgtagtatatgtaaatattgtataaaaaagcttaaaaaatgtacaaatataggttaaattgtattcttatgacatattaatatgcaatatttgtatatttgcagagctataaatacattattacataaaataataggacaaaatatttattatgttcaaataaatgatatatttaattttttaaaaagtcaaagtttaaaaatttgtagaataattacgcaaaaattattattgaagatgtcatattttattattaaataataggagcgaggtggagaggttttacacgtgttgagttgtactaatttaaaaaaggaagttattatgaataaaattaatatgcccaaaaaagaacttaaacttaagatgaaaatggtaaataccacaagaggaaaattaaacaaggatatacataggagaaaaaaaagtaagcctaatgaagaattctcaaggtatgatattcttactgggctaccaaatagtacttatttttttgaaaagcttaataggagtttagagatatcaaaagttaattgtagaaaaggtgcgattatttatattgatgttgatgactacaaaatcataaattataattggggctattcttttggtgactttatattaaaatgtttttctgaaagggtaagtaaatgtattaaaggaaaagggaaactatttagattaaatggtgatgaatttgcaattttgatctatgaatttaaatttataagtgaaatagaggaaatttgcaagaaaatttatgaaaatttgtcagtaccttttaagatagcagatgatgaattagacatttctgtaagtatgggaatatctactttcccggatgatagcataaattctgatgagttgttagagttttgtaatttagctatgtacaagtctaagaaaactggaaaaaacaattatacaatctttaataacgaaatatttgagacatattatagggacgtattgattagaagggaattaaagaatgctattaataagcatgagctaaatattaattatcagccacaaattgatttgtctaataatgagattgttggaattgaagctttattaagatggaataatgataagcttggaaatgtttcaccagcagaatttattcctattgctgaagaaagtggagatatagttcaaattggcgattggataatggaaaaatccatagagcaagcgagtttgtggaagtgcatggggtacaagtttaataatatagcaatcaatatatcaccaattcaaatcaaggaaaaagattttaaggataagttgttaaaatgctgtaataagtataatatttctccaaactttttagagatagaaataacagagagtactttattagatatatcagaaaaaaatatagaagtattaaatgaacttaaagggatgagaataaatattgcaatagatgactttgggacgggatactcttctttaagctatttaattaatatttcagtaagtacattaaagattgataaaacatttgtagatcatgtagaaaattataagaacatggtattaataaagaacatagttaacttatcaaaggacttgaaatacaaggtaatagttgagggagttgaaacaagagagcagatagaagtacttgctgacttaggttgtaagataattcaaggtttctattttagcaaaccgcttacagaagatggtatgaaaactttattggatagtaatagaaaaaataatatgcaatagcattttaacagtgggaggaaattttaatatgaatttattaaaccaagtaagagctaagttaatatcagcatttttattagtggctatattaattgcagttgtaggcacaattggtggaatagaagtaaaaagagtaaataaaaatgcagaaacaatgtatagcgtaaacttacagagtgttaatgaaattttgtcaataaaatcaaatatgtcacaaataaagagcgaagtttcagttataatgtatgatcaaaataaaaaagaaacggatcaagcaaaaaaatatattactgacatggtagctgcagataacgaatatatagctaaatatgagaaattaattactacaacagaggaaaaagaaaattggacgaagtttaccgataatgtaacaaaatatagagatgctagaaacaggataatagatgcagctgatctaaatgatccaaatgaagtgacgaaacagtacatgatttttttgcctatagaagaagaaatgatggcaagccttgacaaggttatagaaataaatttggcggcagcaaaagtagcaagtgataacattaatatagcatctgcacggacaaacataattatgacattgatgagcattgcaggggttataattgccattttacttggaatatttatttcaagccatataaataaacctttaaggaagataagagattatgcagagagattagcaatgtatgatttttcaactccaattactattactagaaaagatgaatttggacaaacaggtatcgctttaaataaggcacaaaaaaatgtaaatatcttagttaaagagatcatggaaaattctcaagatataagtgcgtcgagtgaggaactatctgctacggctgaagaattatctttgagagctagaagtattgatgatgctatatcaaatatttctgatggtatgcaagaatctagtgcggcagccgaggaaataagtgcatcggtagaagaagtggattcaagcgttaatgaactttcaggaaaggcaatggagggaagtagtagttcaagtaaatccaaagaaaaagcaacagaggtaaagaatagcggtaaaaaagctatagaagaaacaagaaatctatatgcagaaaaagagaacaaaatgttagaagttattgaagatggcaaagtagtagataatataaaagttatggcagatacaataggaagtatagccgaacaaacaaatctattagctttaaatgcagctatagaggctgcaagagcaggagaacaaggtaaaggttttgcagttgttgccgaagaagtaagaacacttgcggaacagtcatcacaagctgtaacgtctatacaggaaacaataaatagagtccgtgatgcttttaaaaatagtattgatactggcaatgatatactttcatttattaatactgaagtacatagacaatttaatgcctatatgcaaaccggtgaccaatattataatgattcaaatttcgtcagcatgatgtcagaggaaattgcagctatgtcagaagagataacagctactgtaggtcaggttagtgaagttgtacaagatatggcacaaactactcaaaagtctagtgaagaagtagctacaatcaaagaaagtatggatgagacaactaaatccatagagcaagttgcactaacagcacatagccaggctgaactcgctcagaggctcaatgaaatggtacaaaagtttaaaatttaggtatcaagatgcaagaaagaatgattttattcttatacaaatttcattgagagaaatataattatacatataatttatagaggatataagttttgaatttatatcctctttttatatattaattaaatgtatgctaaattggattcaacctgcaatttagaaccttcagtgatttttcatagtttttcggaatcaaaatatttatgatttaggtaagttatcccataagtataagttatatgttgtttatagataacacaatcataaactatataggatatgaaatatatcaaaactagaaatgggtaatatacttttgtggaatgtttcattggtaattttgagggatgtgattctttggctataagttgttccaaatgtgctagttcaaagctagttctttgaggctagcactttgggggcaactttatggcattagaatcacccatcagaattgcctagaaactggaataaaagtatattattcatttcggtgtggtatacgcataagtatagattatagttagtttatctataacatctaagaaattcgataaaaaagtgaagaatttcgtatggagactaattgataaaacccctataattagtaatgtaaacgaagaacaaatttgagtctttgttttaggatttagataagaatatggaggggtaaaaatgaaaaggtttaagagtctattaacaattgtaatgtcagcagctatagttgcaacaatggcaggatgtggagcaaataagagtgcaagttctggaggggatgcacaaacaagtactaaatcttcaaatactttaattggttctgcaatatataaatttgatgatactttcatgacaggagttcgtactgctatggaaggtgaagctaaggaaaaaggatcaactattgaactagtggattcacaaaataaacaacctactcaaaatgagcaagttgatacatttattacaaaaggtgtaaacgctttagcaataaatccagttgatagaactgcagcaggtcctatcattgaaaaagcaaaagctaagaaacttccaatcgtatttttaaatcgtgagccagaaaaagcagatatggatagctatgataaggtttggtatgtaggtgcacatgcagaacaatcaggaactttatcaggtcaacttatagctgactacttcaaagcacatccagaagcagacaaaaatcatgatggagtggtacaatacgtaatgcttcaaggagaaccaggacatcaagatgctactcttcgtacagaatattctataaaagctattgaagctgcaggattaaaaactcaaaaacttgctgctgatacagcaatgtgggacaaggcaaaagctactgaccttatgaaagcatttatgacaggtcaaggtgttgataagatagaagcagttctttgtaacaatgatgatatggctcttggtgcagtagaagcattaaaagctgaaggatataacaaaggtgatgcatctaaatatattccagtagttggagttgatgcaacagcaccagcattacaagctatgaaagaaggatcacttcttggaacagttctaaatgatgcacaaaaccaaggtaaggctacagttaatatagctttagcagctgctcaaggtaaagaaattaataaagaaaatgttggatttgatgtaactgatggaaaatatgtatggattgactatgtaaaagttactcaagataactacaaggattatttaaaataagatatatctgacatagaaattgtcagggatgcgagattataaaaaatccccatccctgaattattatttagaaaaggaggatgcttgtatgggtgaatatgtactggagatgaataacataacaaaggtatttccaggagtaaaagcattagatggtgtaacattgaaggttcgcaagggaagtgtccatgcattaatgggagaaaatggtgctgggaaatcaaccctaatgaaatgtctatttggtatttatcatgaagatggtggagagatcatattagatggaaagaaaatggagataaatacttcaaaacaagcattggatttaggtgtatcaatgatacatcaagaattgcacccaattcgtttccgtccagttatggaaaacatttggcttggcagatttccaatgaaaggaattgctgttgataagaaaactatgattaagaaaacaaaggaattatttgaagaaattgagttagatataaatcctgaagcattagcgggaacactttcaccatctaatcttcaattagttgaaatagcaaaggctgttagctataattctaaaattattattatggatgaaccgacttcatcattaacagaaaatgaaactaagcatttatttaagataataaaacaacttcaaaataagggctgtgcaattatatacatatcccataagatggaggaaattcttaagatatcagatgaagtaacaattatgagagatggtcagtatgtaggaacttgggatgctaaggatcttacaacagacttaattataaatcgtatggttggtcgtgatatgactaatagatttccaccaagagaatatacaccaagtaaagatgttgtattaagggtagaaaatctttgttctccaattaaaaaatcattccagaatgtaagctttgatttacataagggtgaaatactaggaataggtggtcttgttggggcacaacgtacagaattagtcgaagctttatttggacttcgtgaagtagcctctggtactgtagaaaaggatgggaagattataaaaataaaaatccctaaagatgcaaaagagtatggttttgcactgttaacagaagaaagacgtgctactggtatatttggtattctttcagtactagataatactgtaattgcaagtcaaaaagaatatgctaaagcaggagttttgcaagaagcaaagagatataaagctgcaaagcagtcaaatcaagaacttagaactaaaacaccaagcatggaacaattgattcaaaatctttcaggtggaaatcaacaaaaagttttaattgcacgttggcttcttacaaatccagatattcttatattggatgagcctacaagaggtattgacgttggagctaagtatgaaatctattcgatcatgcatgaattggttaagaagggcaagtcaattattatgatttcttctgaaatgccagaattgcttggtatgtcagatagagttatggttatgtgtgaaggtaaggttactggaattttagatcaaagtgaagcagattcagtaaaagttatgaatcttgctacaaaatttatgcaataagaaatatctcctttatcaagtgggacttaattcaggtagggttaatccatagctgaattttagttgaacttatgtccttaagtgtgcagtcgttattttatcctacttataaagaggtgaaaatattacggatgctaggtattggataaatgaaattttataacaaatgattttggtaggagagaaagaaagtgaggtatgtaatatgagtggagagaagatagtttcacgaaaaggctttggaaaaatatttttaggtattggtgcttttttggtggctttaggaattgtttttaattttattttagatccaagtgtattttatgatttaccaatttatgtaggtggagttggtatagcattacttgtttatggcgcaaaacagttttgggataagaagaatgcagacatggatgttattttttcatcaaagactgtaaaacatttctttacagataatgcgattattatagcattattattactagtagttgtaattatgataattcaaccacgttttatgcaatatgctgtatttctagatattttgacacaatcatcaacaaaaatgattgttgctttaggaatatgttttacattattaattgctggtactgatttatcagcaggacgtatggtaggtcttgcagctgtaatatcaacttcaatgttgcaaaaccctgattatgcaaatagattcttccccaatatgccacagttagcagttattattccaatactgttagcagtagttggatgtgctatatttggagttcttaatggtttcttggttgcaaaatatgatatgcatccatttattgcaacattggcgtctcaagttatagtatatggtgtaacttctctatactttgatttacctccaaacaaatcacaacctattggtggtattcgtcaagactttatagatcttggacaaacaaaattatttcaaattggaagtttcccaggaatatcaattctagttccaattgctgtagtatttataattctagtttggtttattttaaataaaactgtattcggtaagaatgtatatgctattggtggtaaccgtgaagcagcagtagtttctggagtaaatgtatttgcaactattatgggtatattcatcttcgcatcacttttatatggtgttggtggcgtacttgaagcggctagaacagctggtgcaacaaataactatggtaatggttatgagcttgatgcaatcgcagcgtgcgttgttgggggtgtttcattaaatggtggtgttggtaaagttggtggaatagtaagtggtgttttaatctttactgttatccaatatggattacaatttatagcggtaagtcctatgtggcaacaagttataaaaggtatcatcatagcagttgcagttgcaatagatatggcaaaatacagaagaaaataattattaaataaataaaatgcaggcaaatcattagttttttagctagagatttgcctgtattttatttattttctaaataataatcaaattggtaagccttagcactcgtgctagtaataatttaatacataatgtataatagtatttaggcataatcaaaaaataacaaatctatctgtcagtattttttaatcataatttattgccaaagtgccctaatagacctgatatgagagtaatttgtctccttggctaataaaaaatattcatggcagttctaattgttatttattttcatgtgccttattaaataattcatctatcggaggtagttaaatgaattcatatagaattatgattgtagacgatgaagaagaaatacgccttggaatcataaaaaagattgattgggaagccaatggatttatagttgttggtgatgctgagaatggacaagatgccttggaaaaagcagaaaaactacagccagatgttataatgacagatattaaaatgccatttatggatgggttggaactaggaaagaagttggtagaattaatgccatctacaaaaattattgtattttcaggatgtgatgattttgagtatgctcataaggcaataaagataaatgtagttgaatatgttttgaaaccgattaactcagcagaactcatagaagttttagtgaggttaaaagaacagctcgatcgggaatataacgaaaaacgaaatttagaaacactttataagcattatattaaaagtctaccagtaattagagaacaatttttagttggtgcaattgaaggcaggataaatgaagaacaatggcatgaacaaatggaggagctgggaatagaattcaagtataagcatttaacagtagggattattcaggcagatggaacactatcctttgaagaaaacttaaatagtttttcggggcaaaaggaatcagcacttacaccaatttctattaagaaaattgtagatgaaaatatgggtaagtattgtaaatttattagttttatttattctggtatggtaatagttatgggtaactttgaaaaaaaggaagatatattattatttataaaaggtataaatgaggtttgtaaggtttataagagaattatgagtttaacaatatctgcaggaatagggtatgtttatagtaatccttcgcaaatacgtttttcatatagaactgcacaaaatgcattagattatagatttatattaggagctggaaaggctatttatattgatgatgtagagccagataattcaatccagctacaacttgatgagaaagaagaacgatcaatgttaaatgcaataaaaatttcttcagaggatgaaatttcagaggcaattgatagtttgtttaagaaaacagaagatttattattgccttttaatcaatatagaatttatcttatggaaattatgacatcacttttaaaactggttcaaacatatgcatttgatatagaagaaatttttggtgaaaattttaatgcatacagttatttagaatcctttaattctattcatgaagtcaaaaaatggattatagaaaaagctattaggataaatagttatattaaaagagagcgaatcaattcatctatgatgcttattgaaaaagcaaaacaatatataaaagaaaattatagtgattatgatgtttcagtagaaaaattatgttctaaattgcatgttagtccaacatatttttctacaatgtttaagaaggaaacaggaacaagcttcgtaaattatctcacagcaacacgtttagaagaagctgttaaacttttgaatacaacagatgataagacatacatgatagcggaaaaagttggatatccagaagctaattattttagttatgtttttaagaaacagtttggagtatctccatcaaagtatagaaagaattgagttgatttactatgcttaatttgtttaagagaaaaatacagaagacaataaattacgttaacagcggaagtatacaacatataatatcaatttcttttaccgtaatagcagttataggaatggttactgttggaggggctttatattttcgttttataacttccactgaagaaatggtatctgagcataataaatctatgttagatcaagtaaatttgaatttagattcttatctgaggaatatgatgaaagtgtctgataccacttattacaatgtaattaagaagaaagatttggctacagataccatagataaagaaatggacttattgtatgaaacaaataaagattcacttataagcatatgtgccttttcgcaagatggggaagttatagcggcatctcctgtaaaacaattaaaaagctctattgatccacgagtgagtgattggtttactaaagcgatagataagaaagaaaatttacatttttcaacacctcatgttcaaaatttatttgtagatccagattataaatatcgttgggtcgtatcattaagtagggctattgaacttactaataataagaaaacaacatctggagtattgttagttgatataaattttagtggaatagagcagatatgtaaaaatgcaaatataggaaagtcaggatatgtttatttagttgatagagaaggcgaaattatttatcatcctaggcagcaattgatttattcagatttaatagatgaaaataataaaattgaagcagcttatgatgatggaaatcatatagaaactttcagaggagaaaaaagattagttacagttaaaactgttggatacactggatggaaaattgtcggaattacaccgatgttagatattacttcagattattatcaaatgagtgtatttgctgtgttcattatgtctttcgctatctttatacttgtatttcttaatatgtttgtctcttcaagaatagctaacccaatacgattattagaaaagtgtgtgaagaaattggaaaatggagtaaaagatgtagatgtttcgataagcggctcatatgaagttcagcatttaggaaaagcaattcgttctatggtcaaccaaatgcatacacttatggacaacataatgattgaacaagaatcaaaaagaaaaagtgagcttaatgctcttcaagcacaaattaatccccattttttatataacacattggattcaatcatatggatgatagaaaatgaaaattatgatggggcaataattatggtaactgctttagcaaaactttttagaataagcttaagtaaaggcaaaaatataataacagtgagagatgaaattgagcatgcacgaaattatttgaccatacaaaatatacgatataaaaataaattcacatataatattgaagttgatgagaaagttcttaattatggaagtattaaattaattattcaaccgctaattgaaaatgcaatttatcatggtatggaatttatggggggagatggtgagattttagtaaaggcatatgcaaaagataatgagttatatattgatgttgtagataacggacttggaatgcttcaagatgttgcaaatagccttttaacaggtgaaagcaagattgaaaagaagagctctggtataggattgaagaatgttaatgaaagaatacaactatattttggaaagagatatggactcgaaatttatagcgagccagatgaagggacaacagttcgtattcatatgccatgtgtggacttttatgaaattagaaagagggaggaagataaatagtgaagagaaaaaggaagcaaatttttattactttatttttgctattaatattatctttcttacttttcttaaataatacattgtggcatgaaaaagatataaggatatacaacatatcaattataactagaggaagaaacagtgaaagcttaatgataatgagacaggggatagagcaggcagcttcagaaatgaatgttaatgtaagttttgttactttgtcggaagataatagtattgacgaacagaaagaacttatagaacgagagataaaaaataaggcagatgcaataattatatcgcctgcagattacgagaaaatggcagaaccaatagaaaatgctagaaaaaagataccaattatattatttgattctactataaaatcagaacatgctcagcctagtatttcttgtgataactataagcttggatctagcttgggggaagaattaataaagaacggagatatgaataagaatattttaataatcaaaaacaacttagagtgcagtagtgtaaaggaacgatataatggattcatgagtgttatgaatcgaacatataacaaatgtacattttgggatttttcagaagataagcagactacttattataatcaagctaaaagtttgttagagaacaataatattgatgttgtggttacatttgatgcaggattattagaaaatgtttctcaagctaaaaaggatgtaatgggtattaacaaagaaaaagcatcaatagagatatatgggacaggaagtacaagcaaaattctttcttttttagaagataaggttattagtgcaacagctattcaaaatgaatttaatgtaggatatctaagtataaaatcagcagtatataagattaataaaaaagatatgcccaataacattatctcttcaacagttataaatacaaaaaatatgtattcggaagaaaatcaaagattattattcccatttgttagataagcaccataaatgcaaggatgaacttttgtataaatgtattgtggtgcttgatggaatcatatggtggagggattgtagtgagattaattaagaaattatcagggcttttaacagtagtctcaatttttaatgtattgtcatcttgtagtgcaaatgtgaaatcagcaaattatagtaatgatattaaggaaataaaaataggtgtaaccttatataaacaagatgatgcattcatatcagaaatttcaaagaatattgaggatatagcaaaagagaaggagaatcaaggtaaatataagatcattgtgaatgttgcagatgctaaaggaaatttaattaaccaaagtaatcaagtagataaatttgttgcgcagaattacgatgttatatgcgtaaatatggttgatcgtacagcggcatctatgatcattgataaagcaaaatcagctaatattccaattgttttctttaatcgtgaaccagtagaggaagatatggaaagatggaataagctctattacgttggagcagatgctcagcaatcaggtgagatgcaagcaaatatcattataaatgcttataaaaaagacaatagaatggtagataaaaatggagatggcaaaatccagtatgtaatgcttgaaggagagcagggacaccaagattccttaattagaacggaatattgcatcaaaactataactcaaaatggaattgaattagagaaactagctgatgatacagcaaattggcaaagtgctcaggcaacaacaaagatgtcacaatggattaaaagttttggagataaaattgaagttgtatttagtaataatgatgaaatggcacttggagcaataaatgcaataaatgatgctaatataggcggtaaaaaaccactagttgtaggaattgatgggcttcctaaagcgttagaggcagtgaaaaatggatctatgataggaactattttaaacgattcgaaaaaacaggcaaatgcgatcttcaatcttgcatatacattagcttctcatggaaatgtaaattccatagatggacttgagaaaggaaagtatattaggactccacacgcagaggttactagtgataatgttgatttatatatagaaaataaataaaattatatattatgtatagataatgtagaagtatatttattataaaaaaataagtaagtctttttcgatttacttccttttttgtataagcatacttctatttttataaatttttatcagcaggatctatagctatagttagattatattcaatatgccttataccagtataaagttctttattacacacataataaaataaacgatttaagaaataaagatgaaatttaatgtgctttttatgtatagaaactgaccatgaaggtaaagtcttcgcaaagtactatgaaaataggtttatttttgtaggaaccttaagtatcgagatgctaggaagagtagggagctatttgataaatcaacggaggataaaaatgagaaattctaaaaagatattggtattgtgcaccattataattatgataataaatttattgctaagttctagtaaagtagctgctaattctaggttaacagctaccgaaggaaggccagtaagagcaagcatattattacgtactttagaggatccatacactgcattacttaagcaaagttttgaagaaattcagaaaaataattcggggaatattgaatttactttttatgactgtaagaatgatcaatcattacaaaacagaaatgttaattcaatacttaatgcagaaaatgcagacattatattactgaatctagtagatccaacaggagtgaggacaattgtagatagagttaaagaaaaaaatataccattaggtttattcaatatagaaccactaaatatggaaactgtaaaatcatatagtaaagcttattttgttggaacaaatccagccgaagcgggaatactgcaaggtgaacttctttccagcttatggaataaggatagaacaattattgataaaaatggagataatataatgcaatatgttatgttgatgggaccgcgtaataacttggaggcaattggaagaactaagtattctgttttatcaatcaatgatgcaggaattaaaacagaagaaattgctttgagagtttgtaattgggaagaaaacttagctaaagatgctatggatgcattattcttatcgaatggaaataaaattgaagttataatttctaataatgatgctatggcaataggtgcaattgaggcattgcaaaagtatggatataatagtggagataaaaataggacaataccaattgttggtgtagatgggataccgaaagcgatacagctcattaatcaaggaattatgactggatctgttcctcaagatgcagctagcatggcagaagcgacttatcttataggaatgaatttggttaatggtagacctccacttgatggaacttcgtataagtttgatgatacaggagttgcagtacgtattccttacaaaggatatataagtaatgataatatctaaggttatttaagttgattaaataacttataataaaaaatatggaggattagtataagatgtctaagaaaataactaccataattattatcatgattgcagcagctatgctaataagcattaatcaaagtaatatcatggcgagttcaagaattgctgaaggaaagcctattaaagcagctgtattattatatagatttgatgatgcttatatttctttagttcgtgaaaatttagaaaaaatacaaaaagagaacgaaggaaacattgaatttattttttacgatgggaagaatgatcaatctatacaggataaagatattaataacttaattgaaaagcaagatgttgatcttttgctagtaaatctagtccaaacaacgagtacacagtcagttattaataaagtaaaaggaattaatattccagtaattctatttaatagggaaccagttgcgatagattctataagatcttataataaagcttgctatataggaacagaggctgaggaagccggactattacaaggaaaagttattataaatgcatggaataaaaataaaacagcaatggataaaaataaagatgatatacttcaatatgttatgttaatgggagaacaaaataatttagaggcaattaaaagaacagaatactctatattaaaaatcaataattcgggaataaagactcaagaagttgcattaagggtttgtgattggaatgaggaagaagctaggaatgttactaaaacattgtttctgcagtatggaaataaaattgaggctataattgcgaataatgattccatggctataggtgcgattaaagcattgcaagaatatggctataataagggtggcaagactcctaatatagcagttgtaggagttgatgcaataccagaggcacaggaattaattaaacaaggaataatgactgggtctgttctacaggatccttatgaattagctaaagcactttacagtgttggaattaatcttgtttctaataaaaacccgctttatgatacagaatataaatttgatcaaacaggagtttcaattcgattgccttatcatgaatacatgagtaagtaagaattaaaagatatataaaataactttacaatcaaaccaacttaacttaatattaagttaataaaaaaacgtattatattattaaaatttacgaggagtggggctaaaatgagtaaattagaagaaataataaagtataatgaaagttttgtggggaacaaagattatcaggaatatgtaacaactaagatacctaagaaaaagatggcgatattatcatgtatggatacaagattaacagaattgttgcctaaagccatgaatatcaaaaatggggatgcaaaaataataaaagatgcaggagcaacagttatgcacccatttggtggcgtaatgagaagtatattagttgcagtatatgaatttggagcagaagatgtttttgtaataggacatcatggttgtgggatgagtaatttaaacacaaaaaaacttgttgataaaatgttagatagaggaattaaggaagaaacgctctctactttaaataacgcaggagttaacgttgagagatggcttcatggttttgaatctgttgaggaatcaataaaagaaagtgttaaaatgataaaagatcatcctcttttacctaatgacataagggtacacggtctcattatgagtcctgaaactggagaattagaaattatagtaaatggagatattaaagacgcaaactaaaggtattgcgaagcgctagatatctagagtaaacttaaagttatatatgtaaatagcgaaaggaagatcatgcatttgttcgggttacttaaggattttgctgtgaatttctaacagtagaagttgcacccatttctgcatgctcctgtgacaagcacaggacaagcaaaaaatggaacaacttttactgaagaaatgtctgcagctaaatcctacatgtaacacctccacaaaagcatgaccttcctttctggtatatatcataattgaaaatatatgttttaatttaagttcgatatctagatacgaaatatctagggattaatacaagccttgtgattccgttgtatatttttatgagctatcaaatctatagtgttaataaatactcgatagttttagaattaaacattgaacgatatgtaggagtaaaatttacctatcctatgtgcggtcggcagaattgcttgtctggcatgggataattagcgtattttgagtgtgttctttcatatgcttaatttgctaacaatagaaatataaaaatatttgcttgagtatagatttactgtaatttactactaaattagaaatggaatatatgcttttgtgaagcgttcattagaagattttgctggatgtgaatcttagagtagaagttgttccaaatgtgcttgttcaaagctgtgctttgaggctagcactttgggcacaactcgtgctcttagaatcaccctgcaaaatctttaaagaaccggaacaaacgcatatattccttttcgaggcttcagcagtaaacttaaattatcatcaatacttgcaagtatttctatatttcacccaattagcaatacttacacttatgaagaatgtaaattatatttttgtttctagtatgtgcttccaatatcttttaggcatcattctacattgaagtttaagattttttcgctcttctatagtagtggctttaaaatatgttttccaaaggtctgtatattcatcgttgtgaaattttagtttttcataagtttccatatccatatctattatttcgtaaaaatttgtattatatattaaagctttttgtctagaaatatcgtgtataataaaatattccctaggaaatctatttttaaaatgatctccaataagctctaaaatgtcattatctggttcaatagaagagtataaaagtttctcttctatttgattaaatctaataaatccttcaaatctatggcattcatttaaaactttttttgtaatattatctacaagtcttattacatctacatttaaaaaatcatgaacatctggtccgagtttaaaggctacctttaaataattaaatattattattcctttgtcctcataattacttaaaaatgcaaagtatattttttttaatgagaggaagttaattttatttataatggcatcttttacttttttaaacttattaatatcagtagaaatttcaactatattcccgagcaaaaggggagtatttgtctggctttttccatatatagatgttggaggtgatccatttgagtaaaaagcatcatatatggaagttaataggccttcaaaagtatcgtcatataagtatattttcataatcaaaactctccagttaaagaagtaattttatcacctaatgttaatatatttgacttaggaattatattatttaaagagttttcattttttatagatgatatatgtgataaagaaatattatccttaggtaatataattccagaaggaagctttacatcattaaatgaagtattatcaaaaaatgatatttgattaggatttacgctgccacttttagaaatatcttgttctagaagtttattttttattttaatagtatcaaaaagaacatctccatgatattttccgttacaggtaataaaatatttagctcttttaagtacaacccttaggtttctcaagtcatcaaaggtcagattatgaactcttcttatttttaaaattttcttagcagaagtaactcctataccaggtattcgtaataatttttcataagaaactttgttaatttcaacaggaaattcattcaaattggataatgcccaatgtgtttttgggtcgaaatttaaatcaaagttatcatcatcattcttcaagagttcattagctttaaatccataatatctaagaagccaatcggcttgataaagtctatgttctctaagcattggtggatgcgtaatgtcaggaagcaggttattgtccttaatcacagggacataagcagagtagtacactctctttagactatatttattgtaaagagcttcagagagttttaggatttttccatcactttcaggagttgcgccaacgattaattgagtactttgaccacctggtacaaacaatggtgtactttttatgctttttttcatttcactataattaattattgaattttttatagttttcataggttgtaaaattttttctttactcttttgaggtgctaaaagtttaagactattgctagaaggaagttctatattaacactcattctatctacaaattttccagcttcctcaattaaagcattatcagcgccaggtataacttttagatgaatataaccattgaacttattttctatacgcagttttttcacagttttaagtagaagttccatagtataattaggattataaataacagcggaacttaaaaagaggccctctatataattacgcctgtaaaaattaatagaaagactgcatatttcatcaggagtaaagcttactcttaaaaaatctctagatgatccattaatgcaatatttacaatcaaaaatacaatcatttgaaaataatattttaaggagagaaatgcaacgtccatccggagtaaagctgtgacaaataccagcttctgaagcattgcctattccatttttagcattctgtctctttgagccagaagaggaacaagagacatcatattttgcggcattagataatatttttaatttttccattaaatccattttgattacacttccttataaaatgaaactttaaaattaaaatatatgctctgacaaaacttgaatggtgtattggaatttagtttttgtatttttgcattaactaagcacgtagggaatagaattttaaagttaaattaattatcataaaatatacacgctctaaaaaatttaattcatcgaagtttattttaaaatataagataataaaaaattagataattctataatgattgaatcatattttttagaacatatacaaatagaaaa

SEQ ID NO: 65 - DNA, 34742 bp, Clostridium beijerinckii
attattagtattgtaacttaattaataagaaatttataaatgttgcaggtgaaaaaatgaaatacgatattcaggttcttaagaataataatcttccagaaagtttagttgattttttaaattatttagaaacgattaaaagtacatctataaacacaattgatgggtatagaatagatttgactatattttttagatttatgatgatttataaagggaaagtaaattctgactctgttgagtttgaagatatagatataagcgttattgatgatgagtttttaagaggtataaaacttagagatttgtatgcgttcctttctttcacagagaaatatagagataacagttcatatgctagagctagaaaagttgctactctaaagtctttttttaagtttctttttgggaaagctaaagtgatcacagagaatccggctttagagttggaatcgcccaaaataaataagcgtcatcctgtataccttaccctaaatcaaagcatccatctattagaatcattaaacaaaaatgataaaaattactccagagactattgtattttgatgttctttctgaattgcggaatgaggctttcggaactttgcagtattcaaattgataaaatcagagatgatactcttactatcataggtaaaggaaataaagaaagaactgtttatttaaatgacgcatgccttaaagctttagcaaattatttaaatgttcgagatgactctaaggctttatcggaaaataaaaagtttttatttttatcatctagaaatgttcctataaataaacgtacggttgagataatgataaaaaaacatataacgaatgctgggttaactgatgataaatatactccacacaagttgaggcacactgctgcaactcttatgtataagtacggaaacgtagatataagaagtttgcaaagtatattgggtcatacaaatatttcgactactcaaatttatacgcatgttgatgatgattcgttgagagatgctgtaaaatcaaaccctctttcaaaattgtaaagttttattattaaaatttataataaaagatttctactactctcctactatgctttggtattgtttaaattaaaaaaataaaaggttactttattttctatcgtaacctttttgtgcttaatataaatatttttagtgttgtggtcttagtgtgtttccgtacatttttccaaactcgtcaacatatgcaggttcttttccttcataaacgataagagtatttccctttctataataataaggactcgcattgttatttgcattattgctactagcattcattccatttggtacgattctattgatggcccattctagctctgttggagaattatactcgtatattctaactacatctccacctaataaataatctgtttcatttcctttaaaataatcatttttattagtgttagttgattctttaatatcatatccggcatttgtgaaatcgtttttaaaatcagcggctctgtatgttgtatcattagtagttagacctgttctatccctcgtagtatctgaagtcgatccggctacattgttttgattagtatcccctactgcattattttgattggtattccctcctacagttccatttcctgctgcgccttgcatatttccgctagttccaccttgcatgtttccgtcagtaccattttgagcattattagcgccagtacctgttccatctacacttccacttctaatgccatcgtttgttatgtcgttttgtctagtgacatcattatttgttcttgtaccacacccaaacaaagatattgaaaccaaaagaattgctgtcaaattcaacgctaaaatagattttcgcttcataataattcatcctttcttgtgaaatcttctacgaaattattatgtgaaataaagcgaaaatctatgcatttctttattgtagtctacaagcttcttttattcaattgatttttttaatcttctaactccaggatatacttcttctgtcatttcatcgaggatcagatcatcatctaaactgatctcatctaaatattcaatatgatcaaaagcatcttcgtaagcgctgtcttcaagattaaagtcatttacgtcaatgtcatttgatgtttttgcaaacttattatatatagattttaaatctaatttatcttcgttaatttcatgtaattcatcttcacttaaggatgcttttaagtcatttaaaaattcttcttctagtaattcgttctcttcttgtgttttcgcaatgtcttctattttaatggcttttgtatctatgccgttgatttgcaaacacttaccacaattatcacatattttattttcatagatatcgcaataatcatcatcagtatatttatatgtcatttaaaacacctcatttttttattatggaaacttaattataccaaaaacaataaattaaatcaaattttttatcgaagatagaatatcaaataaagaataagataatttaacgtagataaattattaaattcaatctaattatttaatctaaattatatcattccattctatatatttactaagtataacaacagccttttctaggtaagtcttttctacttcagtaaatctttcgaattcttcactatccaagtctaaaactccaataagatttccttctttaattataggaatgactatttctgaatttgaggcagcatcacacgctatatgtccctcgaaattatgtacatctttaacaagtaaagtttctttttctaatgcagcttttccgcaaacacccttccctatttcaatttttgtacaagcaggcattccttggaacggccctaatacaagagtattatttttaaccaaatagaatccacaccaatttattcgatctataagtgcattaattaatgctgatgcattacaaagctttgttattggagaatcttcatctccttgaatcaaaccttcaagcattataagcatgttgtctaatttactttctgtactcatgccttcaaaaattttaatatcaaacatatttactaccgcctcactttgaaactatcgtcccaaaaaaaattttataactttagttattctactataaaataatactaccatttttaattaattggaatacttagttaatatattgtattccaatttagtgttgtatctaaaccaaatacatactacctataaacactttagaacacaagtttgctatgttatatagtatatgttataattattagaagaatagtgaggtgtttgtaatgtcagacgaaaaagataagcaatcagagatatatgaatttttaaaaagttatacagagagcaaaggttatccgccttcagtaagagaaatttgcgaagcagtctctttaaggtcaacttcaactgttcatggacatttaaaaagattagaaaaaaagggaatgattaaaagagatccttctaaaccaagggctttagaaatagcagaactttcaatgccgaaaaaagaaatgattaacattcctattataggcaaaattacagcaggttctccaatacttgcaactgaaaacatagaagacacatttacgcttccgttggattttataaaacatgatagagaattgtttatgctgcgtgtttctggcgaaagcatggttaatgcaggtattagagataatgatttagctattatagaaagtgcacaagcagccataaatggtgatatagtagtagctttaatagaagatagtgctacaataaaaagattttttaaagaaaaagaccatattagacttcaaccagaaaatgatgctatggatcctataatagtagatgattgcatgattttaggaaaacttgtaggtatattcagatcattttaaacaaattactttgttattgatttcgaaattatattataagatagtaaattaatagactattaaattttatgatctataaaatttaatagtctattttaaatttaatccctacttacatattgggaagctagtgataaatttgtgatattatctatctacttctaacactttgcttaaaccaataagtattccaatttttccgtgatcaaagtttaatccaccttgaatatatgctatatatggctctctaaccggtccatcagctgataattcgattgttgaacctgagataaatgagccagcagccattacaatttcactatcatatccaggcattgcccatggctcacacactgcaaatgcatctataggagatccggcttgaataccactacaaaaattaattaattttttagcatcgccaaattcaattgcttgaattatatcagttcttttatctgttgatgaaggaaataccttaaatcctgcaatttccattacacgagcgcagaatattgctgtttttacagcttctatggctacgtgaggagcggagaacaatccttgatataaacttctcataagtccatatgtagcgccatattcgcctcctacacctggtacagtcattctgttagcagctgcatcaacatactgtctctttccaacgatatatcctccacctggagcaatacctccacctatattcttcataagtgatccagccattatatctgcaccatattctgtaggttctacaggttcaataaattctccataacaattatctacaaatataattacatcttctcgtatttctcttatatgtctaataacttcagctatttcagaaactagaaaagattttcttgaagcataaccagtgcttctttgaatatgtataagtctaatacttggatcatttctcaatgcttcttgaattttatcaaattgaaatttacctttattatctaaatctactatatcggttttaattccatattgatctaatgaaccggcgtttttcttctctgatagtccaagaaccccaagcaaagtatcataaggaagtcctgaaacacataagatcttatctccaggcctaacattacccgcaatagcgcatccaatagcgtgtgtaccactaacaaaatgtggacggacaagtccggcttcagtattaaagatattagcatatactttatctaatgagtcacgccctaaatcatcaagtccataacctgtagtatttgtaaagtgagagtcgctaattttttctaattgaaatgctttcagtactttaagttgattaaattctctaatttcatcatattctttaaattgagcttcagtatcagataaagcctgtctatatatttcaaatgtcctttcgctaatattataattcttaattaaaaattcttctgtcttttttaacatatctaagtctcatcctccaaagtttagaaatactcaaaaataaataggcaaaaatgcctatttactaagtagtttcgtattcgttatctgcaaataaaattggtttagttggcgttatagttgatattgcatgcttatatataagcatttgcttattatcgcaatccaaaataacagtgaaattatcaaaaccctttacagtaccttttaactgaaatccatttactaagtgtattattatttgtattttattttttctcgcattatttagaaatatatcttgtaggttgttttgttgcttattgaccaaaatataacacctccataagtgattttattactaatattataacgctagttctttattatgtcattaataactttatctaaaatttcatcatcactcataatatccttgtctaaaaatatacatcttttatcacgtctaaaccatgtaagttgccttttagcataatttcgagatccttgttttatcatatctattgctttatctagagttattttaccttctagataatataatatctctttgtatcctatcccctgcatagattgaatatctgaattatatcccatttcttttaatcttatgcattcatttagcaagcccttttccatcattaaatcaactcttttattgattctatcatataatttttctctattcatagttagtacgtaataatatacatcatattcactattgtaaaaatccaatccaacattatatgagctaaaaggcttattagtaagtttaaaaacctctaacgctctgataactctttttctattgttagcatgaatttctttgtaacttataggatcaatatctttaagcatttcatgtatatattcattacccttttctaatgctaaattttctagatattctctataaatttcatctttttctgcttctgtaaaggtcatattgcaagttaatgaattaatatataaacccgttcctcctgatattattgggaattttccgttacatataattttttctaatgcttcttcacctagttgcttaaaatctgctactgaaaaaggagtatcaggttctattgcatcaattaaatgatgctttatcccgttcatttcatctttagttacttttgcagaacctatatccatatatttatagatttgcatagaatcagctgaaataatttctccatttaaatttttggctaattttattgaaagatcagtttttcctactgcagtagggccaccaataactaataatttttgcttcattattttatcccttcgttaataattttaaagtttatattcatttagaataatataaaagcattatattattcttttaaatttcttatcaatgtctatacttgtaaattttattattacaggcctaccgtgtggacagtgaaaaggatcatctatatatcttaaatcttcaattaatttaatcatctcattcatttctaatttatcatttcctttaatagctgctttacatgctttagttgcaatagcattatgttttacttcacttgttttgccgtttcctaaattttttaaattatcaagtatatctaggaacaagtttttaggattaagtcgtcctaagaagtacggaacttcttttaaagataatgaacttccaccaaactcttctaataaaaaaccagcttctctaaatatgtctttattctcttcaaaataagaataatcatcaatactcaagtcaattatacttggaacaataagaggttgaattataatagtaccttcttcaatttctttaagatatttttcaaataatattttttcatgagcagcatgctgatcaatcatgtataaggtaccgtcatactctcctaatatataagttttattatattgacctattatagtaattggtggaaacttagcaataggatttggcttaatattttcgtatttgttttctgtaattacgttttctataggttcagaattagattttatttcatcttctgcattatcattatactcatccaccaaattttctatatatgaattaggtttaagatctacaggaatacttataggctcttcattttccttgttataatcagtgctttcctcaactattgttttattaatattattcaagcttggatcatatacacttttaaagctactctcgttattagccttaaggtcttttccttgagacattaaagtctttgctgcagaacttgcaaatttaaccttttcttcttcttcttttattttaaaagtaatctcctcaaatgttggtagtggttctttttttgtattttcttcttcttttatcgcaaaagtctcaaaaacttcattttttaatgcagtatgaactgctccaaaaatctttttgaatatcattctttcatcattaaattttatttcagcctttgttggatgaatattaacatctacatattcaggatatacttctataaataatataaagaacggaaatttatttactgttgaaaatgacttaaatgcttgctctacagctattgctaacgccctattttttatgtatcttctatttacgaaaatactttgattatttcttgatcctctagctatttcctcagttcctacataaccataaacagttattaaatcggaactatcactaaagtaaagtatattatctgttatagacttaccatatatagttcttattacatccttaagatctccattaccaaaggtatgtaatacttttttatgattgttatacaatttaaaacttattttaggatttgcaagtgataatcttgttactatatcatttattaatgaactctcttttgatacagattttaagaacttcttcctagcaggaacattaaagaatagatcttgcacttctagtatggtacctttatttattccacactctgttacttctgatgctttaccgccttcaatagatatttcatacccaaaggcttcttcatcctgcttagactttaaattaactttacctacagatgctatagatggcagtgcttctcctctgaatccaagagtatgtatattataaatatcttctgacgcttgtatcttgcttgtagcatgcggaagaaatgctttcgctatatcatctttatagattccgtctccatcatctattattctaataagagaaattccaccttcttctatttcaatgattatgtttttagaatttgcatcaattgaattttcaatcaactctttgactactgacgctggtctttctacaacttctcctgctgcaattttatttgctgtgtcttcatttaatatatttattctcttcaagatgtcctttcctcctttcaatgcttatgggcgtaaaatgcaaatgagaaaatcacttcccaataagccttcctaatgaacacatgaacttatttctaatacattgttattattacatacttgtttaatatattcaataatattgaaatactggtataggaatgagttataattcgaatatatctttttaactatgctttttattttatactctaaatgattttagtatttctattaatatttccattagaacaagattatatttaatttacatataagtaacaatctaaacacaaaatatatttacaataaataatatttgctgttaatatggttaagctaatattagaaattaaatattttctataaggaggctttaatatgaatgataaagatttttataattcaaataaaagtgtatctgatccagcatcacaaaattataataaggtagtaaaagaaaaagcacatcaagaaagtccatttggggaagctgagccttcttctcatactgaatttaaaaagaaaagacactaaaatcataaatccacgacaaaaattaaataatgtcgtggatttatggattttaaattaaattatcatctttcaacagattatataatgtaggattaaaattaaattgaccaattaaattttcaacttctaataacgctttttcttttttatccttagatatattagacttagaggctctaatcaatatgtttttaggagaatgtgcaatatcaataaattctaaaagttgtgttttgtatcctatgctttctaaaaggttagctctaacagaatcagtcataagtgctgcaattctttcttgaactattccatactttgttagtattgacagtgaatctgtcttcatttgggcgttaaattcatgctgacaacaagggacagagaatattaatttggcattccattttatagcattatataatgcgtaatcagtagcagtatcacatgcatgtaatgttattaccatatcaactttattattatatttaaatccatttatatctccaagttcaaagtgtaaattttcatagttataactttgggctatatcattacatttttttataacatcggctttaagatctaatccaatcatctttactttaatattctttatttctacaaggtaataatacaatacaaaagttaagtaagattttccacaaccaaaatctaaaacagtaagttctttataatcatttttcttgatttcatcatcaataatttcaacaaaacgattaatttgcttgtatttatcatactttgagttaactacttttccctcttttgtaaatacacctaaatctattaatggatcaataatcataccctcttttaatatataatttttttctttattatgcgctttgctaagtgttttttgattatcactttttttcttacttaatagaaccttacccttttttgatattttcacctcaaagctagccgaatttgaccatgcagaaatttgcttataatttggttccacatactctataattctatcttccaaaatatctgtatcaatgttttcatggaacacttgcttatcagtatatttttctatttgatagtacgttcttttattattttctttgagatatataactattttattatattcaaaatttttatttgttttattgctaataactagctttataacattgtcttctattatttctttaatcgctttttttaactcttccatacttcaactcaccttatattcaataatcttgtttactaacagtattaatatattagtttttaaacctatttttatattttatattaattttatctataatactatgattatttatagataatttcagacttgaaaattttttagttaggtcaatcttgcaactacagtatacctttttttaataattccttgaaagtatcccattctacaaattttccacccatactttccaaatgttttgtatgcatctggcaatctataaatatgaaattttcgttttttagtttttctgcaagctttattaatgctattttagatgcattacttaccttagaaaacatactctctccgaagaagcattttcctattttgacgccatataagcctcccactagctctccatttatgtatgtctcaacactcattgcatagcctttattaaacaaatttacatatgcttccttcatatcactattaatccaagttccctcattattttcttctcgtatatccttgcaattactaattacaccataaaaatctttgttgaaagttacatgaaacatctctttttttataattttcttcattgatttagaaattttaacttcatctggtattaatataaatcttggcttgggacaccaccaaagaatcggttcaccttcgttataccatggaaatataccattacaataagctaatagcagtctttctaatgataaatctcctccaattgccaaaagtccatctttttctgaaagctcaggattaggaaataatatctcatttgttagtctaaatataggcattatattcacttccttgtattttaattcttcttttaaattattctatcatattctaatacttaaataattctttgcaaaaaaataagcttgtaaaagcttatttttgttaaaaatgcaaaatactttatgattataacattttataaaaatctaacattgattcctttaccaagaagttggacgcattattgactttggtaagattgtattagaatctcctttcgctgaattaatctgagattgcgtaatgaataagctatctttaagattagcacctctaatatctgcatcacgtaagtcaactccaataagatccgcataactcaaatcatttcctctaagatctgctgctatgagaaatgcccctcttaggtccgcgcctttaagattaatctttttaagatctgcaccaatgcaatccaatctgccagcaattgtttttttacgttttaagttagttttaccgttaccaagcgctttggccctaacaaattcgcttgtttgcctgagtagcgcattaacattatctctatgcacctctatatctaaaatcataaggaggtcgggtgctgatttagtaatatcttctgtttcagttattagatcatttattttattttttatcttttcattagtttgaaatgataaagcttgttttagataccacaacatttcatgaagctgtctcataatcaaaaagacttcatacattttatcggataattcaggattttctctccaattatgtccagcatatgtaatttgagcaaccttttgtccagcaccaaaacagtcgtaagttgtacaacctttaagtcctttttttctcaaatccttatgaatagagcaaccaaaatctgattgcaaatttaagcaaggctttccagcgattttattgtttggaaatccgtctgaagccgaaaaatataatgcaacacaacaaaaaccaaagcatttttggcaattaatttttagatcttcaaataattcttcttcaaatgtattttcgtttatatatgtcaaagtaactcaccccgtaatattatatataacgcagtcataacttatagcaagtaatttagtattaaaatattgtattatgtatttaaaaacttatgttccaactgcatttagaattattttaacataattggaactattaaactactttaataggattagaaagtttttattttaattttttagcttcagcaactaatctatatagagtgttcatagcttccataggatttaaacttaatatatcaacttcgctaacttcttttagaaatgcctctttttctataaaagtaaaatctaattgcatattgttagaagagtccttattcttatgttttttagatgaattttcagtcttttcatcaattctatgatcatctttattactttctgctttatcaaaagagtcttttgcttcaactttttctatatattcactcttactttcacaggctttttcagtaatagtaactacattattggcttgatttatatctacagcaacctcattttctatgatttcagtgtttgttactttgtgtatatcaaaattattttcgccttcaagtcctagaagaatttcttttgctctattaataacatcatcaggaagaccggcaagttttgcaacttctataccgtatgactcatccgcaccgccttcgactatctttcttaagaagattacactatctttcattttcttaacagctacagagtaattcttaacaccaggtaaaactccttcaagttttactaattcatgatagtgtgttgcaaataaagttttgcatcttaaattttcattaccagttatgtattcaatgacagaccaagctatcgaaagtccatcataagttgatgttccacgccctacttcatctaataatactagacttttagaagttgcattcttaagtatatttgatacttcccacatttcaaccataaatgtggatttaccaccagctaaatcatcagaagctccaattctagtgaatatcttatcgcaaattgaaatattagcgctagaagctggtacgaaagatcctatttgggccattaacgtaataagggcaacctgtctcatgtaggttgatttacctgccatgttaggcccagttattaatagcaattccttatcactttgattcaaggtagtattgttggaaacaaattcacctcttccaattaccttttcaacaactgggtgcctgccatctactattttgataattccatcttcattgatttcaggttttatataatcattttcaagagcgattaatgccaaggtggaaataccatctagattagaaattattctagcacttttttttagtcttgcaatttccttctcaatggaatctcttatatcagtgaataaagaatattctaagtttataagcttctcttctgcgcctagaattttatcttccataattttaagttcttctgttatatatctctcagcgtttgcaagagtttgctttctcacatacctaccttctggaatagaattataatttgattttgaaatttctatgtaatatccaaatactttgttataacctacctttaaagatttgattccggtaaattctctttcacgattttctagagccgcaatccattccttaccatgaagctttgactgtcttaattcatcaacttcagaattataaccatctttaattatatttccttcttttatacttaaagagggctcttctttaatggaggattcaagtaattctcttatgtctgatagttcatctaaattttcataatattcttttagcagttctgaattagcagttcctaaaagttcttttatagatggtaatttatctaatgaagctttaagagataacatatcttttgcattcacatttttatttgaaattttaccgacaattctttctatatcataaatatcttttaaagagcttcttaaatcctcattaaaactaattgaactaaatgcttcgctaacaccacttagtcttttttctatttcagatttaataattaacggttcttcaatccattttctaattgttctaccacccatagatgtagcacttttatcaagaacccataaaagagacccttttttgcttttctctcgtatactttcagtaagttctaaattccttcttgaatttccgtcgattgtcatgtaattaattatttcatattgttctagcaaatttatattagttaaactcattttttgagtttcatatatgtatttaagtagtactctacttgaaatttctctttcatttactaatccggaaacctctaaatccgaaaattgatctataatttcttcttttgatacgataaattcattaaagtctttctctgtaataagtgcagtagttataccctttatatcatctattaaagattggctaatgtttttatctactaaaatttctttaggtgcaacctttgaaatctcgtctaataaggttatctttatattatcaaaggaagttgttttaaattcgccagtacttatatccgaaactgctaaacctattttttcatcgctttcatatatagtcattaaatatgtattatcattttctagagaactattagcatctatgaatgttcctggtgtaattatttttacaacacctctttttacaattccttttgcttcctttggatcttcaagctgttcacatattgctaccttataccccttattaacaagccttggtatatatgctgctgctgcatgatgtggtattccacacataggagctctttcctcaagaccacaattttttcctgtaagaactaactcaagttctctagatacagttattgcatcatcaaagaacatttcgtaaaaatcacctaatctataaaatagaatacaatcactgtattcctcctttgttttcatatattcaaccatcattggcgttaaagccataattaatttcctcctttttatgtagctaggttaaattatttctcgacctagatttatatatttaatttaaagtaatatttatataaatttcattatacatctaaaaatccctagaacaattataacaattatcttagagattttcattaatattttatttaactgaaaatagatataaatatttatcttaaaaggatttttctaattttagtttttcttaaaattgtaattattaatgcagacaataataaagaacagataaacctaagaagtgtatttgcaaaaagtactggtataaacattgcaagccatatcataactatttgatgagaacaatatattcctaagctatattccctacaggctttagaaaccttagtagaaatattttttgtggaattaattgcccaaattaagattaaaggggctgcaattattgatgatagatacatattagcgtccttagcaattccagttttatttaacacaaaggtttcaattaaaagtaatataattgaaagtatacttaataatcctgacttttgtattttttcatttaatttatatttgctaacgattgcacctaaagatacaaaaagaattgattcggtaatgcctatttgtggaagcataaatattgaagtatatccgttgattaatggatttataatagttttttcaaacaacccataataggtgtctccagttgtcccaaatagatataatacaaatccaattataaacaagaaaaacaacttgtctctttttaataatggagaaattataaagatagtaataattaacgaagatatataccaaaggcttccagtgacccctgcaaataataatctctcaataattaaaataggtggagcacttaaactgcttaagacaagtggaaataaagctataatctcaataagcacccataaaaaatagatacgtaataaatgcttaatagttgatttaggctctttttcagaaccaattctattatataaaaagtaacccgaaaccataaagaaaaatggcacagcgagtctagcaatacccatactagtagcaatccataagtcatcatttatggatttgaaagccattgtatgaattgatacaactgcaattgcaaaaactaaacgtaatacatcaaccattccataatgaatatcattttttgattccatatcacaacactctccctgaatatattaatattttagagtaggcacttagaattttaaatgcctactcattaaaatcatcataaattacatatgcatcttcttgattgctcatttttttacctcctacttacttatataaatatagtagtacaagtaataagccttagttacataaaacctctgaattatacacttttaaagctcaaacgtcacttaagctaaattagagaaaagtatatatcctaataccgtgacaacaaaaaattatattaatataaaaaatacaccaagttaaatccaagaaatctgaattcaacgtggtgcattttctctatatagtgattgttataagattttatcattttattttatatcaacgcaacaaatctcaaataattaaaagtagctaataatttgttgaaactttatgtgtctatcttactaaatttattactgttgctttaggtctagacatagattcaattgaatatcttattccttgagttcctattccagaagctttaactcctaggaatgggaaatggtctggacctctctctgttttattatttacttgtactgtacctacctctaatctgtcagctacataaaatgcatcatcaatattttctgtaaatactgcactttgaagtccgtattctgatttattcgctatctcaatagcttcatctttgtcttttactcttattattggaagaactggtccaaaaggctcttcccatgcaagcctcatatcagtagtaacattatcaaaaagtgttgggtatattaaattaccttctctatttccaccaacaattagatctgcacctttatctttagcatcatctattaattccataacataatcagccgctttagtactaattaatggtacaatatctacatctttttctaatggatttccgaccacaagtttattcattttctctttaactttagaaattaatttatcagcaactttttctaatactaaaattctttttactgcagtacatctttggcctgagtatgagtaaccacctgctacaatattattggctgcaagctctaagtccgcatcttctaaaactatagcggcatcttttccacctaactccattaaaagtggtaccatgctagttagttttgaaattctaacaccaacgtctgtacttccagtgaaattaataaagtttacgcctttatgagtaactgcgtaatctcctatttcgcttcctctacctgtgattgtatttaataccccatttggtactcctgcttcttgaaaaacttttgctaagtataaaccacataggctaccttgagtagcaggctttaatactaatgagtttcctacaattattgcaggcgctatctttgatgctgataggtttattgggtaattaaatggagatattgcaagaactactcctaatggctctctatttacaactgagattttatttcttttaaatccagggaaagtatcgcctggtatactttcaccagacatattcttagctgtatcagcagtgaatcttataaaatctgctgttctatgaatttcagactttgagctctttctgtctttaccaatttctctgaccataatatcaacaatttcatcagttctttcaactaaaatatcagcagctttatataaaatctcggctctttcactcattggaactttactccattttttttggccctcttttgcaatacttattacattatcaacatcttcctttgtcatagcaggaactgtgccaattaatgaattatcaagtggcgaatagatttcaattactttgttatctttactaccaacccattcaccatttattaaatttttaaagttattattttcgcattttatacaattaaacattccttcacctctttaatacaatttactaattaatattaattatcatttaataatataatatactaattcttatattatatccagataaattaataaaatttaataattaatatatttttcttcttgaaaatacagcttagtgttataaagtatggaatataaaaaattacttcttatgaattttatgaaaaatttaagattaaaattcatattaattaaaactttaagaatatctaatgccttttggtataaagcctatagaaaatagttattttaacctgttatctttagtaaaaaatgttctatatccaagggttacaaacaagacagtggacacagcggtactgcctaatatagcaagcattataccaatttgatattttattgcagtgataggaaatgttccagaaagaatctgtcctgtcatcattcctggtagagatacaattcccatagttagcatattattcatagttggaagtatggcgctatcgaaagcattattaacaatttgtctagtggcatcaagtgtgcttgcaccaagcattaacgaattttctatttcaattcttttatcttcaaaatcactacatagtttatttgcacctagtgcaatacctgtcatgctgttaccaacaatcatacctgaaataggaataaaatattgaggattgaaccatgggcgaacactaagaacaactattataaagaaagctgcagtcaaaagagctccaaaggtcattgaaatagcaattatactttttaattcctttgacatttgaactttaactctttttattgaattataaattgcaaaagaaatcataattataatcataaaagaagttaaccaccaacttggattattaaatacgaacatgagaacatagcccattatagtaagttgtattgtcattctagttgaagcaatcaatatttgtttttctcttttgatgcctcttgatttaaaaataataagcattattagtacaaaaacataagcaattgaaagttggaagactgatagattcattactgcattattcataataagatttcacaacctctccattttcaatcctaactattgaattgttatatttctgcgctatttgctctgaatgagtgatcattataagttccttattgttttctaacacaaactttgaaaaattatctattataaattgctcagtatctttgtctagtgcagctgaaggctcgtctaacaaatatgtatcagcatccattaacattactctagctaggcatagtcgttgtttctctcctccagaaaggttaccacatccatcagtgagttttttattaagttccactctttcaagaatttctttcattctactctttgatgcaggaagtttttttgaaaattccaatccaatttggagattgtcttctatattaccactataaataactggagtttgacctaacataactacatttctacgtaatattattgtatcaattttagaaatatctttattattataaagtataactccatcatcgggtacatttagacggtttaacatgcgaagtaaagttgtctttccactaccagaaggccctacaacacatgtaattggtttatctatatttagaaatttgatatctaatatatttctaaattttatatttctaatttcaaacatattaattcacttcctaactatatagcttttgtaatcatttctgcacatatcattcaaattgattgatgacataaacttagtataagtaaaaaaaccttgtaacaattataccaataattacaaggtttttcactaaatctatgaatttttaataagcccaatagctacacctaaaacgttaaattgttgatcatctataataattggctgatatttgtcgttctcaggtataagagcaattttaccatcaataactttatacgtcttaagcgttgcttcaccttcaatatcaacagcaacaatatccttaatacgtggcatattctgcttacttattactacataatctccatcataaatatttttatttatcatggaatcacctttaactttaagcataaaaacatcttttgaagttcttatccaatcctttggtaatgagtagctatcctcaatatattcattaattaaaattggattacccgctgcaatctcattaaatacaggaatatttactacgtcgtctactttttcttcaaaattgttataatctacatatatttcatctactgatcctgaatcttttataaatctatgagatatatttctctttaaatctatatattctatagaccctaatgtaagagatgaactttgtaatgaattcttattagtctcatttttttgaatcaacttatcactgctatctacaaatttttcgatatcttcaacttctatttccttgtaagattcattcaaagaaatacattttcccttcatatcatatcctaaactagaaaagtggcgtccctttacaagccaagcattaggaatagcggtttcaaaagtatccataataaatgttatactagaataagatttttcattatatattgatttaactaattctaattgaactttcgtaagttgttggctattatctatgaatatatgggtataattaattattggagctttttttgcttcatttaaagctaaaagttccatgtcttgagcatctactttattaagttttcttaagttattagtatattcttctaaaacttcaaagatagcttgtctttgcttagagtttcttctaagaattttagatatctcagtgttcaaattattaattctaccaactctattagcgctttgatactcttcaagttttaaataattacatgatttaatccatttaatctcgtcttttatgaattcaatatgatctaaatttaatatattcggttttttcttttcgtatccttttgacactataagtattgcatctttaagctcagcttcacgttcttcaaaagatgccaaagtaagatttatattattattttttacatatttatttaaataataagagactaaagaatctattgtccttatttctaatttatcactattatcttcatcaaagaagctattttgatgatatttttcaccttcaatatttctatagacagaataaaaataatcataatattcttcgttacaagctgcgacaagtattttatcatccttagatatacaataattattaagtagtgatggaatcttatgtataaatgcagtagtctttccagaaccttttggaccttttattaatagatgaccatttggcttattattaattatctttttttgttttttgccaaattccatatttctcccctccttttttcattgaatttcactttataaatcgaacatgaattcttaattattttgtaattatactatacttaatagctgtatgtaaagtttagagaagtaacgtaaatttgtttgtcgattatcgaaaaatctttaattagctggtcaaacattgtattaatcttataaaatagttataataaacaaagtaaaataaggcaatttaaatatggatatacaaacgaaaaaggaaggtgacataatggaatccaatattatattttttgatattgatggaacattatttaatgaaaagacttatacagtccctaacagtgctaaggcggctctaaaaaaagcacaagaaaatggacatctaatcttcattaatacagggagaacaattataggcatagatgattgtgtcaaagaactaaattttgatggttatgtttgtggatgtggaacttacatagaatttaaaaataaagaaatactacatagaaatcttggaatagatttatcaaaagaaattgtagccaagcttcgcaaatataatatcgatgctatattagagggtaagaatgacatttattacgatactaatatacattctaaagaagttcttagaatcaaagaacgtcacataagggaaggattttataaaggtaaaacttttgatgatactgaaattaactttgataaatttgtaatttggactaatgaaaatagtgattttgaaagctttcataacgaattcaaaagtttatttgaatttatccatcgtggtgaaggcttttatgaattagttcctttaggattctctaaagcatcaggtatagaatacttaataaattatttagacattcatcacgaaaacacatatgctattggtgatagtacaaatgatctatctatgcttaaatatgtgaaaaacagtattgctatgggaaatagtactccattattatttgacttagtatcatttgtaacaaaggatattgaggatgatggaattaaatatgctttaaaacactacaatattatatagaaaattatttatttttagttcctcctaaaagaaatgtataaaatagcctgtcgctaaatatacatagtagaagaaatcttttaggaggaaaatactaggactcaaaaaataaatttatattggtatataagcaaaaagcacctaataatataaaatttcatagtataataggaaacctttaaaatttaaggagtagtaaaagtggaaaattcaattaaagctatttgcaatacttcaacatacttggataaatatcattcgaatacaaacttttcaagtaatgattcattactcgttgggtccataaacaataggtcactaggcaataatcgctatatttctttattaaactttcaactatctgaattacatcctaactctgtaaagaaagcatatttatatttgtttattcaagatattaaaccagattataagaattcctttagctttggtattttaggtaattatagcaatatagatatagctgctattgattggtcgagcttgccccaaaaggattatacaaagttattaaatcatatagtacatggatataatataggacattatttaaaaattaatgttacttcattaattagatctttagcaacacataacgaaagctataatatatttttacttcctcaaaatcaggattctaattcaattattaaattatcttcattcgagtcaaaatatcctccatatttagatataataacatataatacagattcgacaaataatatagatttatcagaagaacttaatattgaaacttatattgaagaacctgttgaagataatacttacgatgatgaggagactgagactaataattctgaggatatttctgcatcaaaggaatcttcaaatgttgaaagagatagtgtaaaggatcaagaagatattacattaattaatcatttgcttaataaagttatggagatcttagtaaatcaagatttgaaactaaattctctgaactcttacagtgaatctttaggccaagaaataaacagcctatcaaacaaagttgcagatatcggtgataaaatatcttcattagatgaaaattctactaatttaaaacaaaatgatattgaaacgttaaatataaatatgtcatcattaaataatcagctattggaattaaaagctctattacctaatttaagtgtaaatattgagaatctaaaagagacaattaatgaatttactaagtcagggaaacttgatttttctaatttgaactctataagctctcaattattagaagtatcgtcaaatttgaattcattaacgaaattgatttgttccataaaagctgagcccgtaaactagactacaataaaaaatcattcaatatgtattgtataattaaagttcttgttcaggtaatagtaaaattatttgagcaagaactttaattatatgctctattattgattaacacttgtctatctttaacgagacttattaaaggttcttgctcaaacatacagtcttcattaggaatatagtttagagcctttttattaattatattatttatacatgtttttataatatttttgataatcaccagaggttacatttttcatccattctttattatctaaataccactttattgtttgttttattccaacttcaaaagcagtttctgggtaccaccccaattctttttttattttgtctggtgctatgccatatcttctatcatgtccttttctatcctcaacatattttattaagctttcacttacattcttatctacattttcgttaatataagaaataacggttttaacaatttgtatattagttctttcgttatgaccaccaatattatatatttctcctatcctgccattattaattaccatatcaatagcttttacatgatcttctacaaaaagccagtctcttatattcattccatctccatagacaggaagcctcttatgatttaaacaattatttattaataaaggaattaacttttctggaaattgaaaaggtccataattatttgagcaccttgttatatttataggcattttgtacgtatcataataagctttaactatcaaatctgcccctgctttacttgaagaatatggactatgaggatctaaaggggtagtctctttaaaaaagcctttagagcctaatgagccataaacttcatctgttgatacttgaagaaatttaacgccttcctcaaatccttgttcattttcccaagcattttttgcgcaattgaggatattaacagtaccaagtatatttgttttagcaaatacttcaggttcttttatacttctatcaacatgggattctgctgcaaaatggacaacataatttatatgatatttcttaaaaagtattgaaactaattctttatcacaaatatctccttcaacaaattcatatcttttatcattctctattgatttaagattttctaaattccctgcataagttaacttatctaaatttattatattaatatcttcgtatttatttagcatatataaaataaaatttgaccctataaatccagctccacctgtaactaaataagttttcatgactacaactccttcatttcacttgcctaatttacttataaacgcttctattgcatctttccaatctctcatttcatcgccaacagtatttcttaacatcgcattatcgagagacgaatatttaggcctttttgcctgagtcttatactcttcagacgtacaaggtcttacttcacattcttctccagataatttaacaattcttttagcaaattcataccatgtacactctccattattggtacaatgatatattccataatcttctgtttctattagcttcaagatatgatatgctaaatcattagcataagtaggatttcccatttgatcatttacaacattaatatagtttttttctttagaaagtttcattatggtataaacaaaattacttcctacataaccataaagccacgctgttcttacaataaaatgatttgaacataatagctgtacatactgctctcctagaaatttagttttaccatatacactagatggcgcagctaaatcatattcttttaatggcttatgagtattttcgttaaacacataatcggtagaaacttgtactagtttagcgcctattgagtcacaagctatagcaagatttcttggtcctattgagttaactctaaacgcaaaatcttcatcaatttcgcatctatcaacattggtggctgcagcgcagtttattactacctctggctttaaataactcagtacctctttaaccttgactaaatttgttatatctagcctatctacgtcaaagccaataacttcagatacttttatactctccgatatttctcctatatcagctcttccgatttttattatttcagtaatctctctacctaactgtccttttgctccagttattaatatcttcattataaaataagcacctcttttaactatatattataatctggatattaccttaaaaaatttcatttattcctacattaactttatcattttctgataaaattaccttaataactttctataaaagttatgcaacgtttaattattatcattcctcttaattcattccctgtactaaagtgcataaaaatctgtacctttataattaaatatagcttcatcataaagtactaaaaatcaatatgaaaaatcttacggaatataaaataagctttattatataatgatatgtaaaaattagaggaatgctgcaaatatattcgttattattttcaattcttttgctctcctctaatattccatagattatagttattgtatataggtatggatatcatttcatctacaattgcttttgtagaaatcaaaacactaacttcaaacttcattttttcatttgcaacaactggattgcttgttattgtagcaaaagaatttactacaaactctactccttgttgttctgcataaaccggtatatataaccttgctttctgcattccttcaatctttccttctacaatatatttttcttcatccttacctttaaactccacgatatatggtatgtaaaaattatattgtaatattgaataatcttttcgagtatctacaatagttacattttttgtttcatttataacttcacattttttaaatttaatatattctaggtttataattgcatccttatttaagggtaatctaattgaaatttcagagaaaattattttttcttgataagtagatagcactttttttgcgattatagtaatactattttcctgttttaatttttcttctgaatctattaaattaggaaattcatcttgtacttgaagtttacttttagttactatcccaatatcatatggaagactattattttgttcaaaattaaatgtatcaataatagtattatttgaagtgtcaattctatcaattactcctctcccatcatcacttcgacttgttactaagagtatttttttatctggagataatcgaagcctttgtatttttggaagagtagtttttatatttgttatgcattctttctttagcaagtctataacttcaattctatgtaagccactattagctgcatacaaaaaagtttcattctgttctagagctgtaattatagaacctatttgtaggcttatatatgaaatatctccactttcaagattaagtatagagacatttcctttataatttcctttatttgctcctttgttagcgatatagatacatttctcatttttttctataataatatagtttggtaaaatgccaacttctttatatagattgattaaatgaaaatctgatgtatcatataccttaatttcattctgtaaaatatccaatacaaataatcttctcttggatttatcaagttccaagcaatttgctgctataaagcctttcaaagaaccaatcttttcactagtttctaaattataaatgcatacctcttccgtatcgcatgcatatatctttttattattggaatccacttttatattaccattattggggatattccatgttttatcagaattaaacaaatcatgaataagagtaactttattatttctatcactagctatatatatattgtttttttcgtctataactatattttgaggccttggaccgatttcaacttcttttataatgcgataagtatcaccatcaatgatagatactctacctgtgcctatatttgatacataataaatcatcttctctagtttatcaatcataagtttgctgtcaccccatcattttcttatattaaaatttatgctttgttcttcgttattatgcaacaaaaacatgaaaagacctggtttaaccagatcttattcaactaattcataagtttcattttttccttctcctaaaatcttatacattgcggttggataaatattattcttatataattctgtttgaacaatttccatgtctatgtctttgaatttgactgcctgagtgcagctaatattaattttattaggagcgctaactaattttgttttaatatttcttttagttaaatgctcatatatatatagtgctctctgatgacaagtaaataccattatataatcatacttttctgctttcatataaatcgcctctatctggtgttatcctaatattatttataagatatttctaccttattgtatgttctaaaattttagaagtgattctatattccacttggtttctttcttaataaacgttccataatagattgattcctttcaaattcaaggtcttcatataatttattcttttcttcatttattgtcatgactttctgtctaattattagattttcattttcaagttctaataattttttttctatacttatcctaatatctttttcttttagtaattgatcttttgcatcatccagctgcttttttgtatcatcaaattccttttgaagattttgttgtaactctataaatacattataattctcatctgtcttacgtttttgttctaatattattgcaattctctcttcataatcatccatgaatctttgttttttttgcaattgcatatttaatgaatcaattttcctatccaaatttttcttttctaacttcactttagataattcgagttttaaattttgaatttcctcattttcattaaatgaaatttcattattaacttgattcgtctcatgtttcaatgaattattcatagtaaatctatttggaatatatagatttaaatccggttcatctgttccgtaagtctctagtaatttaacggaattatctctgttataatgcataaaacaatggtatctcattactgtaaattcattacctttatcaaaatatatagggctttcccattgctcattattaaaaaatgaataaaatatcttattttgttctatccaacaggcacataattcgttatttccaataaataatattggatcgattaatttcatattactttcacgaactctgtaaacttgtatattaccactaatatctatacaaacgtgatcaataaaatacaataaatcttctctagatttgtttaatatatgaacatcctgttgttggtcccttaacacttcaaaagatatatcatctccttgaatcccataaagtcttttagcagaagaccatttacgattttcaaagttacaatagtttagtgagacttcatctccttcatctgtgatgaaaaatacttcaagaccactttgttcatttgtgtttactaaataatattcctttaagttaggtaccaagacgatatcttgcagcgagaaaaatttcgtctcttttccattccaggcgcaatgcattaacacaccgtgatcactgccatcattgcttatgagcaaaaaaaatatatgcatttcttctccaataatttcaatctttaaatgctctatttgaaactcatcaaaatccatttgatatagagtttttccgacccaatgtttatccttcattgtgcaatatttcaattcacccttaatattgctgtatactatatgtattctctcatccccctcaacataaacagcaaaccccaatacttcattattaatcaaattttctttagtccattttccttcttcatacataattttataacacaattctctattatcatttcggaaaaatttccatatgttatcagtataatcaacatatatactattcatgccactccctccttaataaaattatatttttaatagaagtttattatgcttttttgtaaaacttattttaatttaacttttattatcaccagcataatgtaatttcatataatgtattgtaaatgttgaataaacttatgttcaataaactttttgaagaggaggaaaatatatgcccattaacttcaagaaattttcgccacgtcctggccttgtaaataaacaaggacatttaccagatccttctgaattagtttgcattgaagtaccaaagatttttgatcaatgcctaataaaaagatgtcttgtatatggcgatggtcctgacacaaatacaacagattctgaattaagaagcaatccactaacagatcctaaaagatatattggtagtagagattttaatttaacattaatttctgtggataagattccacttgcaggcagacctggcttcaaaaaaatagttatttcctatagaattactttctatgcagattatatagatgcaaatggtgtaaatcaaagcgaactgttcgaagttaatagaaccgatgtaataggaaaattttattgccctgaatctatagctcaaatttctgctagctttgttcctgttcaagatgcagctgatttggattctaatataataaaacttgaaatggttgctcaagctttggcaggtgaattattagaagatgaagaaggaaacgacgttttagatataactttaggttactatattgttgtaaaatgtgagcttattgttcaacttcttataccagcttatgattattgtcctgttccaaaagaaccatgtgaagaggaaccagaggaagacccatgcgagagatttgaaaaggctccaattcctaaattctatcctgatcaaaacttagagccattattctcagactgtgatgataatgatcaatagtattattaacaaaataattaacattataattccaaggattattagaatttctgtagataaatagatataggtcttttactaaaaatagatataaagatgtgatgatatccttttattgaattattatattcaattataaaattcaagtattatcatcaccttctttgataaagttcatatattatagtagaagaaccaaagaactctaaattatccatatagaaatttttataaaaatttatctaaattaaaaggaggattctatttatgaattcaatgtcaaaatgtcatgataatcatgataattgcaggaaagaaaaagatttatgtccaacaattataaaatgtagtcaagcaggttcagtaacagttccaccagctactgttttaggtactgcatttcctcttactgctcttactttagacacttcttgccttaaaaatccttgtgtaaagttagagtttgcaagtaatcttgttgctgcagttgcattcacaggaacaataaatttccaagtatttaaagtttgtagaaatcaatctactcctgttccagttggacctgcatacacttttaacttagtagcattattaagctcacaaacattatctttctttgtttgtgactgtggcgatttctgctgtgatgagtgttgcacttatacagtaactgcaactattactagtgctgttactgttggtactttaagtattaataatgcaactttaggtgcaatagcagcttgtggatcaagttcatgctgctaatagtaaaatctaaattgcttaagtctttagatttaaatattaatttggatattgaattgtattcaaaattttataaaatctaatataaattattctttaattagttgtaaaatctagaattaaaaatagtttaaactcgaggttaatgccttgagtttttctatataaaaaaataggaggaactatgaaaaaatattttactttatattggcctggacttcaaaattttcatcttacaaaagatgtaggtttaatcccttatgtctttcaaaagcatttaaattatgaggtttctattttatgtggcaaaaatgaagaacattatgatgaagtatttacaaaaaacattactcttaattttatggacgacgaagcttcagtgacatccttattgcaaaaaaccgatatccttatgtttattggcttatatgattttaatttaaatatgatagaaagatttaaatcagtaaatcccaatggcaagatttacttaaaactagatttaaatagatattggctaaatagaataacttttaatgatcgaagcattaatttgctaagtaataacagtttggtttccgtagaatcaaaaaatctaaaaaaaataattgatgatacctggccgataaaggttgagcatatacctaatggattttatgatttctttgatagtccattgataaattacaaggataaggaaaatatcatattaacagttggcaggctaggttcttatgaaaaagctactgaaattataatggaagcctttaaaatagcgtcagaaaaacttcctgactggaaattaaaattagtaggacccattgaaccaggctttaatgaatatattaataactacttgtataagtactatcctaagttacaaggcagagttatttttacaggccctatttatgatagaaagttactcatggaagaatacaagaagtcaaaagtattttgtttgacttcgcgggttgaggcttttgctcaagtatttggtgaagctgcttttaatggaaattatattatatcctctgatgtagagggcgcaatagatattacagatgataaaaaatatggagatatctttcaaataaataactttgaggaactttcaaagaaattgatttcaacatgctcaaacgaaaagctacttgaacaggtgtgcaatgatattcaaattaatacacgagataattttgagtggataaaaatctgcaaaaaaataaactctttcttttagaatatggcaaaattaagatattttaaactctatttttcacgctttttgctaattttcataaaatacaataaagcattagtatgatttttagtatggttgtttataaataaacaattactatattaatctattacaggagatattaaaataatgtttcaaaacaaaaaaacttcaataataatcctaacctataataatattaattataatcaaatatgccttgaaagtataagaaaatacactactttaggcacctatgaaataatcattgtagataacaattctagtgatggaactagagaatggcttaaagaacaaactgatattaaactcattttaaatgatgataatttgggttttccaaaaggctgcaatcttggaataaatgcagctgaaaaagataacgatattttagttctaaacaatgatacaaaagttacaccaagatggcttgataaccttaaagcctgtctatacagcaatgaaaaaattggtgctgtagcagcaattactaataattgttctaactatcaagcaataaatgttccatatacagatatagaagatatgatcgattttgcagacaaaaacaatatttctaattcagagatgtgggaagaaaaatccagattggtagccttctgcatgttaattaaaagagaagttattaataaagtcggaacctttgatgagcggtttactcctggaaattttgaagatgatgatttatgcatgagaattgtggatgctggatataaactcatggtttgtaatgatagtttcatacaccattttggaagcacatcttttaagagtgattatgctaaatttaataatattctaaaaacaaatgctcataagtttgaagaaaaatggggcttcaattctaattcagaaagtttattaaagtttgatattataaaccgtataaatgaaccaatagaaaaaaaattaaatattcttgaatttaattgtggtctggggtctaccctacttaaattaaaatatatatatcctaatgcaatgctgtatggtatagagccaaatagaaatgtagccaaaatatgtgaaaaaataatagaaacaatgactggggattttgaagaaaactatactatgaacttcaaagaaagcaaaactaacttttttgattatataattattgggaataaacttcaatttagtaaggatccatggaaattactaactgagttaaaaaaatatttaaagcctgatggatatataattgccacaataccaaatttaatgcattattctgttataaaaggtttattaaagggaacttttatctataatcacgattccatattaaatccaaagtgcacaaaatttttcacattaccagatatacaaaaaatattcgaggaatgtggatatataaatccatatatatttcattactctagagaaatatcacaagaagatgataattttttagatcaaatatgtgatattgttggaagtaatatgaaaggcttttttatatcctaccagtatgtagctaagtttcaaaacaatacttttatagatactcaaatctgaattcagacttatgtggtatcttaccggtacgccaagcaagggcgtaaaagataatgagggctaaccttcctcattattactatatagcaggtgggaatcctgcatgacaaaggccatcaaccagtcattagttagtcttgggcttattatggcgatgtaataagttaagtgtagacaaacaaggtaccaggccgcaagcgaatgctgaaactactagccacgaaattatcacaaagtcagaaag

SEQ ID NO: 66 - DNA, 34535 bp, Clostridium beijerinckii
gttattaatatggcattttttgtaatgaaccttgataaaaaattgagggtcattctacgccattttacaaattactatattttggaatactacatataaatatagggggttttaaagcaccccctatttaaaaaatagtagccttccaattgaacctggggctactatttttttgagattttttctataagaaccactatcaatgttaacagcgatattaagaataatccaccttgaaatagtaatgttaaaatgtcattactgataagtatcacctcccttcaaaaaagaggtaagtgataccagtagcccacaaaactattgaattatacatggaaattatatcataatatttaaaaggtttccatatagatggcggtaagatatataaaaatctattattgtacatgttaatttctgaaatcattgtaaataaaaagctgaacaacatcatacaagaactatttgaatttctatgatattcttagaaaacagacataaggaaaaggaggaaaatagatgttaaacgaagttaggactgtttgttttgatacagagctaagcatagaagcttataactttaaaggtatcatgcagaagtttcccaatcactttcacgactactatgttattgggtttattgagaatgggaaaagatatttgtcgtgcaaaaataagcagtacattatagaaacaggggatttaatagtgttcaatcctggtgatattcatacatgcgaacaaattgatgacaggacactcgattataggtgcattaatgttaaaaaagatgttatgaaaaaaatcacatttgaaataacaggaaaagaatatctgcctaattttatggaatttgttttattccgtaatgaacttacatcttctttgaaggagttacatcttatgataatggatgaggagaagaatttaaaaaaagatgaattgtttctattcataatggagcaattgataagggaatattcaaatccagtttctgaaatgactatacaggaagctagtgcagaaattaagacagtgtgcgattatctagaaaataattatatggaaaatatcacattgaatcaattaagcaatttaactggattaagtaaatattatttgttacactcttttactaaacaaaagggaatatcaccatataattatcttcaaacaattcgtattggcaaggcgaaaaaaatgttggaacaaggagttgccccaatagacgtagcgttcaaaacaggattcacagaccaaagtcattttacaaacttttttaaaaagttaattggattaacgccaaagcaatatatgaatatttttattaatagatgtaggagtaaagaaaatgagtaataaaaaagttaaggtaggacatttatcagcagttatgacaatattaatttgggggacaaccttcatttcaactaaagtattattaaaagattttacaccaattgaaattttaatctttagatttgtaattggatatcttacattgctttgcatatgcccatatcatattaaaaaggttgaatttaaacaagaactttattttgcagcagctggattagcaggagtaaccttgtatttcctttgtgaaaatatcgcattgagctatacccttgcaactaatgtaggtgtaattatttcaattgctccattttttacagctgtttttgccaatctgtttttagataatgaaaagttaacatcatacttttttattggacttacaatagcaataatagggatacttcttatagagtttaacggaaaatttgttttaaaattaaatccatttggtgatatattagcaatacttgctgctattttatgggcggtttattctgttgtcatgaagaaaattagtcaatttcaatataataccattatctgtactcgcaaagtatttttctatggattaatttttatgatacctgccatatttatttgtgattttaagcttcaattatatagatttactaatgtatcaaatctaatgaacatcttatatctaggttttggagcatctgcattatgctttgtaacttggaattggtcagttaagattttgggagtagtgaaaacaagcatatatatttatatggtacctgtaataacggctgcttcatctgctgttattttacatgagaacataacctttatttcaattataggaattattttaacattattagggctctttatttctgatggaaaacagattataagatttaggagaaaagtagaaactgagacaacagcataatccttatttcggagagctatatgcataagtttggaacttagttgtgacatctatgcagataaacatatttataaagttgctaagactttaagttcgtatcttcactagaaatcataaatatatttgtggagaaaacatttgaaaatgagctattaaaggttcttagctgtaggttgttccattttagcttgtgaagtgagagtacaaaattttattttgggttctcgaacttcctcagcgaatgtaatgagtcgagctcccctaggaaagttggagcatgctaaaatggatacaacctgctgcttataagcttcagcgatattttcatagcttttcggaacaaaatatttatgatttcggtaagttaccacataaatttagttttagagttggatatctacatgaaattatatttacatgcttgtataatagtggtacaatttaattcctcaatatatagtaatatattggaattttaaagaaaggtttggtaatgaaatatgatagatgcaaaagtattgatagaaaaagcatttgaggcacaaaagttttgttatactccatactctaattttaatgtaggtgcggctttactttgtgatgatggaacaatatatcagggctgcaatatagaaaatgcagcatttacaccaacaaactgtgcagaaagaacagctttctttaaagcaatttctgaagggaaaaaagaatttactgcaatagcagtagtaggaaataaaaaaggggtgaaacctggcgaaggagatttttgtgcaccttgtgcagtatgtaggcaagttatggcagagttctgtgatctaaagacttttaaaataattattgctaaaagcacagaagaatatttagaacatacattagaagaacttctacctttagcattcactggtaaaaatttgaaatagattattaatagtatagataagttataaataatatagttcattctttatttttaatgaaatatgtattagaactgcaaaataattatttatatataaagctgtacccaacagagaatataagttttctgttgggtttattttattgcttaatatttgatttttaaccgattctttgattattatataagatatattttctccaatcgcagctaagcttaacaattcaaaattaaaaatagaatttaataatttagcattaaaatacgtttgaaatacagattacaagaaataagacaagttataaaatagtagagccaattagtggagctactattttataatttatgtaacatggaatatttaataaatggttcgatataactattatgcattaagctttaaagagtatattaaactcgtagtgtttgtaattatttttattattatgtaaaaagtggtataatacgaggatggtcatgcttattatgataaacgggggaatagtatgaatataccaataataagaataaaaaatttagtgaaaaaatatgatgatagattgatttttgatgatgtaagtttagatataatgaaaggcgaaagtattgctttaacagggcataatggtatgggaaaaagcacattaataaagattttgtgcggtcttacaagaataacttctggagaggttattagagataaaaatcttaaatttaattatattccggaaaatttttcacagcttaacataaaagcaggtgaatatattaagttaataggagagatagaaggaatatcaaaagatgattttgtgaagaaaactaattacttatataaggagtttaacttagaaaatatgataaacacttctatgaaaaacttatctaaaggaactctgcagaagatttcggtagttcaggcacttttgtcaaaaccagatattttgttattagatgagccattatctggacaagacagtgattcacaaaaaacgtttattagaatggtaagagagcttataaaagacggcgttacagtaataatgtcatgtcacgaagtatttttaatagatcaattatctagtagaatattacaggttaaagattctaaaatattcgaaattaaaagggcagatattagctctgagaaatatgcttcaatgactttttacagaaaagaagcagataaatcctttgtaactccaaatattaatgggatctacgagtatcatgaaaatgaagattatatagaattcaaaacaaaaataagcgaaagcaatagggttttaacagaaatgattaatagtggttacactttaaagtattttgaaaggtaaagggaacgtaacttatgttaatatcagtattaaaatataattttaaaatgtacatgaagtctcacaaatatataatgcctttttttatttttataatatatatggtaatggcttattccataagattacttgatattgtaggcagcatggtatcttcagcagcctttctctttgccttaatgacatggattggttttacttattgcagcaatatagaattaattgcggaagaagttttaatattaaaattaaagagccatacacgctattgggtatctaaaattatttttatgggtgtagtaggagtatttttttctatattatctgttggacttcctattatttataatttaatttgtaatgtttttaaatatcctgttacattcagcgatatagttgtttcatttattatccacatgtttttatcaataataggagcattaattggtatgttattacaaccaagaataatatcaaatagaaaaatggcaatactaggtgcaatctttattgtattaatgagcataattaaaggaccagtaattaatgaggttccatattcaaaatatgtgatgtggatttttcctcctataaatgaagtttcaacagcatatttagatcttatgcattttaatatagctaatttaattatgccattaattattatgataatttatatttttatagagagttttatattaataaagagaatgaaaaaagtattattttaagatgaggtgaaaaatatgctaataaatacagagagattaattattcgtgattttcaacataaagataaagaaaatttaatgaaaatcatatggcaaaaagatgtaataaggtttatgaaagactggtctgaaaatagcactgttaaaggaaggctttcaggctatattgattggcttaagacacaaaaggattcaaaggatatttatgaaaataaaagatatgctgtgacattaaaggaaacagatgagttaattggcatggttggaatgggattagaagatacactaaatgaagttgaaatggcatattttatagatgaagatcatgctggaaatggatatgcaacagaagcactaagagcattgtatgaatggtgcataagcgtatcagacattccatatatgattcttactatcgattgtgaaaatatcgcgtcatgtaaagtggcagaaaaagcgcaatttaaattgtttgagaaaagaactccaattggtcacaaacaacctaatatggagagcgatagttacttctactatcgcaaatatcgttaaagttttgatgattcttattgtaattaattattttaactttgtatagaaagataattagaaggggtatgaaacaaatatgcaattctataatattattgaaaatttaaaattaatatatagagaagttgtattattattgaataaatatgattgctacataaggagctgtgtttatatgtaaaaatatcattaaaggagtaaaattaaaatggcaggaaaagtagaggaatacttagatagtctaggaattaaaaatgttaatagagagaaagattataaactgaatttaagaaaagaaactcaaaatttcataatttgttatactcaatttgataagaaatgcatagataaagtgtataatgtccttgaagataactataataggattactaataacttaaataagcagcttaacgaaaaattaactatagaaatacacccagaccataatgaacttcatatggcattaggatttccaaatgcgcctgactgggtgagaggcggacttggggtgggtaaaattgtaatagcatcacctttaaatccaccaccaggttctgatttttataacgtattaaatacagcggttcacgaatttgtacacatgatagtaaataagataaatgataatacacctagatggctaaatgaaggaatagcgtgttatgaagcaaaagacaataatgaaaactggataataaaaactgtcaaaaatggattagaaaataatattattcctacatttaaagaactagatacaggagcggattttgaaaccttttttgcacgtaatggatatcaatactcatataccatagtagaatcaataattaaactatttggatatgaaaagttacgcaatttaataaagcaacccaatagtattgtagagatttttggaatgacagaagaggagcttcaagataaatggattgattatataaaagtcaattacctgcaaagttagtataaataagaatttatttttaggagatacaatgaaaataagagaagaatatacgtgtcctttagaactagtacacgatatgattaaaggaaaatggaaatctattatattatggcgattgcgattagcccctacatcattggctaaattagaaagagatattgatggaattaatcaaaaaatgctattagagcaattaaaagaattaattgattatgggtttgtggaaaagaaatcatttgatggttatcctcttcgtgtggaatactctttaacaatagatatgggaatgaagattatagatgccctaaaaatcatgcaatctattggaattgattacttaaaggaacatggtatggaaaagacattgattgaaaaaaaggttattccagagtaatacccacaaaaaagttagtaatttacgttataaaagctctttgctataatttgcctataaataatagctttgggggtaatatatgatagcaacaagtgcaggtattataaatgggattattcaagatcaatatggtagtcgtggagaacattttaatgagaatggagtcccaactttttctcttccattaaaaattgcaaatgctccagtaaatactgcttcatttgcaatagtattagaagataaagatgcctatccagtaacaggaggttttgcttggatacattggcttgcagccaatattacaaggagtgaattgaaagataatgagagccagacagcaggggattttatacaaggcacaaatagctggactagcttgcagggtaatcagcaatcaaaagaactttcttgttattatggtggtatgacaccaccagataaagcacatgtttatgagtttcatgtttttgctttagataaactgctaaatctaaaaaaaggatttttattaaatgaattatatcatgaaatggatggacatattttggagcgatatactctaaagggaatttataagaattagtaagtatagaaatataagtgatattgctttgctgaagtgaatatgcaatttagacaaaatattggaggataaattagaaatgacaatattagagagtgatagattgattttaagaccttggaaaaattctgatttagatgatttacatgaatttatgtcaaatgaaaaagttgcaaatttagcaggctttagtgtgaagaacaacaaagaagagagcctaaagattttgaagcaatttatcatagattcttccgattcattatgggcagttgaattaaaaaatattaataaagtaattggatggattgaattacataaatattcagaaggaatatatataaattcaaaagaaataggatgtgttttatcacaaaaatattgggggcaaggtttaatgccagaagcgcttagacaagttcttagttatggatttaatgaagaagagcttgattctattgtgtgttctcattttgtaaacaataatcagtctaagagagcaattgaaaagtctggatttaagtatgctaaagcgaatgataataaagtttattactgcttgaacaaaagcgatttttaattatactttatattttcagagtcattaagtattaaaaatatataatatattgccacaatatgataaaatattagagaattttgttacttgaggtgatttgatggtaaaatggaaggcggattatgaagttggggtaaaactcattgatgagcagcatgaaaaattatttgagattgcggatcgtgcttataaattattaacaaatgattttatacttgataagtatgatagaattactgaaatacttggggaattaaaagagtatactatatttcattttaaatctgaagaggaatatatgttgagtgtaggatataaaaaattcttatcacataaagtaatacatgaagattttataaaatctattgataatattgatttacacgaaatagatttaaatcaagatgagtcagtaaagaagatattagaatttgttgtagattggatagataagcatattttaaatgaagataagtttatagtagagaattaataagaatattttagctgttaagctagtgttcagaaaactatattataataaatcttgtaaaaaagttttcattagtataccttagttaattttgcagccactagttggctgtattttttattcttcagaaatttatgataaagtaaaatatatagaaaatttatagaaaagcatattcaagtaggttctatgtagaaaaagaataaaaaagaaaatatattcgcctgccaaatttttctcacatgcgttcgaaaaggcagatgcgtaaaaaatctacacctatgaaaagagtgcgaagcacaatacggaacttaactaaaatcgcatgcgattttttgtcgtaatttttgttacgaaaaagtaaaagtaattatataaatttacgaatatagccatatagataatttgaaataaaatttatggggtggtttatatggaaataaaattaaatgagattgaaatgttaacaatattacaagcattagaagttctacatgatcaagctacagaatataaagaccttatatatgaggataataaagattttctagtggatataaataaaactagaatggtacataataagttattagttcaagctaaaaatgaagggataattaagaaaaaagtcagcttgatttaaaagaagagatgaaggcaggttaaacagaggtgtttaatctgcctttcattatattaattaaaataaaagtactttaggataaataatttctatttatagtgagatatatctccgtataatagtatttttggcacttcattttctatatgtatttttgaaaggctagctgattctatatctggattgccacaaatatcacaaatattttgactcatgaaatgtgacataataacttttaaggtaattctatgtgtaacaataataatacttttgccttgatttaaattaataatttcttcaattgaggggatgaccctagctttcaattcttcataagattctccttcatcagttggaacatatacagaagggttattccaaaaattttcccaagtttcaggatacttattaataatatctgtttgattcatgccctcccattttcccatatggatttctttcaattctttcattgtgtttataggaatgtttcgattatgctggatgattttagccgtatcataagcgcgtttactttcactagagtatattaaatcaactttttcattaataagtctatcactcagtttttgagcctgagatatgccaacctttgttaaaggggaatctttatggccttgcattcgtttttctagattccactttgtttgtccatgtctaattaaatataaaacagtttgtctcatagttcgctcctaaatattttattataaaaaatgccggcaataatttataaggagagtatatcaaaacaaaatctatatgtataatatatgttattattatattcataaataaaatatatgaatggagagaatatgaatttacatggattaagattgttttatatagtagctaaagcaggaagtgtaacagttgcatcagagcaattaaaaattagtcaaccagcaattacatcacaaattaaaaagtttgaaagagaaaatggtattacactattcttaccacagggtagaggcatttgtttaagtgaaataggtgaacagttggtaaaagaagcagaggcagtttttaaaatagaaaatagaatagaagcattaatagataatcataaaaaaggtaaaaatggtacattaaaaatagcaggaaattatctttcaacaaattttctaataccaatgtgggcggctaaattaaaaaaagagaataaagatataaatgttgagattaatacattaaatactgaagaagccattgatcatcttatctcatataaagtagatgttgcagttttaggtagtggagcaatgaaatatacagacagaattgataccattaaaataatggatgatgatttatggtttgtagcttcaccaaatcacaaatatgcaaacaaaaaggttagtataaatgatattatgttagaaccatttataatgcgggaaaaaggaagttatgctagagtacttttggaatcactttgtcatattaatagtattaaagttcctgatatagctcttgaatttaatgggctacatgaaactcttatggcatctacgtatggatatggtgtgagtttttgttcatcaattgctgctaaagaattcattgacatggggaaattggctagaatttatgtagataatgttgatctaaaaaatgaaattgttatttgtacacgtaagaatgaaaagatatctaatttaactgagaagtttatttctgttataaataattaaatacttagttttcattttatttttgataatcagagaaaagcagtagataaaaaactactgctatataatatatattatatattatatttaaactaactgcagaaagtagtagaaggtaccatgatcagattgcaaattaaatatgagaaatattctctatattatataatatataaaattacgagaaaatagttacttaagatagcaataaaaataaaaagatttaatgtaatattacataagataattattatattgccaagaatatttgaataagcgatgataatgtcattataataatcattttgtgatgactaaataacaacacatttattagttatgttataataaatgtagaagagtagttggttgaataatgatgtgtattaatatgaaaggaatgataagaatgacaaaagtagcgatgtgtcagagttgtgggttaccgtttaatgaagaacatgcacattttatagcaagggagcaagatggaagtgagagtatttattgtacaaattgctataaagacggaaaatttattgatcccaatatgtctatgaaagaaatggtggagctaattgtaccggttttgggaaaagtaataggggaagaagaagcaagaaaagaaatgacaacattattaccaactcttaaacgttggagataataatgatttaggctaaatttaataaacaatatgtgtatagttataaatgctataaagcaaatggtaatttgaaaaattgtattattcaagaagtttaatttattattttttatgtgtaatacaaaaaaaacttatttgcaatataacaacataaagttagttttacataaaaataaagattgattagagaaggatatctgatttatctttattttttggcgcaaaaatagagatagcgaaaaatcaggtgaatgataataaataaaagctatctcttttttattttaatatgcagttatgttttaattattgacacagtttatggaaaatatacaacaaaataaataaacaatatatgctataattgatttaatatggaatatgattatgcagcaaattcatgagtaaatcatagtatttcaaaaagggttataattggagaaggattttgtaatgtataattgtgctttgtgttctattcatacttgtaataaaagagaacttgataagacccctaaaaattgttcgagtcttgatgaaaaaatagaagaaattaatgaagtctacaaagaaaaagataatctttatataactgtaatttaatataattgcttagatagaggtggataatgaaaacagtagtaatctataaatctaaaacaggctttaccaaaaaatatgcgagtggattgcagaagagctatcagcagatatttttaatgcatcaaatgttgatattaatattttgaataagtatgatactataatttatggtggaagtttgtatgcggtaggcattattgggataggtttaatcaaaaagaacattaacaaaattaaagataagaggttagtagtgtttgcaacaggagcatcacctttaagagataatgttataaacgaagtaataaataaaaactttacagtagatgagcaaaaatatatcaaatttttttatctaagaggtggatttaattataataagctaagttcttttgataaatttcttatgacattattgaaatggaaaataaaaaataagaaaaaggaagatttatcagcagatgaaaaaggaatgcttgctatttatgataaaccagtagattttacagataagaagaatatagggaaaataatagcttatgttaattcgtgagagtaaataaatataagtaactgtagatttatgattcaagtaaaagtattaaatttaggagattagtatggatgtaataagagcaatagaagagcgtagaagtatacgaaagtttaaagataaggtagtaccaaaagaaataatagaaaagatcttagaattagcaactaaagcaccgtcaggaaagaatcgtcaaccatggaagtttattgttgcccaggataacacaaaagatgagatggtgagaattatggagaattcactacaccagaataaaaaagagaataaatctactggtagcctggagtcaagtatgaattcaattaatgaagcatcggcagtaatcttagtatttaatactttttctaatattgaagaagattataatcatcatagattacttactgatactcaatcaattggggctgcaatacaaacagttcttttagcagcacaggattttaaactaggaactctttggatttgcgacatattttattgtgacagagaaatatgctcatggttaaattgcaaagatgaacttgtagcagcagtagcaattggatatccagatcaatcaccatatccaaggccacgaaagccattagaagaggttgtaagatggatataaattttgtgggtctaagtaataagtgattctacggtaagacttatgatgcttggtgttttggtggagatgcttcgattgcaaataaactcgcaaaactagttgtaaatggtattaaaacagcaactgcatcagcgtatcagctatatgaaattgaaaacagtcctctgccagcagtgggtggtttaaatattatattagacactgataataatgctgtttgcataactaaaacgaccaaagtttatacttgttcatttaatgaagtgtcagaaaatcatgcacttaaggatggagaaggagatttgtccttggcatattggagaaaggcacataaagattttttctcaaaagaattaaaagagtatgatcttgattttgatgaaaatatggttgttgtttgtgaagaatttgaattagtatgtaaatagatagttggtataaagtcgataaaaatggcttttattttgaataatagaccaatgaaagtatctaaaataattgataagtcattatataaatatagataaaatctatcgttgacttacaacaaatttttatatataatttacttaaaaaataaatgagagcttatactttcatcaccggatgattgtattataaggcatacaaaagctagccgtaggtacggtgtgttttcacactataaggttagcttttggatgccttttgttttgaaggaggtcgcaaaatgataattaaagagtataactacttgccagaagaggctaaaaaaataagagtagaggtgtttgtaaaggagcagggttttgttgaagagtttgatgaaattgatgaaattgctaagcacatggttatgtatgaaggagaacaaccaatctcaacttgtagaatctattttaatagtaagaaacagtcatttatcatagggagagttgctgttttaaaggaatggcgagggaaaaatattggagctaaaatgcttaatgctgcagaagactgtattactcgagaaggtggaaaaagcgtaatgttgtcaggacaggcacgagttgcagaattttatgaaaaacaagggtatgaaaagcagggagaagcttatttagaggaagattgtctacatatattgatgaaaaagaatttagattaatataggtaaatgaaataattacagtaaaagatgaaataaacaaaaagtaagacgattatatgattcatactagaaggttattggggaatgtaatcctgcaataatatactatatgctatttagggttagatgtataattcatgagaatactttgaaaggggcttgattcatgaatattacatcttttcttatttactgtattattgttacagttacgtctggacctacgaatattgtaatattgtctacggtaaataattgggggacaaagaaagcaatggagtatacatatggagcaactattgcgtttagtttattacttattatttcagctgttttaaatactgcacttatggcggttttgccaaaaattctatgcatcatgcagataatcggaagtctttatattctctatcttgcttatcaaatatgcaagatggatacatcaaaatcaactgcaaaagaaacggcaacttttttatcggggtttcttatgcagtttgtgaatccaaaggtcgtattatttacaatgacagtaattccgagttttgttatgccatactatactaaactatctgctttaatgatatttgttgcatatataacaattattggatttggtgcatttattacatgggtactttttggcacaatttttaagacatttttgcagaaacatcaaaaaattgttaatataattatggcattatttttagtttattctgcaataatagtatctggtgtaggcgagctgattaaggggtgatttatatggataaatttatatataaaaaatcagcaggtattaccgcactatcagcaagttttgctgactttaaatataagaagcactgtcataaagaatatgcaataggtgtaactttgagaggcattcagcagtataacttagatggtagcttgcagttatcttatcaaaatggtgttatgctttttaatcctgagcagccacatgacggaatggcacatgatgagacaggtcttgattatattatgttatatattgagccaaaattatttttagagagtattgaaaaaaaggatatagtctgtttttcttctcctattatttataattacagacttgagcagcaaatattaaatctttctaatgcaatattaagtggaaaagatgatgcattgtgtagtgaattttttttatcttttgcagatagttttgcacaaacggatctttgtataagttacaagaaagaaaatgatttaattaaaaaagcaaagaatatgatttattataacttagagaatgtattaaggcttgatgatatttgtagagagtttaatatgtcaaaatttcagtttattagattatttaaagctaatactggaatttcgccataccaatattttcttaaatgcaaagtagaaatggcaaaaaagttaatagagaaaaatagagatgtttattcagcagtagcagagtgtggttttgttgatttaacacatttaaataagcattttaaaagcatatatggaataacagcatttgaatatttatcatacttaaattaaagtgatttttctatgacttttgttaaatataaaaatgccccaataaaggggcatatatgtatgtgataattaatatttatgggggatttatatcatgctctaatatatcttaaataatacataatataaatatcacatatttagaattaaatagatcaaaaatggagttttgatttgattatgaagacattctagtttgtggatatttcataaaattattcatgtaaaaaataataaaagcccctaaaataaggggccaaaaagtgaatggattaaaacaaaaaagtaactatgaattaagggtaaccaagagaacaaaaaaataacactcaagaggtttcctttaattatatgaaggggaagtttaaataattctaaatattaataaataattctttgcataaaaaagaccccaataatggagtcaaaatggatttcgtaaataataacataatgagaagcaatcatagtatatgcgagttaaaaataattattcatatgggggggaacattaggcgagatatttaatagaatctactttttacatattggtttttcccaccatccaaatgcgactactaccttatcaattattaaatttgatgattttataattagagtatagtttccacctggagcttctataaactttccatcttcctcacctactaatgttgtattagggggtactattctttcatatacattaactccatctttaggaacaattctagtagactcaataaatctaatatctaccttgttttttggtattggctttaacgcagtgttggttggagaggtcttacgggatacacaagctttttcaggaaaactagtatttaaccatatttgggcagttaaatagtcattagataaatttgaaatagtaaatacatttgcatataaattgacatctgaattacgtggatttactaaaccagcccaggcatttgaaccattaccaacccataaagtttctgtctgccctacaaagtatcttcctctcattgatttatataaagaaataggaatgctaactacttcttgtaatttaccacttttattatctagtatataattactattattttctaacataaattacatctcctacggattaatttttataaatagtaccatagagtttctttatatataatattccgtaaatgcataaaatgcttatgttattaataaaagtaagccatagcgctgtaggtatagtatatattttataattactttacttgtggcaatatttagttctatattcagacggagaacaattcctgtactttttaaatacttttccaaagtaacttatgccattaaaacctacatcgagagaaatattagaaatggaatccttattttttagaagtagctctgctgcttttgaaactctatattccattaagtattcaaaaggagttactttcaaaattcttttaaaacttcgacagcactcacttttgctgatatttgcagctcttgcgatactatctagatcaatattatctgcataattcttttgaatatattgcattgccattttcacacgttcatcatcatttgatgctgaaggtacagttcttttaatatcttcctttatttctttaattaagtttaaccaaacaatacttaaataatttttcatttctaattcatatccatatgattttttatgagataatataaaaacttgttccagatgcgctaagattcttttttgccaaggaacgtcaggttttaaagagagaaatttcaaattattactctcaataattggagataagtactttttttcaataagtgattcttcacttcctccaattaaagttgaatcaaaatcaatggaaaacatcatgcaatcgatattttcatatggtttaatttgatgaagtacatttgaatttatcataattccttcacctggagataatattatttcttcatcttcaataaaaactactactttatcatatagtgaatatgaaaattgtacttccttatgccaatgccatcttatatatccatcttcaaacagattaaatttgtcagtataaattgctagtggaaaatcatgagaaccatgttttactgtttcttgcaaattatcatttacttctattcttgttgcttgcatatttatcatctcgctaatatagttttaatttctgacaatatattaattgtttaatgccataaataataataaaattattacatatttgttatattaaatcaatataattgcaattagctaaaatatatattgcaaatgattatatgtgttccaattcataatgcacatttaacaatacacaattacggctgaaattcttgcaatatttttagaattatggtgaagaattatttttgcagtatatataagttaattaagaataaatacaaaaaggaggaagtatagtgaactttcagccaaggataaaaggaataatcctggtaatcataggagccatgttatgggggatatcaggtactgctgctcaatacttatttcagaaaaagggatttagtccagagtggcttgttgtaatacgtttattatcatcgggaataattttattattatatacttttatgaaaggtgagcaaaatatatggaaagtatggaaaagtaagaatgatgctttgagtcttatattttttagtatattaggcatgctaggtgtacaatatacatattttgcagccattaaatatgggaatgcagcaacagcaacaatacttcaatattcatcaccagtaataattacttgttatttagccattcgtaataaaaaaattccaaagcttaaagaaattattgctattggactagcaatgctagggacattttttataattacaaaggggaatattcatagtatatctatttcaaggttggcattgttttggggaattgcatcagcatttgcagcagccttttatactttacaacctcgcttacttcttagaaaatggggatccatattagtagttgggtgggggatgttaataggaggaatagccttcagctttattgagcagccatggaattgcactggaatttggtctactaattcaatattagctattatatttgtagtattatttggaacgttaattgcttttacttgctttttagaaagtttaaattatataaagccgacagagtcaagtatattatcatcagctgaacctttatcggctgctatattatctgtattatggttacatgaagagcttggaatagcacaatggattggaacggcatgtattataactacaattataattttgtctcgtataaagcaataagaagttgttttaatatacaatgaaaattagttcaatatatcagtatattaatacaaaatgcttaagtagattaatagatagctggatgacaatgagtcagcaggtattgataaaatcataagtatactcattaagagaattctaaattacctacagtaactattataattatatccccataatttagaggctttagagtatatttacgagaattaggttcaaaacgaattaattcctgtattaattgagtactatcaattataagaagtatagctctaccagaagaattattctcaacattataatcaacgcctgctgataggcctgagtcttttaaggtatacagcccttgagttaaagttttactagcagcaaaagcatttactgtatttgtgctaagtaataagaataaaaaaatagaaaatgtaacaataaattttttcattatactcaccacctttcataatttatagtatttgaaagcggtgaaattatattcaaaatatattgtggcaagttaagaaaaatagactattacaaaattctaagaactggtttagaaaattatagcttgtcatacaattgacatattcatctagtattataaatttataagatagttaatcattatttaccccttattaaataaatgataaccagtatttagaatgatctattacaccctagtagattattcttttttttcgccttcatttactatgtaattatagtagtgagctatagccatgtccactatagtacttacataggtatttaagtcaggatgcctgctctttaattcattaacttttctaacagtagaagatctaagcatataagttcgtttaatatctaggaattcaccatcaataggtggagccatgccatttgctaatgaaacttttctattatctgcaagaatattagaattagatgctttaacattttgggtagatgctgcttcatcatcaaatgagatggttagagcaggattattagattcaatagacgatctattattactgttataactacaattattattattactgctgttattggacatagcagtatttatttcatcttcatcatcatcaaatgaaaaagatgaaatgcacttgccagaaatgactggttcaggtgtaaaaccaattatttcttcattctcatctggtgcaaaatcattttttggtagttcattttgttttcttttactcataagtgttctcctcgtataataaatttttgtacattctttctataaatgataacagaaaagaaatgtatgattctaaatataaaagatcaaatgaaagaattctgttaatcaaatgaaaaaattgagctctaactttttgcaggataacttttttgaaaagctcttttgaattctcatatatctcacttaagatatatgcagaaaaagagaatattctaatattcttcacaatatttattctggagaataaatattctctagaatattaccatagaagaatatatattcttcagaatatgcttgaaaaatgcggcttaaggagagattagtatttaaattaacatttttattttatggtttgatttttgatttaataagacatggaataaaaaagaagaggctaataaataattgagagtgaattctaatttaatattaaaacttggttaaataaaataattaagttttaatattagattatttattaagcagtttgattactaaaatttcaaatataaacttattattgaaaagcattatactcaacgagatagaaatttaaatatatttataaatttatattaatttagcgaagaaaaaagtcaaggcgtgtgatactgctaagtgataggtttacaaatacggtgaatttgcggaaaaaaatacaatattcagcactttatttgaaaaaaataaatttttatgttgacaacctataatcatgtaacatataataaacaagcagattagttgcgggtatcgtatatcggtaatactccagccttccaagctggaaaggtgggttcgattcccactacccgctccaaaaaaaattaaagagtttgcaacataataaataatatgcgtttttagctcagctggatagagcaacgcccttctaaggcgtgggccaggggttcgaatcccttaaaacgcaccatataatggtgaacgtagttcagttggtagagcgccagtttgtggcactggttgtcgtgggttcgagtcccatcgttcaccccatgtaaaaatattagtaggctgcaaggcaattgatttagcttaattatttgtaaaagcattctattataattattattctggttcactagctcagtcggtagagcacatgacttttaatcatggtgtcccgggttcgattcccgggtgagccaccaaattgtttaacctaaggtagaaaaggtatagttaaatatactttgatgctttaggtttttttattatttagtaaaaattatatcaagtcaaatttacagatgactttgtaggcagaggaaatatatagcccaagaattagtttttttgtattatttaagtttatgctatctcttgtaaaggttaagaaaaatgataacttagaattaaaatgcgaaaatttgaaattcatgacagcatatataataaaaataacagctctaaggtaaatgttaaccttagagctgttagattttaataatatactggaatattattaaatatttttctcaaaatagttttcttttttaaaatggctgtagagtagcacatatctttaaaataagcatattccttaacagtatgatttttgtagaatacaaaatttataagttcaatttcttcttcacttagatttttaagagctaaatttaaatcttcataatcacagatttcacataatgaaacttcgatagatatttcttgtgaaggaatatcttcttcaaagttatcatgataacttaaagcatcattactatcagtagaacttctgaaattcattttcctaattaaatcatttacattattctttattgcgttagtagcataagcaacaaacctatgcttctccaaattgtacatggaaacagatttaaaaagtgatttataacattcctgctgaatatcataaatgctatatccatcaacaaaagttttctttgaaatattatagattaaaggcttaaactcatcagttaatttttcttttgcggtttcatcattatttttacatcttctcaccagtttttcaatataatcaaaattcatatgaacctccttcctcacttaatggctgcaaaataaattgattaatttacatatgttgtgttcattgttaagttaatttctacatgtagatatacggccgagaatgtacattttacataaaaatagaaaataaattatattaatttattgtagattaggttgaagtaagatttttattagaaataacagtcttttatgtgtgatttattcatctaaatacaataatgcatttatggaaagttttgtaatacgattaattacgtggatgactaagaaatgttagtaagataagttttcttatcttttgcaagaataaatagtagtgagaattggttgattaatagataagaatgggaacaataagagatttaatgtgcttagaagtatttacatatatgatgtagaaaaaatgtgtttggatacaatatgaaatttagtataaaaagaactgtggtaaaaaataaatacaaaaattatttggaaataggatttttgaataaattaaatttgaaaagtgtaagaaaatagtggaaaatattcataagaaatctaggcaaaaggataaaaaatgcggcataataatagtaataggctatataaatatagcctattactatgtttttagaaaaatgtaaaaacagtattattaaaatggacattatgtctgtaatgggaagcttttgctaagtctttttgagcatttaaaagcaatctagttttttacagaaaaagtaaggtgtaagcaaattgtatacactaatataaaatatattgatttagcaaaggacaatgattttatatggagtggtttgagcaggtatgctcttagttgcaggccaatagacaacaattaggtttctattccctggatatctgttaaaggcctgatcgtttgttagaattatctcagtagattcggctatgttgagctttaaatttccatcgctacttataagtagatagtcaaaataatctacagtaacattttgattttctgtgttttttgccataacaattgcaggatattgcggaggataaataagaagagcaggtgcgtttgcgtcaaagaatccagtgacctcgtctccagccactaccatttcatgatccacaaaataagttcctggagatatcacaaaatttactggtcctctttcgatgctttcgagtgacattaatttatagcaacctgctgattcatcatcttgggttggataaaaatcttcaatcattgtaatggtaccactaatggccgtaaaactttgtattgtatttctccaatttgcattgaaagagaggtgagctacttgattcatgtagtaaggacaacaaggaaattgtttattatacatgtattgtattctcctttattttgatgtagttataagtctcattataatagtatattagctacgttgagaagtgttacttagtgtcaagtagatatatatacgaagagtaaacttagtctgttaattttaaaagatatttatcaaaagctttttaatctaagtattacttttgcaaagatactaaaatagtcatttaattgatcacaataacattggtaaaaaaacgagctggcttcttttttattactactgaaacccacatatgaataggaaatgtttttggtattttaaaatatatattatgtatggagtatatcatcaaataagctttgaaagtagtaaaactatgtagaggtatataaactaatagattatagaaaatgaggtgttaatcgatgataagtaatgaagacatgagaattagtaaatttataagccttatactcaggcataaaccggaagaaattggattaactttagatgaatatggatatattagtacttctgatttaatcaaaggattaaataaaaaaggatataaggtgacaatttcagatattgaaagaattgtagctgaagatggtaaacaaagatattcatttaataatgataaaactaaaattaaagcgaatcaaggccattcaataaaagttaatcttgaattgcaagctattaagccgcctaaagtattatatcatggaactgcaactaggtttatggatagcatatgcagagaaggtatcaaaaaacagaatagacaatacgttcacttatcagctgatatagaaacagccacaaaagtaggtaaaagacatggagaattagttatatttaaaattaacagtgagcagatgaataaagatggatataaattcttcctatctgaaaacaaagtgtggttaactgattatgttccagtaaaatattttgatatttttagaactaattagagcccagaatataaaggtgaatcggtatattttgaaaattataatatctagaaggggagttttttggagattaataaaattttttaggccaattttaatattagaaagtttaatttatatctaacttaattgaatataataacttaatataatttgcaatttaaggtattctgaagtttttttgaatccatataattctataaataaccaagagtagtcgccaaaaataaaaaataataactaaagccaaagaaaatttaaatttaattgatttttatgtttacaaaatggaagaaaaacttctttaagtatatgtaaagcaaatgagttagctaacctcaaaggcttaattaaaattatttttatattttaggaggaaaaaattatgggttatttaggaattaacatgtcaggatcaagtataccagtatattctacaaatattgaggataacacaagaataggaagtttgggatacaaagaacgatttgcagttacaagcagtggaccaattgcaatagttataaagtttgtaaattcttcagggagctgggttgatggtagattagatccagatgctgatattagtgattggtgtgaatatttatttagatcaagcgcaataccagctggatatttccgcactgatagtacagtaagaatgtatgattcatcaggaagttttcaatcatcatatccggcaggcacagtagtagtaccatatactgaaagtagatcacaaaatggtacaagtcacccagattatcttagaatcagagcattatatgatagaaatggaaatcaaatttctgatgatacttatggtatgttcatagattgcaggataagatataattctggcaatactcctgtttatggaaattggaattaacaagatattgtattaatttaaaatagaggactgtagtaggcttgctattatgcaaatcttactacagtccttctttattgttctgtaatttctttcatataatctattccaacgatagtattattcttggaatttggggtgaaaccagaattatgagattcgtcataatcatatgcaagacctaatacaaaattaccttgattagaggagtaaactatatgagtttttccagtggaattatcatatttacttcttatttcttttatatcattaggtaacacgcttttagcaagttttattgcatcttcgtaggttatttttgttggatttacttcacttgcataggtatagtcagttaatatatctttgtattttttattatctacattaggtattccagattcactgccaacaaagctattttcagtttcatagtaagtaagagaagaattagttttatcataattcagtttagatttatccacttctttatatctcttatctatttcagtattatctctttcttcgttttcttcaaaaattgcctgatctcttggagagtttccgcgagtttcagaattatcatttttatctgtatctttacttgattcttcagttttatgttcagctgtagtttggtttttatcagcattttcatttttacctattgagttgcagctgatagctgtaaaagatactgcaattaatgctgcaagtgttatgtaattaaattttttcaatatatgtcctccttatatagcttaaaaaaatagtaataagagattcaaatattaatggtcaagcatttaacatgatattaaagttttatcatgttaagctttaaagtaaaaatttgtataacaaaatgttaacatataataataattgaaacaaggatagagggggatttactgaaatataagttaagatttcaaaattggctgttctatatagagtaactgttgaaatttgatcaaatgccaaattttttggaagatgaaatccaaaatttccgctaaagccagtggacatataatacggaaagctgctgaaataacaaccagatatttgaactattctacataaatttctaggagtataaagacctatataaatgtgatttaaccatccttcttttactaaactcaataactaataaatactatttgattctataacttggaatatttgacaaagggcaaaagtaagataaaattatatatgagttccaaaaatttgttgatcaaagttaaacctttaaagcggaagtataaagtggaataattttaatgattagaaagtttattaaatggaacttatatattataagaacttagggggaataataatggtaaaattaaaaaaattaatagcaggatcactaatagcggtttcagtattagcgataactccgataagtgcaagtgcagaatggaagaatgatagcactggatggtggtacacagaaggtggttcgtattctacaggatggaaaaagatagaaggaaaatggtattatttttatgctagtggttatatggctaaaaacacagttattgatggatatattttaagcaataatggagattggacaggcctagaaactaaatctgataagatttcagtttcatatccttcaaattggactaaaacgactttaaaaggagatgatatttactatctagacaatcaaggaactaatgtgaatttggttatagatggcatggagggatattcagaagaggtttattttaattcagcagaaacttatataaaaaatcgctcagatataaataatttacaaattaaagagcgtaaatttaataataataatgcgttaactctaaactattttcataatattaatggaatggatgtgcaagtagaacaagtaatgatttgtaatagtaacaaagcatatttatttacacttatgcaacgtggaaaaatatcagatgaaaatatgacatcttttgaaagtatgttaaatacaataaaatttgcatattaattctttaaattaggggataatctttagtaaggagagatatgcttttaattatcttaccttgctaaagataatacatgtaatagaaaatagaagattagtttaaaataagtgaggaaataattctaaaggtttaaaaatatgccatagtgataaatttatatttatgatttaaataggtcatatttttaattaatactgagatatgtgaaataagttccgacatagtaatattgtatttagataaaattacataaaataataaacaacatattttaaagattaaattatatgagaaggcgtatatattcttatagaaaaggagaaaaaatgagtaccacaaatgagcagaaagtatatgaaatattagatttattaggtattaagtatactaaatatgagcataatccaatatatacagttgaagaagccaaaaatttagatatcgatattccaggaggtcattgtaaaaatctttttattaggaacagaaaaggagacacccattacttagttgttttagatgaaaataagagagttgatttaaaggctttagataagcaaattggtagtactcggttatcatttgcatcagaagaacgtttatataaatatttaaagctaacaccaggatcagttactccttttggattaataaacgattctaatagagaagttatagtattaatagataaagatttagctaatcaggatattgttaattttcatcctaatgtaaatacagcgacaataggaatttcttataaagattttgaaaaatttattttgtggcgtaaaaatggatttaaatatatagatatatagcttaaatggaggaaagttttatggagatattaggtagcctaggactaagtgtagtatttcttattttgggtgtaatattaaaattgtggccgccgaaggagataaatagtttttatggatatagaactcctttttctaagaaaaataatgatgtatggaaagaagcaaatacctatggtggaacaatgatgatattaggtgcagttatagctataattttctcgattataataacttctttatatgggaacgatccaggcagatcaaatataatatgtgttatgggatctttaataattgttttaatatcaatattttatacagaggttcatttaagaaaagtatttgataaagatggtaaacgtaaataagagtaataattctactttttacgtagttttgtagaaaaatatgtcatattatgctaaaatatccctatgcgaatattataactaatgataattgttattagcaatgggggtgtcataaatgaaagaagaaaagcttagtaaatacaagaaaagtccaatttttttagttatagaaaatggtttgattgttgatgttagtgcacagtttatagaattaacagagtataggtatgaggaattattaaatagtagcataattaatgtgtttgaaaaattaagggttggtccaaacattaatactagcgatattgatgagaagatcaactattttttgttcacgaaatctttaggagttaaatttgttaatataaaagtaatatgtgagaaagaaaaagagatatatatctttagtgaaaaaatgaattctaatattgaaattaaacattcatttttaaatgaattaattttagataattattatggagtaggagtatatagtcttccagatatgacgcttcttaaaactaatgagaagtatgtaagttttatggatgcgccttttaataaagtagaaaattgtataggaaaacatatatctgagttcacgacaggctttaagggaagtgcatatgaaaggctgtgggataatttacttagaacaaagcgtgcatgcaacatagatgaatatcagtatgatggttttagtaggggaattacttattggagaatatcattaatacctatttttgaagatggtgaaataaaatattgcgttgcaatgcttacagaaacaactgaacaggtggtacatagaaaaaaaattgaggaacaggcagaaataattaagcagcagaattatacgttaaaacgacaggcagacatgttgaacttatcaagagaagctatttttgcttggaaattaaatggaagtattacttattggaataaaggtgcagagcttatgtatggctataccagcgatgaggctgttggccgcataagtcatgatttattaaaaactgttcgttcggtagacataaaaactattaaggagagtatactggaagatggtgtatggagcggtgaaatagagcatactaaaaaagatggaaaaaaacttatcattgaaacaagtcatcaaatttttgttgatgaatatgggcagctagtagtacttgaaactaatcgtgatataactgaaaggaagaagttagaagaggaaattaaacatcaaaaagctgaattagatgatattatacaaagtatagacgatgcgctggttatttatgatagtaataaaaattgctatttaactaataaatctgctgaagaatattttaagggtactaatcttaggaggataagtaatcccaatcattttaagttttatgatttaaatggagatgaaattcctaaagaaaaaatgactatttcaaaagtatttaggggagaagtagttataaatgacataatgactctaaaaaatgctactacaacaaaacatattagtttaaatggaagacctatttatgatagcaatggaaatataaaatttgcagttctttgctgtcatgatattacacatgatattgaagcacagatgcttatagaacaacaaaataaaaaacttgaagcaattattagcagtgcatcagatggaatgtttttgtttaatccagataacagtgtaactttattaaataaagaatcagaaaaatttatatacgatattaatggatataaaagcattggtgatacgtgcaaagatactaaatattatgataaagatggaaatctgcttgaagtaaatgatctaccaggtattaagttaaagaatggtgagagtattaaaaacttcattattacagctaaaggaccagataaaactattcattatagtgtaagcgcttgcccaatatatgatgataggaaaaatttaattacaaaattgatttctgctcatgatattacggagcggtttaataatgaaagaaaaatattggagcaaaaagagcagttacaggccattcttgataatatgcaagattcagtttatgtttttaataaagatggcgaaattttcttgaaaaataagatggcacaaaaaagaatgagctattattgggattataatcatccaaaggatacaaacaaaaagtttttagatttagatggatctgagattatagcagaagatataccacattgtaagattatacgtggagaatacgttaaagaatactttatgaagataaaaataggggagtgtgaacaatatgtttccgtgagtggaactcctgtttttggtaaagaaggaaactttgcttatggaattattaatagcagagatataacagattttatggaaaatcagaaagttttagaaaaaattcaaatcaagcttttggaagctgaacgagaaaaaaatgagactcttgaaaaagcattagaaatgaaagatgagtttttgtcacttatatcccatgagtttagaacacctctcaatgttataaattctgctattcaagcaatagattatttttgcagtgaagaactatcggacaggctaaaaaagtacttagggatgataaaattaaattcatttaggcagctaagattagtaaataatatattagatattaccagagctaatgcaggaagaataaaagttaataaaagcaacatagatataatatttatgactaaggctattgttgattcggtatatacgtatgctagtcaaaagagcattgatataatattttcatcatccgttaaacaaaagatagttggaatagatgatgaaaagtatgaaagaatactgctcaatctcttatcaaatgccattaaatttactccagaaggaaaatcaattagtgtaaaaatactctcaagaagagatggcatctgtattgaagttaaagataaaggtataggaatacctcaagagaaagccgatataatttttgaaaggtttggtcaggttgatagttctttatcaagacaagcagaaggaactggaataggtctatctttagttaagaaatttgttgaagcaattggaggaactatatctcttaaaagtaaggtcggaagaggaagtactttctcaatatttcttcctagtgaaagcatagttcaagagaagggtgaaagcgaagtggtagagttttctggaaatcgtctaatacaaactatacatgtagagttttcggatatttattcatagaaaattaccgtagatttctattaaactatctcattgctaaatgcaatttataaaaatatattgctagtatttattacatattccatttgaatttttatagattctatgctataattttgaaagatttaatagaatatttttttatcggttggacaagtttgcacttgattccaagaaatttgtttccagggtgggaaactcttatttgagtttcccactttttttattactatatctagctaaagtgctaaattaaaaatgccaagagattaactttaaatcatttgtaattttgttaattatggtgaaaatctaataggaattaagcagtaatcaaattcattttatgaagaaagggcagtgttgaaattgttttatgtattaatattattattggtagtgacatttgtattaccaatagtatcaaagaaagttgaaaataatcttgaaatatttttatttatagtaggagtattagcatgtgtcacatcaggagctataaataaagaattatttttaggaattattcaaaataaatttatgtatacaatagctgttgcagtactaattggtggatttatatttaaagctctatcaactcatatagaaggagcacttacatatattcttaaatatgtaccattaaaattttttgtatttttgttaatagttattattgggtttttatcaagcataataactgccattattgcagctctgcttttagtagaaatagttagcatattgccgataagtagaaaaaataaaatcaatattgatgtggttgcatgtttttcaattggaatcggagctgtattaacacctataggagagccattgtctacaatgattgtttcaaaacttaatgtgagcttttggtatctattagataagtatggagtttatataatacccgctatatttattcttggaattattggtacattttacggtattcaagaaaaaatagaatcaaataatacagaagaaattattatagaagaaactaacaaggaaatattcataagagcacttaaaattattttatttattatagctttggaattacttggagaaggttttaaaacattaattgatacttatgtaataaatcttcatactggctatttatactggtttaatatgtcatcagccgtccttgataatgcaacactagcagctgctgaaataagtgtgaaaatgtctgaggtacaggttaaagcagtgttaatgggattacttattagtggaggaatgatgattcccgggaatattcctaatataatttcggccggtaaattaaaaattaacagtaaggaatggatgaagcttgggattccacttggaatgactatcatgatagtttattatattattctatttaaaatatagaattttttgaaaaatgtaaaaatatttgaaatctatcaataacgctgataataagaatctaaagctaaaaaatggtattaatttgccataatttgaaaaaatgagactgtaaataatttccgaaatatattatagtagaattataatatattaaggggggaacgttgataatgagagcaacaggaatggtaagaaaagtcgatgaactcggaagagtcgtaattccaaaggaaacaaggaaattactttcaattaatgaaaaggactctttagaaatttttgaagaagaaaagaaaataatattaaaaaaatatgctcctggatgtattttttgcggcaatataaaaagtgttactaaatttaaagaagttgctatctgcgaagaatgtataaaagaattaaagaaattaaatacataagaaaattcaattttcttttatgaagttttaagaaaattacgaatgatgtaattctatttaatcaaggcttagatttttagtatcaaacaaaaatctaagccttgattttaataccatctattgattataaattattcttaaaaggaaaaagttatattaacgaaactcataaatcc

SEQ ID NO: 67 - DNA, 33726 bp, Clostridium beijerinckii
atttataacattaaattgcaagaatactctcaaaagttgtatactttttttacaaaatatataaaaacttaactctaaagaacaaaaaaacaaaaaaattttttataaaaaagacataaaacttgcaaaatgataaattgataaattaaataaatttaacagtgcatttggcaacgtatataaaaaatcttatatacatatcaatcatgcactaatttgcttatatatttaagattaaactttattggaggtataaaattatgatcttaaaaattggttctacaagtagaaatgttaacatagttcaaaaaaatttaaagatgctttcttatgatccaaaaggtattgattatatttatggagaaaatacggaaactgcagttaagaattttcaaagtgaaaacagtttagtatgtgatggaattgttggagatcatacttggaatgcattaatagataaaataaaaaatattcaagctgcattaaattcatatggcttcaatttagctgtagatggaatagctggcattgacacttataactgtcttttgagatttcaagaagagcataatttaactgctgatggcattgtaggtccagaaacaaaaaatgctctatttaaaaataataataacagcttaacagattttgatatttcagagaatggagttaactttatagctgattatgaagatttttatgctaagccatatcgaggattagattctcaaaatcaaactataggctatggccatgttataatctcaggtgaacattttgaaagtattactaaaattcaagctaaagctctgctaagaaaagaccttcaaagctttgttgatatagttaacactataactttaagtttaaatcttacccaatgtcaatttgatgcccttatttcatttgcatataattgcggaatatccgctcttaaaaattcaacccttttaaaagatattaaaggtaatgcttcaattgaaaagatcaaggaagattttctaatgtggtgtaattgcaatggaaagcgtgaacttggtttatatcgcaggcgctatgatgaatttgaaatgtataaagatgctgattatacaaggacgtatagagatttttaagtaaattaatattcaggaagatactacattttcctgactttttatcatatagttatctagatatcttgtttaagaatatatctagaaatattttaaggagatgatttctttgggcaaaaaaggtcaaaattataagccgcttaatgaaagtgaatatactgatattgaaattaatggattcacggactcagaaccactagatgatggtattgaaatagaagcattttctttttctgatcaagatgataattcaaactataatactcaaaatattattaaaagctttgaatattctaaatcaaattcttcaaatgcaaaagataatcatagctctaaaaacaaagaaacaaattcattggtacaaattcaaaaggtacgtggattaacccctgctattaatggtgaaagctttgatataaaaagatgttatcaatttagagcttcaactttgaagaaattaaatcaaattaaaggcgaatctgacaatgtaaatatttatcttaatgaaattatagatcaagctatctgtcactactataattgtgtttttagtaaaaaataactgcttattcttaaaaatatataaacatccctgcatacttatttaaaagtacaatgtaaaggaggttttctttatgggtgaaatggtaacattaattacaaacgttggctttcctatagctgttgcaacatacctattaatcaggtttgaaaccaagattgatgggttaacaaaagctataacagacctttctacagtagttacggaacattcaaactataagagcgatgataaagttgcttaataatcaaaaatggaatggggctgttcactatgaacagctcattctttgcttatatgaggacaaaccatttattgcgtggcatattaaaacaaatgatagcaacgttgctatttgggttcttttatcgaaatattgtcatttacagacttatctaagctctattctaattttaagaataagcatataactatagattcacctttatttcctgaaaattctaccacattatttaaatttgctatctaatctttcttttcactttagtattttgtataaaactgatttttacatatcattatcatctatacaccataataatcttccatatcttccttcattctcatctctataatttgggtcaactactggagatggatcataacctaaactattaagttcattatagcttattgatattggagtcatatctagatttatgaagtttccatcaattttagatctatatacagtagtatatactttatttccattttcatcgaatattccatttcccaaagaaaggttatttcctgatggaatatatgtcccacttttatctacataatacccatttacatagcaatttgttgccaacttaccatcagtatgtaaatagtaccaatttccagaagtatttacccacatatgtgttaacacagtacctgctttattaaaatagtaccaatttgaatctatgtattgccatccagttctcatctttccatgatctaaataatatacaaatatatctttagtaacccatccatcatcactatatgaaaaattcatattatatccaccactggatttctggatagaataagcaaatgcagtcgttgttgtagtagataataaagttagaattaataacattattatagattttttcattttaattatatcccccttgctttttaaaaatatacattgattttatcataaataataaaaatcgtacacaataagtggatatattgagttattattactaatgctgtcgatacacttaatatagaaataaacttcaaattttattacaaaaaactgatgtaaaaatcactcacagattcttcataatgatattttgaggaaaataaaactagttgatttgtaatttttctgttaatgtatttctataaataagtttcacttaataaccttattaataattaaaacaataaaaaacaaaaggagttataataatgtactgtaaaaaatgtggacaagagataaaaaaagatgatttattttgttgtaattgcggcaataaaattaataatgaaatcaaaaatactaaaccaaaaaaaactaagaaactgaatattagttttttagtgttaccacttattcttttagtaatagcatttattacaattaggatttatcctaattataataaatatggtttcataaatacttctggaaatttaataattccttatgaatatgatgatgtaaatagattttctgatggacttgcaagtgttaaaaaggataataaatggggctttattaatacttctggtgaattagtcattcctcatgaatatgattatgctggtacttttataaatggacttgcaagtgttgaaaaagatgataaatacggttttattaataagttcggcgatttagttgttccgtgcatttatgatgaaactagcgactatcttgatggttatgcatttgttaaaaaagatgatgaacatggttttgttgataccaaaggtaaaataatcaaaccttatacagaagattttgattcttcatgtaaatttactacttctggattgttgagggttgaaaagaataataaatatggatttataaatattaattctggtaaactagttattccgtatatatatgatgatactgagtttacattttccaatggacttgcaagtgttaaaaaggataataaatggggctttattaatacttctggtaaattagttattccttatgaatatgatgctgcagatagttttgataatgaacttgcaagtgttaaaaagggcaataagtggggctttattaatacttctggtaagctagttattccttatgaatgtgatactgtaaatgagttttctgatgggtttgcaagtgttaaaaaggacaataagtggggctttattaatgcttctggtaagctagttgttccttatgaatatgataatgtacatgagttttctggtggacttgcaagtgttgaaaaggataataagtggggttttattgatacttctggtaaactggttattcattatgaatatcaagatacctctaattttcataatggattttcaatggtaaaaaaaggcactaaatggggccttattaatacttctaatgaattggtaattacttatcaatattctcattttaaggatttttctgaagggttagtagctatacaacgaaaagataataattggctcaatcttatatttaaaaaatagatttgtagtaaagttataaatagaatattttaagaaaaagattggctaaaaaaccactcacaaattatgaattttagtatttgtgagtggtttacttttaagtgattttattgtttctttagttcacgccaatcaccagatttttcattattatattttaatttctctattaccctactatcctttattaaatatgcatagcctccagctgaaggacttattgaatatacatttccagtatgttttccaactaaataatgcatggattcttcattaccactttcatcaaacggtaataaaaataaataataatcatcttgctccaaaacataacattgaaagaatgtttttattaattcattatcaatgtcttctttaattaaatttgcattatatttagcaataaaagtgctatcttgtttcaataaccactctttagcttgttctgccgttgaaaatttaagtgtagaatatttatctatagaattatctactacaatagtatcgggatccacccctaatacgtttttaatattttcattacttattgggtacatttcagtatgggtaaggttagccttaattgggtctataaattggttatatttttcctttgatacattgttatcatttagtgtataaacagctttattttcatcaaggtatgcacctgcagtatctaaagtaaaaaatgtttctaaatatctatctccttctggtttataaccagacatatatgaacttccctgagaacctcctcctactactattgttttttcattacttaagtaacctctatatgatccgtggctaacattaattttttgagcatttatcttatcttcatcagtattatatgaaactacagatagtgttaaaccagctagtccaccagattcaccatagtatagtagcatttcacaaactccatcttgattaatatctaaaattgtaaatttaacattatcagggctttttttataatctgtattctcagtaagccatttggggcttttaagtaattttgcaaatacttctttttctttattagcttctttaattttatctaaagtttcttttgtatctccagtattattttgcaattctgcatcggtactttggggcacactggtatttttaggtttgatcataaatttaaaatatataatacttagacataaagctaaaaaaagacatatcgttgttcctataattaagttttttttagtattattcttttttaatgaatttattggctcattttttatttcgtcatttttagtaatttcactaccttttatcttcgtaccacaattttggcaaaatttatctccatctgatgcttgctttccacatttactacaatacattattagccttccttttccattaaattatttaactactttagtttcttaccacagttagcacaaaaagcatcttctttttcaatttcatatccacactcacagacgaatttattatctggtgcaacccttttattaaagttattactcacaatgcttttaatttcattcactgtatttgctgttttacttatggtacttattgtaatttcctttgttgtgccttttatattgctaataatctcttctctttttcttctagcttcctcctctactttaattttctgttcctgttcttctctgtatttgtcctttgcatattctcctgaaataatatattttattagttttaattctcgattttctaatattttttcattaacaattggaattatttcatttagaaagtcagtttctgctttagaaaaatcaaatagctttaaactttcaatccagttctcctttttcattttaaattcttgttcattatatatttcatttttatataaattataaattttatttaattctgataatttttctttataatcacatataatcctatcttcacttaattttttattataagcttcattctcatatctaatctcctcatttttttctacacttactgtactaccttgaattattgtcttattgttttttttacgtgaactactctctataataaacccaatcaaaataggtactacaaaaacagctaaaattacaataagagttcgtatcttataaacataatcaggagtattgtctatacttctgttttttaatgaatttgaattatcaaaattaaaactactatcacctgactttccgtttactgaaatccccttatttaatgaatttgacttttcaatatcaatactcttatctccatatttaccacttatggaaattccatcatttgatttttgaatttttatcccatctggttcttctttctgacatcctataaatgaaaatgacactaagaatataactaagatcattccaagactctttaaagataacctaatatttctattcactataacttctccttaaatatttaaaatttagctaaactactctgtaataaaaaagcaagcaggctacgccccattaatataagggcgtatttcatgataccagtaaacttaagtcaatatctataagtacgtatttggtgataccagtaaatcatatattccaatatctttttactgttgcgattccttttccaagttcttttgaaacgctactttggcttaatcctcgctcttttaattcctgcacagctttaattgtatctcgcttttgctgttctcttttagttaatccatcttcatttcttcttgcttctctttcttttaaaagctttctacgcaatttttcacttggatttataattgttgtcattagcttcatttcatcatctgtaatgtttaatttctctattaatgtttcatttttataattgtatccaccacgtttatacacgccatttgggctgtctaagagccacttctcataggccttttctgcttgcattgttattttctcaacttcattattaactaatggtttcctaaagccttgattaaattctaatgcgttctctaaagcttgcactggatcattacagtagcagcaataccaatacctatacagaaagcacataaactctctttgaccttcctcagtaagaactccatcattattcctgcagtatccgtctcttatctcctgaagcttcaatatatcattaagtcttgcataatgcagggaatacaatgtataaaagtttactacttttgctttcctgcccctacctttatgtgctggattattaatgtacggtgtaagctgtggcagataatcattttgtatatctcttaatgtataaactaagttttcatcatacatgtaaagctttgatcttagcccagttttatcattaatgcttccagcaagtctcattatcctggcaccgtcaatactcttggaatctgctcccatatctttaagcttgtctacaaaaaatttctgtattgaattccaaagtggaagtacttttattggaactggttcaataagccaatatacggcgagtcctcgacctgtatatataacaaaacttggctctggaacatcttgtccaaaataatcattttcgagtatcgcaagtatcctttcatggtcatatgtctttaaattttcgatattataatagtctatatctatgtataaagcgtttaactttcttatattttcaatctttcttcttggcataaaaaaagaatttggtgtcatatatatatttgcatcaaggcttatagcctttcctatgttataagttaaatcatcaactttataatgatattgaacatactccttatctttttttgcagctatagcaataaatccatcatcaccttcatggagaatagatatattttttacagcttcatctttaaacttaggatcaatattatactctatgtcttccgtcaattttctaatagcgctaagcacgttattttccccctttgttttctatacaattataaaaaaacaaaaaaactataaataaatgtataaataaacatacatatttatttacaatcactaacccactcacttattgacttaatatgtcacatattgtataattattctataataaataaaatataattaagtaagtgattccctatagtgtatttaagtttcctaggcctagtacattataggggttgttttttatatggaattgtttggattttgttatttatatcatacaatattctttcaaattatacaaatattttacatttttatctatatattttttcttgattcatctaatgttaatcattttctattgtgatataatagttttaatggatgtgcgctcctggactgggtacccttggtggtattagttcaactaaattcagccagagtcaaaactccatctgaaaagtttcactttatatatttaaagttaatcccctttgtaaatttttataacttttgcatatatattagcaattagaaattgactgctgataattaacactgtcaattgatttaagggggtattttaatgaattatgaccaaatagaagatcaagtcaaactagctaaaacgggcaactctgaaagcttaaccaagctgctgctccaatttaaacctttcatatttaaaactgctaaaaattttaatataaaaaattatgatgaatatgatcttgtacaaataggctatattgctttaattaatgctgtagataaatatgatacttcaaaacattcattttcaagctatgtttatagtgcaataaaaaacgtaatgaaatatacagcaagagaaaataaaaaacatcaaaatacactaagcatcaatgcatctattgatgggaattgtcctaatgactttacagagtttctacaaagtaatgaaaatttagagcttgattatttggagcatgaacgaatattgaatattcaaagaatagtttcagatcttgagcctgatgaatttgaacttatattctttgtatactacaataatttttcacttacagattatgcatctaagaaaaagatttcttactcaaaaatagttagaaaaaagaactttattttagataagcttggatcaatgcttaaacaaaatataaaaaactagtagaatccacaactggccttgtggtactactagttttttttgtgcaatttagttttaatatgattatatcattaactattgctagtttcattatgtactttagtgtttaaaattataatgttctaattgattctaactttctttcagatatacagaaattataaagtttattatttagcatattatctgaatttcgctttatcccataataaaagttgttcaaatgcaatattgtagcaacgtcttcttctctcataccagtttcatttgctaatttaggtatagtatattctcgtgtaatatacatttctacaattttatcttgtttttcaaataagtccatttttatcactccttatatttttcttctaatttcataagcttgtcttcaatataaataaaatacttaattaatttagatgttctaattattatattaatttgttattaaaggtacatatggtgctaaatataaaacctcctcatcacgaatagaaaattttcttaggcttaaaatacgatgattatagttaaactgtttagtaagtcttgctattatctctaatggtataccatatttttttttataaccctttttgcgtatatttagaatactcatctattagcttaaatgccaattctgaacacgtcatatgtatcacatctttctttttagtataaataattatcttcttccaaatccaaaacacatactacaatctacttctccatctcccaaacacatattacattttatatttccagttccattgcagaatatacaatcatcatcaaatccaccacatgcacaatttactttcccagttccaaaacagtatccacaatattccttacccgtaccattacaccaagtgcattcttctttttcatatcccatacaaatttctccttgtaattttgaatttatagatatttatgtttattatctcttttttttaaatagatttttcttctaattttttaattcttttttctaaatcctgaatcttattaacaagacattcagttgttatataattatttaagttttcatttgaataattaataatttcttttgtaaattcttgttggtcgataggcttgtattcttgattataaaatctatttattaaaaatttatcactaaactttcgttgttttaagttctcctgtccaattttataatatctatctttttcttcatccgatggtcctacaattgcttgaattatactaacttgacgtataatcacattattttcctctaactgaaccaatgcatttattacagatgtccttgaagtttgtaaatactctgctagccgttttctagggggaagttcctttgcttcaacatcatcaagctcttgtaataacaacgctgctaaccttaatgaaacagatgataatgtcctgttattcttcaaacattgattaataaagagtgctttaaagaaatctttattaattatcacagtattattttcgtcattactagaatatagtctttggaaacccaaaaaaatcaccaccttttccttaacatatataatacacttcttattttttagtgtcaacattatgcattttatatatattcttaaaaaaagcaatacatttcacactactctgttaataataataatttatatatgtgttatttcttgactttaagtaattttcccaaaacttatcctataacaaaagagctgtaataaaaacaactcttcacatattacaatatttaattttttcctgtaagctgtctattcaaaccatcaatctcattctgcaacttctgcatctccaagtccttcttttgaaattccaaattattcttatccattaaatgttcttccaatgcttttaatgaattttccatctcaaccttatgatctgctttaagcttatcaatttcacctgcatatttatcttgtaaattcttaatttcagtcttactatctctttcagcttgctctaatttctctacttgatctttatagaaattaatcatattatccttattatcaatttccccttgtagctttgtgactacatttccaagtgatgttttatctgatacaagcagattattatctttcttaatgctctccaaacttttttcaagttctatatttatattcttatactctttatattctgcaacctgatcttgaagattattattatttctattagctatttctattgcctttgatttatcaacaatctctgcttctaaattattatttttatcaaataataatttatttttatcttctaattcagtaatttgattttttaatgaacctctttcattttttagatcttgaacctgctcatataaagcacttatagcattatcctttgtatttatctgttggctcaattcttcccttattctttcttcagttgttgtgttttcttcaaggctgtttatataaaatttaactaagctattaactgttgtttggaatacctcaatgctctttgctctatctccaaggttattctttgcattacttaattctaatgtattaagtaaactcgtaaaggcttcttgctgatttaagttattttgactagcaaattccttaaatctattgatatcatcctcatttaacctaaaagttgctggttttattatattatcacccatatgttaccctcctatttttctgtatacataagttacatagtaatgtaatgtatacattgattacaaattaattatacagttttgattttagatatacaataactattttaaattaaaattacattgtaacgcacacattacaatgtaattattgtatacatatgattttatccgatagctaggatccgtaacactcattgggagctaacggttgcgcgctcctagacaagttccactaagattcagattgagattaaactccacctgaatcaagttttatttgatgtaatcaaataaaaaaaaataaagagccataataattacaaatcatcatgactctttatttctttaagcgcttttgggataaacgtccccttttctatgccttctttataagtaattcctttttttcctcatcatatctaagaataaccgttctatcatcttccgtaatacccatatccttaataatcttctttggtatattaaacttacctctagttgaattttcgtctgcattaccatagcactttgttatggctacatttaatatcttttcaatcattatatctgccctttctaggttaaatttcatttaatggattagatcttattgcacttctcacctgctcattatctacatgagtgtaaattgtggtagttgatatatttttatgtcctaaaatagtttgaatagttctaatatcaacattactatgtttgtaaagcagtgtggctgccgtatgtcttaatttatgtgttgtatatttacttacatcaaggcctgtgcttgaaatattcttttgtactatgtattgaacttgtctcttacataactgattttttctttcagatacaaataaataactatgtttgatatgttttctttcttccatataatctttaattgctcgtaggcacatttcatttaaataaatagtcctatccttattccccttcccccttacaacaagtgtatcatccttaatgtctttaaatcttatattacaaagttctgaaagtctaagaccgcagtttaaaaataatgttaaaattgctaaatccctttttttatttcttcctactatgtctttaagtaattttttagattcatctaagtttaaatagttaatttgtttattgggctttttgggaacctcaagctccctgcatggattattatttattattttaagcttggtttcacaatatttaaaaaaagatttaattgacgctatctttctagcccttgcaaaagaactattattcctttcattttttacataacttaaaaatccatacaaatcctgcagatctattaattctataaagctcttatcaatctctaaattctgatacttatctttggtttttaaataatttataagtaacattatatcaactatataacagtatacagtactggacgctttttcctgaataatattcaaataatcctcgtaacttttaattatctctggtaaatctttattcatttgctttgctctctttcttaaactggaatatctatattgtaacattattgcacccattctatataatttcaaatgattcgaaaaaaatatttttgattgcatacatatgtatatccaaatagtaaaggagggaatatccatggctgtaactacaacacttaaaagcaaaactctagctattgaggttcaaactgatacagataaagctggcgatcctatctatggaaagaagagtttttcaggagttaaattaactgcaactgatcaaggtgtttataacgttgctgaagctattaaatcagttttagacgtaaacacaagagacacttaccttaatgaagttgaaacagtttctaatgtttagtaaaactctaaacctaaaattatagtaaaggaggtacactttcatggaatacacattaaatatggtatttaatacttctggtgggaagaaaacaactttttctataactgatgttaaaagcagcttaactcctcctgaagtaaatagcttaatgaacacaatcttaactgaaaatatattctctacatcttcaggagatttagtttcaaaagcgtctgctgctattgtagctaaaacagttactactgttgctatgtcttaagcagataagtgaaaatctaaaagtgagagtccaaattttacatttgggttctcgagctttccccttgtgggcatctatgatttagtttcttgaacttagttaactcatttatgagttaacctaattaaaaaattgatttagtgtgaatcggttaagcagacgtctcgaatctatgatttgatgatggtcgcttactctgtgaatactcatctgacattaggaagaggagtttcatatttacaaatcatagctatcggataaattatatgaaaaggagtgaataccatggcaattacaaaggttgcaagttcaaaatctctatctattgaaattcaaagtggtactgatacaagcggtcagccaacttattcaaaaaagagtttttcaaatgtaagaaatgatgttgagccccaagcagctttcgatgtagctgaagctattaaaacagtactagataagccaacaagatcttattttttaaattcagcatctacactagtaaatgcatagcagctactttcaagtgaaacttgattcaggtgtctgaatcttagttgaacttatctagggtctagtcactgttatctcactcataaatagatgatgggagcgttacagtagctagacaccagaaaaatttaaataaagggggtatactttcatggaatatactttaagtatggtatttagaactgagtacggagaaaaaacttctctatcgattaatggagttaaacctagtataactaaagatgaagttgatgccttaatggatactataatctcaaaaaatatatttgtagtttcatctggtgcattagttggcaaaggatctgctcagctagttgcgaaaactgttactaaatatgatgtagcttaatattaataagagcagtagttttttcctattgctcttattttttctttcaattttgattaacttttttcattaaattataagcacaatccccatattatgtaaaataacaaaacattgcatgaaacaattattttatgcaatgttttactttattaaaaaataagaagtatataaaatcaatatttaaattattttaatatactccttatcttataaattttaattttatgttgtttaacttaacaaattattcattcttatatattttaataactatttttagattagtaaccttctctcatttgaatataatgtagatactctatatagagcttatttttttcatttgtaaagctagcattatctttatcaaatgaagattttgaattttctaattcagtcttagacacaaagccgtagtcatattttgcttcaataatgttatattctttttgctcttgaagtattttactgtaactatttttaatagcattataagaatttataagtgtactgtattgttccttaaactttatttctgaatcgccaattaacttttttaattcaatattagcattttttacttcgtaatcataaatatcgtcctgatcattatcttcataatcatcttctttatcctttaaatcatcaatttcatcattttgattccctatctgaatgttattgctaagcattttttttaaatcatcttcataattaatttgtgaaatggcttgaaaatctgaatttatatcagtactgaatgtgatgttttcttttgagctaattcctagcatattacataattttattttagaaagctcctctgtatctctcaattcttttaatttattaattgaatctgaattatcttgagttactgaaatataatccttgtttgataaaaagccactttcatatttaaatttagctaatttttctttttcttctgatgactttactgcattttcctctagtgttgtatttgatatattagataaataatctatataagctttttgcgcttcatcgacctcggtttcaaccttttggtcataaactgtttttgcatctttatatgctttcctagcctgcactaatgcatcattatcatttttgacttcttttttggcagcctctaaagcatcttcggcatactttatctgttccttagtggcattagaatcccccattagattctttaatttattctctgcctcgtcttttgcactctcatttttatctttaatatctttagcgttattataatattctttttttatttgtatgttattatgttgaattttaatctctgaactattctctataataatatctttaatattttctaatgaaactttgattgttttattagtagtagctgcttgtacactatttatgtctgcaaaagacaagtttgttaatattaacgtcataataaaaaaattcgtaaatacctttttcattttcttactccttaatttataatataatgcgattatttacactacacttattatatattaattaatttattattagctatgctaacgtttaatggatatatttaaagataacactcttaaaatcattataagtcagtgttatctttactacttaatgttatttattttattactcatatcttaacgcttctatagggtcaagctgtgctgcttttttagccggataatatccaaagaatactcctattaccgttgagaatgtgaaacttattatgattgatggtatagatattgatattggtgattttaatactaaacaagcaataacccccataccaaccccaagtatcattcctattgttcctccaattgtacatattatgactgactcaattataaattgtgtttttatatgaccacttcttgcaccgagagctttccttgttcctatttctcttgttctttcagtgacagatacaagcattatgttcattacccctatacctccaacaagtaatgctatagatgcaattacagcaattccaattgatatactcttaaatacagcggctatagactccatactttttttgttatctaaaacataaagtgtccaatgtttattattcttatacaacttttctccatgtttttctatatctttcactaatttttctgaatcaacattagacttaggcatgatagtaaaattcgaataatttttattctttttcattattttagatgttgttataggaatgtataaattggttgatatatctttttctgatactacacttcctccaatcaatgaagaactctcatatttatatactcccacaatagtatatgtttcgacctcatcatctatataaactttaatttctttaccaactggattaatattttttttaaaaatattcttaacaagtttatcagaaactacagcactttttttcgttcctttaacatctctatcggaaataaattttccattaaccatctttacgttattagtatctctatatccatcatttactccagtaatacttacatttgcatataaatgtccatcctttactcttccttgatttatttcttctgatatacttatagtgctaatttgacctttaaatacttctctaaatgaatttatttgttccaaagaaagaaggtcactatcttcaggctctttactagataaactaactccgtcaccagaactattatcacttttttgcattacactaactccaatattgctagctcccattttacctaatgtatttgatactgaagcggtgattgcacttccgattgaaacaatccctataacagaagatatcccgattataattccaagcatagtcaacatcgagcgcattttatttgcctttattgatgatattgcaagtagtatattttcttttataaacatgccttttcaccatttgagaattttttagtatacattctattaaattgttctgatactattttcccatccttcattgtaataattcgttctgtttcttcagcaagctcctgattatgagttataagtattatagtcttaccttccaattcatgtactttgtgaaataggtccataaccactcttccagttgaagaatcaagagctcctgtaggttcatctgctaagattatacttggatcatttgcaagagcacgggcaattgcaactctttgtttttgcccgcctgataactcatttggaacatgggttatcctatcttccattccaacaaggttcaaaagactttcggctctctctaagcgttcttttctatctactcctgcataaagcattggtaattctacattttttaatgctgtacttcttggtattaaattaaaagtttgaaatacaaatcctatcttcttattgcgtatttgtgataatccatcatcagatacttcattcatattgaaattatctaagatatagtttcctgatgtctgcctatcaagtgcaccaatgatgttcatcaaagtacttttaccagatcctgatgctccaactatagatataaattcgccttcttttattgttatatcaatgttttttaaaatatctaattgatttggagttcctatataaaagcttttgacaatatttttcatctctattatatttttattcaaaagactcatcacccacttatttgaattttatccccaaccttgcaagttgaaggatcatcaattattatggttccatctgaaattccttcgcctgaaatttctacacttgaatcagattcaagtcctgtacttattggcacgtccttaactatataatcattattatcacttttctctgctatatataaactcttaccatcatcattttcaactatactgtcatatgaaatagtatatatatctgatttttcacttaaaataatattagctcttgtactcattccaacataaatactctcatttggctcactaatcttaatttttgcttcaaaaccttcctctgtgcttgtatttgtacttgtatttgtcaattgagacttttctgtatttataggtatttctgacgtattagctgttggactaatacttacaacttctccgtaaataacagcatcccctgttgaatctgttcttatctctgctttttgcccaactttaatacttgctctgtcaatctcctttatggatgcatttatttcaatattatccaaatcctcaactctgaataagtttccagatccaggatctcctgcaactgcgcttactgatgtaaccgttccatcaataggtgctttaatttgacacttttcaagattgctttgttgtttttcaagagcaatcctttcgctattgttattagcagcgttttgggctttttcatagttgttttttgctgtatctaattcttgcaaagctttaaccttcgcattctcaagtgcaactgcagccttatcatattctgactttgcattttcaaaatctatctttttttgctttaattcctgcttagagatttctccagattctaataacattttattatattcataaatattttctttatcttccaaactaagttttgctgaatttacagcttcttccgcattttttatctctgaattcaaattattattatataaatatagtgtattctcatattctttttttgcagcattaagttccattttattattagcttcattggctgctgtagttgcttccgcttgttcaatatccttctctaaatctcctgagtctaatactgctaaaatatctcctgctttaactttatccccaactttcaccctaacttcttttattttattatctaacgtactatatacattagatgatgtaccactttttactacaccagaaacattaatactattaactatatttccttttgagagaactgtatacttagtatctgtttttactccagacgtttgtaatttagtcaataaaaaagcgacagctactacaataactatacatattattatctttacttttttacttagtatcttttttaatcttgtgccttcttttatttggctctcaaatttatccttttcaatctctaactttggcattttaaaacctctcccactttaacattagttattgctcaaacttattagagcctttaattacatcattctatttaatttgtaatttagatattatactagataaaaaacctaaggatacaactaatataattctaaaaatactattgttatatgttaaaaatagaattatgtatatcaaaaaaagaattgcgtatattaataatttttttttattcatatattctactacctttctaataaattagtttaatcataaaatcttccgttaactagattaagttcttttgttgctaatctagttattaaatcatttatatgacttacaaaaattattgatttatttaattgaacatactcgtggaacatttttatggcaatattttgactttgaatatctaatgctgttaaaggttcatccataataataattttagtatttctagataacatacctattaggtataacttgtgtttcatcccaagagaataatcttctacatatgtatttagatcttcttctaaattaaaaaaatttgctaattccatggatgttagcataaatttttttttatcttccttccatatatcgcaaataagttccaaattctccattccagtaagctttgtatataaatatggatcactaggaacatatgcgatatcatcttttatatttctaagcttatttttttgccccatatattttaagttacaactattaatccgaattaagccacataatattttaaggaatgtagtctttccagcaccatttggtcctttaatacataaaatttctttttcattcaaagtgaaatctaagtttttcaatacttcagtttcttcactatatgaaaaacttaaattagttatctctagcataggcttcatataattccatcctttcaccattaaatatgtgctatattagtttcaattaaagcagcaacaaagaataaaactgtcattgtgacaaaattacttaaaatcctacctatgtgcactttattagtataattcttatcaagtaaaagacgaataaatcggatactttcataagaaatagatgtagcaatgcataatgctgagatctcaaagataaaatgtggagccactcctgttaaaattggccaaacactatatttattaaaaacccctattaatatatctcctagaataactccgttggtaaataacattattgagctccctattccaactgttatcaatcctataattataattaagatcgataacctgtagttattaaagaaaatatatgcaaacttcaggttttgtgggttagtagtatattcctgattcctagaaagaaacattccaacaataatacctataaaataaaatgaaaatgaaattaaaatttgcttttttattgatattaatgaggtgaaaattttgtttggggaaattatatctttcaacttattactaaaactcaaatttttcaactcctttatggactatatttctaaaatatctgttaaatattaaaactaaagctaaagtcaaaaaacaataagctatattaatataaatccaagtatcatatttaaaaatattaactacactatttataaaaaataggtatgatacaggcataattagtatcattttaggaatattataaaatttagaatataatttatcttcatcttttaaactatcgctttcctcaaattcattatttgaaaagcttattatatacggactcatatataatgagaatattggagccaaataataatttgcaatagatagtattaatagtagtatttgggatacaatataataagtgctaatattaagtttacatactaacatgtagctattaaaaattacaaaaataaatgttggaatcaacataaataatcttcccaatttaacttttgattcatataaatcttttagagaagtttgagacattttatatatatctatattaggtaggtcatatttatacttaaagattctagttagtgaatttattatgttattagcttgatttaatattaaaatattattaaaaaatattataagcattgaatataaatatatattttctataaaactatttattgaaataagaatagctacttcaataataagttcatatgagaataatgtaactgtaaaaaaattagtttttaattcgttatctcctttaatcaatatgttcaaatcttttaatactaatttattattactattaaaaaataagtttatttttttatgaatatttatatattttaaatatatattgggaataatattattgtgtttgtaataatattttatatatttaaattttattattataaatagtataatgagattaactattgaaagcatcattagaataatatatccgtttcctgttaatagtatattaatatttgattttatttgattaaataagttaatagcaatatctaatttttcaattaccggagtaatccataaatcatttaactgcatttctatagaagccaatgtatcttgattaaggctagatgaatttgccatattacttcggaaaatttttaatcctattgctaagaaactggaaaaaatatataataagaagaaaataaatatgttagtaaaaatataatttataaattttactacaattgaatagctgattgacttatcatacgaactcttaattaaattattaataactaatgtagttaaaataaaaatactttccaaaaacactaaccaaagaacagatttaattccaaatataactataaatagtatttttattggcattaacttatcaagtatgctaagcttaaaccagcaatattctagtaaattaaacaaagtagatatttctgattcagatagtgcacttattatatatagctctatatttgatggtttagttatttttttataactatcaaacgtatattctaaatttaagcatattataataagtgatattataataaaccaccaagagttatagtttgagtcgtaataatgagaatatatagcaaaaattataattgagctaaaaatagtttttaatataagtaagatccaatatacatttgtaggtgatttaatttttaaaattttaaaaattgaattatattgagttctaatttttaactttaataaaatttttagcatatctattaaataaaaaaagctatttttcatttttattttctccaataaatacaagattttttattcatttaattaaatagatagcctgtctgtagcaagctatccatttaattaaaatcataaattttgattagtaagctatagctcttgccatactttgcttagctaatttttgaactgttgctttgaatgttgcccatccaatagtcattaatgtacctgcaccaccacttgcaattgaagctataatacctaaaacagtaactaatgtacctgcattaagaataacattaacaattgtagtagctgcagctgtttgcacgcctagtgctcctgcaactaaaaacataattaatcacctccttttgaaaaactgatatattgatatgttatcaatataatcgcaagaaactatttaatcacttgcaattacatttttacatgataaccataataaagtaaatacttataacattaaatgtaaaaatttagtcataaaaggaacctctttaacatactttatcaaaatactctttttgtgaaccaaaatgaacatttaatgctaaaaatgttcatttcatttagatattatgataacatgagtttttaagaaactaaatatttacaattagttacatatacaaggaggttattatggaaagtactcaattaaaaaaattaggagcaggaatagttacaatatcggctattcagttgatcggtgctatatttagtgttttaggatcattattgttattctcatcaaaaagtgaaattctaaatgaaatgcagacaagcaaacaaaacatcgcatctaatactcaaattactataactttaatattgcaagtattacttgctataacaattattctcattttgcttaaaaaatctataggaatatattcttattttacagttgttacaattaatatactttattcaattattagtattggttttcaatggacaatcattttctcattaatactcccagtattaatggcaatttttatatataaaaaaaagagtctcttcaccttttagtggaattagctatgaaataaatatatatttactagagctttataaaaagtattttctttaaagataagaaaatgctttttttatttttcacttacttataacttatttccactttattaaatataatcttttaataacaatatctatgcttttaatgcgattagtattgattttccattaaatattgtatatataaatatatatatacacatatttaatattgactactaattgcataaagaggttaaagatgattaaatatttatcgactaatatatcactatattttcaagagaataattcttgtctaagcaaaaaagatgtacttaaaattcaatataccttagaagcaattttaagtgatttaagtaaatttattatcatatttttagtttttttgtttataaaagaaattccattatttctgttctcttttataattttaaattcaacaaggcctttgttaggaggaattcactgcaagacttactatgggtgtctaacctgcagcatactatatttcatgataatattattatttactagattatttccagaactaaatactaatttttatatagttttctttatactatctcttgcaattacttttatttttgctccttgccctaatgaaaaaagaccagtaaaaaataaagcgacattaaaaatattatctttaatatcgcttactttttggattatacttttttacctatcacctttacaaacacgtaactgtatacttataagtatattcttacaaataattcaagttattattattaatacgaaaggagtgattttcaatgcaaaaaataataaaacttttttcaaccgtactacttagtttgtttgttttactatcaagatcgagttgtcatactcttataggcgaaccagattttcctgaagaattattaaaataaatatcaaaaataatcgtttcatgctccacataaaaatttatacatcctttatggctgttaactattttttgtacattgtacaagccatatcctctagtaccttttatatttttagtagtataacctcttgtaaacatctcatttaagttaatgttatttggattgactatttggtttttaacaattaaatgaggtgttccctccaaattataaattcttacttcaatatttttcttatcacattcttcttttaatacttcatcaaaggcattattgagcatattatttaataaattagatatttcatggtaacctaatatattatctaaaacattattttctatctgatatttaaaatttatattatatttttctgctttacatatatctctatatattatagatctaataattgcattatctatatatattagttcatttattttattatcatacgtctcttcatctttcatataattagtaatcactgattttatatctttttcttctacaacttgtactattcctcttattgtatttttataattaataaaatcatgttgtctttgttttatttcttgaactatctcattaatgatagaattgtactcattagaaacttttaatgtttctttttcttttactactttagcaacatataagtatgtgaaaacttgagatataattaatatactcaatacaactgatataataattaaattatccattattatttttctatcatattcccaaataaatttaatgatcatgacatatataattgatgttaatacaaaataaaataaaatatcgttagttattttttcagcaatgaaatttttattaactaaattaaatcttgagaaaataactaaacacacaagtattatagattctatcgcgaaatcttggatagtagaatcataaacaaatttattaataactacaaataatattaattgtataagtataattataagtactgataataacaattcaaatatgatatttttaaaatttttcttatatataaccttaattacaataatgtctattatatatgtaaatatgaaatttagtcctaaatgatcagttaccgtaaccaaaatcgaaataatgattacacttgctaataaactaaatatatgcttttcttttttagttaaaattatccacaggtaaattacactgaatgtatccataatacttagcataaaatcatttaacataatatcatttccccagctttaatttcagacattatattatctttaaatttataccccaaaagagctgtttttaagcaattgttaaaatatataatacttagcttagtacttatcttttctaccttacgaatataatttttgtttatagcaaaggctctatgactttgtactatatactcacaatcaactaatttcataatcttttttaaacttgtattgttagcctcatatattccattaacagtatttatttcacaaactctccccttaatctcaaaaaatactatgtcatccgtttttatcaccgcatatatcccattttttaaatttatagaaacctttttatcattgtccttattatattcattaaaattatcattactattgtttaatcggcttctttcatagtgtataagtttatttaacatatcttgtacatcttcttgattatatggttttattatatagtcataacaatgtgtttgcttaaatgcttgcgttatatattccatatgagttgttaaaaaaatgatttgactaaattgatatttatctatgtttctaatcttcattgcaagatccaatcctgaagattcctttaaacttatgtctattaaaaacatattaatatcatgtttaaaaattatatctaaagctgtattttcgctgtcagcttcataaatttctataaattcatacatcgataaaatcattttctttaaaatatctctttgcataaaatcatcttctactataataaccgaaaacaaaattttcatctcccctttgtataccacttctgggtatatctcttctttatagtttattacaatcataaatcagcttaaaataatagtttttttatttttcttgtttcatatactcccccttaaaaataaagcttgcaaatactttttataaaatacttacaagctttttatactaaaattttttctattaacattgattatctttatacatatattgtataatcaaataagaaaaaatacatcaatgatacccaaatacgaatgagtttcctaggctgatcgtatttggggcttgttttttttattatattgtttcattttattctatattatataatacaatattttagattattatacaattttttcatatattattatctatcctataacttaccattattataatgacaccattggattatatattctacaactactttatctttatacattaacttatatctaatataataactttattttataatttcttttctaaatccttcaatactttatccaatgttccatttaaatatatatcaacaaattcagcttttttatatcctaaaatttctgatattctttctattttttctactgtatcttgtgataaattgtaattaggtcttactctcttatcggtggtaaacttagctattatctctttttagcaaaagtaattgattttattatagtggcaattttgaaaacttttttgttacattatttgtaccattatttataatattttgtgttatatacttagtactaatatttgtttcgttatatgttataatttaatttacactattagtaataaaaattgttactaattttcttttctgattatcatttaatggttttgctacaatttttttattacatctttattctttattaccatgacactgcctactttgccacattattatataccatctatccattaaatttataaatctaaatattaaattaaatactaaggtttacaaattacacttattttcacttttagtatttatagattgattaactagctagtttaaaatcttatttaaatttaatagataaaggagaatttaaaatggatgaaatggtcaacaaaacacagaattggttaaatcacacttatgtaggtatttatccttatactcatatccctgaagacggaataacaggatggactactataaaagcattgattacagcactacaaattgaaataggtattccagagccaaatggaaatttcggacctgctacaatggagaaatgtccaactctatcaataaattctgatgctactgatcctaagattcagcatgagatttatattttacagggagcactattttgcaaaggctataatcctactggtttgacaggaacatttggtgaaaacaccaaagccgctgtaatgaaatttcaagctgatgcaggtttatcaaatccagatggtatagtaactcctatgatattcaaagcactattaaacatggttgcatttgtattgataaacaatgataatttaaaaggtgatccaaatattcgtatcatccaacaaagccttaatagagactataatagggtaattggtttaataccttgtgatggtttatattctcgttcaactaacaaggcattaatttatggattacaaattgaggaagggcaaactagtcctgatggcatttggggcagcaatacagcatcaaagtgtccagtattaagtgtaggaagtacacaaaagaaatttatattactacttcaatatgctttatactgcaatggatttaaccctaatggatttgatggatattatggaaatggtgccaaaagtgccgttacaaatttccaaagtttttgcggtttaaaagctgatgggattgctggcagtcaaacctttgcatcattgcttgtaagcactggagataatactagaaaaggaactgcatgcgattgttctacaacagttacaccttctattgcagctactattaaatctaatggttataaaatagttggaagatatcttactggaaagtttagaatgacttcagatgaactaaaagttatatttgataatggcttaaatgttattccaatatttgaagttggaggatataaattagagtatttttcatatgatcaaggattattagatgcaaattcagcgatgttggctgcaacccaatttggctttcctgaaaatacaataatatactttgctgttgactttgatgcattagattacgatgtaacttctagcatattaccatattttagtgcaataaatgagctatttgccaatttaggttctaagtttaaagtaggtatttatgcacctagaaatgtatgcatacgtactcgaaatgcaggatattcttgcagcagctttgtgtgtgatatgtctactggctttagtggaaatcttggatacccacttccaaaggattgggcattcgatcaaatctcaacagttactttacatggagctgctgatattgaaattgataataatattgcgtctggcagagataacggtattagtagcatctctccaattaatattttagatattcttaataataatagctttgccaaaaggtttggtgttgaattttcatcgcctgaagcagaaatagaattacttaataacgcacttgttaaaattagcataagtgcagcaataaaagctgcttcagatggtgattcctcagtcataaaatttaaaggcggtgaatttgaaggtactgatatacaaactccacttgataatcttaaagcatctctaaataaagataacattgaattatcatcaattttagcaaaagcaaatgatatggaattatcaattaaagtatccactaacggcgctagcttaaaaattgaactcgaaaattcatttaaagtacctgagtatgatatcttttctctttcagaaactttatctattgaatttagaatagataaagataaattacttgaggaatttgagcttgctgtaaatggcataatagactttgttaaggaaacccacgctataggagttttaatattcattgcgcttgctgctgctattataattgtaggtgctgagacagccttaggagctgctcttataaaaggaattgcatctatagcagcatttgcataattctattctatataccacattctagtttccattaaatacaaacaaaaatcacctcagaatttcgaggtgatttttgtttacttcccttcaaatttaacatactaaacatcatcaggatatttattttttaatcttaaatttgtatttctagtaatagtactcacaaataattctttattttctagaggattaaaagaaaatataggaatcaataagttttccctatttaatgttgttataaaaatatactgttccactaaatacagacctttaatagcactccacttataaattgtttcagaaaactttgtactaatttttattccatcatctataaagcgtaaatgcgtttcctgaaacatatttgtatatttatcagaatcatatattttaaaaatctttttccttaatctccagttaaatattctttttctaaagattaaaaatataccataaataattattccggttatggtatataaagcacttctaagtaaaagtatcattccaaacaataatacaaaaacatatatattgtaaaaacgcatttgttgtttgtaaactttcgtttcatgaatatgtttgatatgaaaatctagcagatcatcctttgaaatcttgaaatctacctccataaatacctctttctatccttgttttaattattattatatgataatatttcattatacatatttttacaaacaaattcaacataagaaagatttaatcttataatatatgctttactattcatatttttaatagcattaatattgttttttgaatctataaaaggaggacatatattgaaaaaatttaattacataatactgacagcattactactattatcttttacagctactggttgcaaatcaacagttcaaaatggaagtgctacagaaaatcaaacgacaactggagacgaatctccgaaaacaagtaaagatgctactgacaatgataattatgaaactcgtgggaactctccaagagatcaggcaatttttgaagaaaacgaagaaagagataatactgaaatagataaaagatataaagaagtggataaatctaaactgaattataataaagctgattcttctcttacttactatgaaactgaaaatagctttgttggcagtgaagctggaatacctagtgtagataataaaaaatacaaagatatattatttgactatacctatgcatctgaagtaaatccaacaaaagtaacttatgaagatgcaataaaacttgctaaaagtgtattgcctaatgatataaaagaaataagaaataaatatgataattctactggaaaaacttatatagtttattcctctaatcaaggtaattttgtattaggtctagcatacgattatgacgaatcgcataattctggtttcaccccaaattccaagaataatactatcgttggaataaattatatgaaagaaataacagaacaataaagaaggactgtagcaagatttgcataataacaaatctactacattcctctattctagattaatacaatatcttattaattccaatctccataaacaggagtattgccagaattatatcttattttgcaatctatgaacattccataggtatctgcattaatcggattttgtcctgaatcatataatcctcttattctaagaaaatctggatgcctggttccattttgtgatctactataatcataaggttctactagcgtacctgctgggaatgatcctacatagcttccaccagaattgtacatatctattgttctatctgtacgaaatactcttgctgctatagcacctggtacaaataaatattcacaccaatcgctaatatcagcatctacatccagtctaccatcaacccaatttcctgaagaatttacaaactttataactattgcaattggtccactgcttgtaactgcaaatctttccttataacccaagcttcctatccttgtgttatcctcaatatttgtagaatatactggtatacttgatcctgacatgttaattcctaaataacccataattttttcctcctaaatattaataataattttattaagcctttgaggttagctaactcatttgctttacatatacttaaataggtttttaattaaatttgtaaaccttaaatttaattaattttattttttatttcattgatagttaaatttattgaatccaaaaggtttaatttatccgtaagttctcttattatctcctgataattctcttctctttcttcctgttttgaatctctagtttcctgtgcttttaatatgtatactatcagcacacaactaagcacagcccatattccttgagtagcagcattttttattaactcatccaaagcagtttcctccttatctaaattgataattgcgtttttagatttcttaaagctaatctttgagttttatttacagcttgtcttgatattttcagcattttagcaatctctacatctgaaaattgcatgtaaaatttataaaatgttatctctctttgtttaggcttcaatactgaaatcaaatcattaaatctaatatctgagtattcatcacttctatcattaatgtcaattacatctaatatttctgtttccgatgtaaagctcattaattctttatctttaaagtccttataatacaataatatagatctatttttgaggcacctattaatataggctactatatcctgttctttttcaaacttatttggatttaatgattttaaaagttcatataagtaaataattaaatctgtttctgcttcaggatatctcagtttataggctaaatacctgatttttgaattaaaataagcaaaaatatttataaagttttcttcattatcttgaaatattgtaatttcttctaacaaattagtatccatttataacctccccctgagctctattaaaagattcagttaatgttttacttatcaaaatcaaattctatgtcatgacatatttacatattatcagtttaaccgttaaaaacaaatatctatataatcataaatgccgataaaataaatgattatatagctataagttatattttcttctattccctttgatttttaattgtttttatcagtaatgatgataagattatcatttgtaaaaatatatggtaagttataaagtaaaacttttttaaataaaaaaagaattatccaacaagaataattaactataatca

SEQ ID NO: 68 - DNA, 33518 bp, Clostridium beijerinckii
gaaatagttattctaaaactgatccagacgcaactttcatgcatatgaaagatgatcatatgagaaatagtcaattaaaacctgcatataatgtgcaaatcgcagttgaaagtgaatacgtaaccggcgtcggaatatttgatgatagaaatgatatagcaacattaatacctatgcttaataatatgaaagaaaaaattggtcgtaaatatcttaatataattgcagactcaggttatgaaagcgaagaaaactatttattcttagaatcaaataagcaaactccttatataaaaccacaaacttatgagaagtggaaaaaaagaagttttaaaaatgatataagtaagcgcgaaaatatgaaatatgatgctgaatcggatttttatatttgtcataacaatagaaaattaatacctacctctattatttatagaaaatccgcaagtggatacaaatcagaagtaactgtgtatgaatgcgaaaactgtgataattgcgattacaaagtaaaatgcacaaaagcaaaaggaaatagaaaaatgcaggtttcaaaaacttttgtggaaaagcgtgaaatatcctataaaaatattacaactgaatttggaactaaattaagaatgaatagatctattcaggtcgaaggagcatttggagttctaaaaagtgattatgaattcaatagatttttaacacgtggaaaaaatagcgttcaaactgaatttattttgctttgttttggttataatattaacaaattacattcaaaaatacaaaatgaaaaaactcagaatcatcttcatgaattgaaacctactgcctaattatggaataaattaactaggcttattttagtgtgcttaaaaatcagaattctttaaataattaatattgtatttcaaatatttggagatttgctggcttaaaccgaaaaggagcatcgctcctgattaaaatttaatcattttgcgacactccctctctatttctattattttaaaaatacttttctacatcttttatactttcaatatctaaaatatcttcaataattaaattcaatttatcactatctaaattttctattttttcattataatcactatttaaatctccaaattttttaataagtaaatttttaactcttcttatatcctttaatctagaactttctctttctttttctatgcccttttctattccttctttctccactttttctttcatctctttaatcataaatgcattattagccaccatattttccactccttctctattagcttctaatatttcaactacattttctcttatagtctcatcaacagtatttctaagccaatgctttaatatttctttttctctatttgttaatttattaaattttgatgctacagccttcaatctctcaaaaaactctaatggatctaccttttggtctaataaaaatatggctgaagtaatattattattttctattaattcctctttagtatattgatgatttatatcaataagggaatatttaaagtttactatattctcaccaaataattcatttttatttactatatctttaaaataaatcggtacattccactttcttgtagcattatataatactattggaaccactgctggaactttaaatccttttttatttttcttggtttcttctgttaagttttttgtgtattctctaagtatttcattaatatagaagaacaatcttaaaggcattctataatcaatagttgattgaaactctaaaagtgtatataaaataacttcttcatcatcaatatttgccttatatacaatatctgcttcattttcttcataatccaaaaataagaagtaccattatagatctttaaatgcatattgtcttttacgttgcctaccattacgttttctaatttaaatttgctgtagtcatcatattcatccatgagaacgtgctggcttttggcttctaattttgttgatataaactattccattcattccataaatcttcatctaatgctgctatatcaatagcattttctttatataatgctctaatttccatcaatccagaaaatgcgagtctcttccacgccacaaaattaagatgcagtgcaaataataaaatctgtcctttggaacgagctatagcatctaaaccatctactaaacataatactccatggcctgttaacagcattcttcttaattctggatgacttccaattggaatacattccgtccaactcttattagaataaaatctactttttatcgcccatagcaatctaattgatatttcgttaataacaactggaatagcttgtgccataccaaatctagcgtcataatgattttcaaatatttttactgacaaatcagccagtgatacttctgttggtttattgcttttgtcattacccggataaatcttaaaattgcctttattgcataactgaaatagttcaaaaaacggcataggtattccgctaccatacccatcaggattacttcttcttccagacgagcttcctgcaacatcagaaatcaaatgtccaagccaattagaaaaaccgcagaataattttgctacaaatgtttttccttgtaatcttgatgtttctgtatcaaatacaattagccttccattatccacaaaatgtgatgtagaagtaaattggtctacaattgcaaaaattaatcctactaaatctggagcatgccctaatgatttaatatgatgatttgacatgctcatccctagtaaatcacctgctgctttaccagttgcttgatcatagtttactttatgtttttcctctaaaaattttatagcagatgcaataatagtatttctatctccttcaggtgggctccatccctttaacttggcaatttttttaacaaactcatctgtttgatcatttgtccacttacctaatttactatgatcgggcattccaacaaaaaagctatcaattaatccagctacaactccgcaaaaggctgcaatcatataatcatacttatcacaattagcttttttcagtgtataatctgaacgtattctctcagctatttctgctttttgagcctgtgataacaaattttcaaaaggatcaacttttaagtctatattattttcaattgcaaacttattaatattagaaagatactcgtcccaacttattgtatcatcaattgcaattgtaactaattcttcaaatgctggcactttaatatctaccttttcttcctcagttagtgcaactaacttttcgccctcttcaatatgtttttcagatacttgagatgtatctataccttgcgtagagcaaagcatttctgcctgcagtagcaatttatcaagctctgataaattttcatcatttaatacttctaagtttgaaatttcctgagaagctttaactaattgcctttctgcattttccatttgatttctttgagctaatagtgattttcctgcctcattcaccatctgattatatatattatctgacataaatcctccagcattatcccattatacttttcataaagctttttgctgcgccctttactgatgctattgctgcatccccaacattaaagtagccaattccttcaaaagcatcatgtaattcttgtaatttattacatggaattgtatcatctaataccatataatctgaagtaatcccctcttcatttgttatttctttcttaagataacaagataaaattaaatcacgtatcttttccttagttgctccttctgttaattcagttacacgtgtaagatccaatttttcaggtaatttactaatgatcttttcagtttctgcatattggattctatctgaagtaacttgtgcacctttagttaacatgcttatcattgcagaaatctttttaattttaacttccgattctaatcctttttctatttctatttgtaatcttctagtaatttcattaacatcttcaattaaataattcaatgacctttgtgaatttcttataatagcctgaagcatcatttctctttgtttattattttctaaatcacttaatccagtaattctctttacacctttatatgttccaacaccaagtaatacagcaacacctattccagtaaacatacttgaaaatccaagtatgcctcccatacctagtgatgccagtcctgacgtgatgcccgcagcactaacccccattactgatcctgataaataaaccgcagctaatggaacaccaacagcagttgctttagatgctaaatccttcatagatttcgtaatttctgtgtcatttttcctttgagccaatatctcttcatcattttttattgctgtcacaatatattcaacttgttcctcgtcaatttctagatcattatgtaacttaacaataaattgattttccttccaacttagttccttattcttttttctaaaaatatagataatatcctttaataaagattttttaactacgtcataacttacttcttctacattttctgataaataagataataactcttcattgctttcgacattagtatgatcagtcatatatcctcttatttctaatcggtcatctgcatccatttcaattcttacaataagtgatataatttctgcgtattcctcagcatctatctcattatcatctgaaaaagtaaagttacaaactaattttatgtaagctttctttatacctatatccatcattgacaaagggcaagtttgagatgtactaacaaagtcactctcatcttgtgcttgttcaactattccattaattaattctgtaaaattttcatatgaaatacctctaatattatcagtaatgttcttgctttctccatttttaaaatgaaaaataacttccttcttttcttcgatttttccattatctttttttacttcagtacatatatattctgctttagaaattgtacttaactgaattttatcagtgtcagctcctaatgcatttgtatataaatattctcctgtaaataaacatccctctttagcgctgccaaatattgttgtgtctacaatagctaaaacataatctggattcaatccttgtgccataccagaaatcgcaccatttattttcttttccggtatatctggcgctataaaaaccttatctccaaggattttaacattttctttaatatacttctctactgacattattccaccctaccctttttcaaattctttttctagcatatctaaaataaaagcttaattatgatctacatctgcaactctgtaattttccttaataataattcctatattagaatttattgtaaacaaattatagcataatccactctaattctctatcatatgtaatgtttaattatttatagttatcgaaaaaagctgagattctctaaattcaagaaaatctcagcttatctaattcaatgtccaattattattatttatatatctatcaacttgctaaattctaatgctataatttttaatatatcaaaaatttaatataggcattaatttaaaaatcccacattataaatcaatggtataagtttatcttctaagtttttaaccatatctttaaattataattaatttctatatttgcaaataagagtccatctttatattctacctctataagctctaatattcttcacttcaataattatattttcattagctgtatggtacactactgtaccttcactgcaattcataagttcttttgttgcacttttattatcatctatagctttaataattgccatatcatctataattttattatttccttctaaatgcgaatctaatatttgaatcttcacaaaagtattaggatatgttcttctaacttcatccactaatccatcttcccattagtaattaactttatcaaaataaacgtattccatatttagatgattaaaacatttgctaattcatgcaattacctatttcttcaaaagttcatttgtaaatcccccctttgatacttagaatatcatagggagatgaaataaaggttcactcaattactataatcttcatttttttatttattgtaataataaaagaaccaaataaagtgcgttgatcatactttaattggttctttatgttagtttccatttcatgaatctttataataaatccctataggatttaagatattgcttttttctgggtgcaaactatcttcaaaaaacagatccacttttattcacatttccaagttccctcaaattatcccgaataatttcttttaatccttctatttttccttcttcaattttctctatatctctttccaattgtttataaattccaaattgtgcttcgtactcttttaggaattgcatatcccccacccttgcagttaataactcttagctttcttcatcctattattctagtattcttcttacttcctcttcagatatattacattcttttgctatttggcttattgtacatcccgaatttgaaagctttaaaactttttttgttaaaaggatcccttcttctcttccctcttcaattttctctctatctctttccaataaagtcataaattccacctccactgaaatatcacttttaacttccttcactcttctatgtatattcttaacaagatttcctttagcatgctttaccttatcatctgttgaatcttctacataagcaaggaattctaatagctcatcacttaaatcattcataattcctttggaatttaatattattttctgagcttcatcgtttaacattatactattatcttctaggcatacattttgaaatgtatatttatggcgacctttatcaaacaaatcaaatgtacaaataaaaataatataacttttagctagttttctataatcttcacctttacttattaggtctaagtcgatgcttccttgataatatcgtagtcttttaggtaaatttttatgctttccgcgttgcatttcaacattgtaaattgtattattttcatctttaacatagacatcaagtctaatacctttgctttcaagtaacaaatctatagttttctgttcttcaaccatttctactttttctatttcaatctctaaaatcttctctaataattccttacagatttctttatcgctcataacttttgcaaataggaaatcatcttcaaggtttaactcttttaaagttttattcatcttagtaaccttaccttatcttttatcttttgttctgattattaacaacattatagctgattaatcataagttttcaatatgtgactagctttaaaaaattatagatattttggcaataaaactagctaaaataatagaatttatctataaaaatttaataaccatcatattaaagtaattgattatctacagccttttttaaattaattataatatctgcaatccttgttgcctcttctacatagttatctttaagttccacacagttatctgaaaaatgcttaaaatcataattacgaccattattatctagaacgtattcccataaaagactacctgatcctttacgttttatttctcctaaaatatttactattgcatcattacattcattaaatactttactatgttcctttcgaaacgcttccctatttatacaataataaaatccatcttcatgcttttccataaaagcgaaataataatatagattatattcaactgcaatacatattgaaaaatttacttttttaccgccagctaatgtgtattctctaattttaaatactaaaccaggctcataacttcctttataatatgcttcagcgtcttctctgttatattcaatagggtctactttcttcttaatgaattgctcatttagctcgtccataaaattaacaagtacttcagtttttatttcatttaaactattagctatagtaatagcagccattaaatcatctgcatttttaataagatttttcatagcttcagccattttttcttcacctactaacttttcaataagatataaatattgttctatcaaactgtgaggagtcatatcttgattagttgctcctaagcaggcttttaaccaattcaatatatgctctttaaagcttacacatcttaaatatctcttatccatgccatctgcactttgttctgaaggatattttccatctaaagtcaaataatatattaaataattagaatttacaccttttgaatattcctcatatctaaatagttgtttatcttgatcacctgcatcaattttcatctcaattgctacacacatcttttcgcatttaagaaaaaagtcaattctgccattttcaaatacccattctctttcaacagcccatgaataatttaaaaaggttttagaaatgccaatttcttttaagaatagattaagatatgtatcatccattccatgattttctctaggatttaataaggcataaatcaaattagaatgtgtaaacacttcatctctctcaatatttagtgccgtaaaaatattaaagctaatattatgatatttttgagtcattttatttgcttttattaatttgcccgcctcttttattagggtttcctctctaagtaaattatctttacgcataactctttgactcccttttataaacttaattatttgtaaactaacttcaaaagttttttaatactaattccttagaatgagtactttcataacttcggacatattcttcagtttatctatggattttaatacagaatatctatattaaatacattaagaattccttccccatatttatcaaccttaatttctccaaagccctttactcccaaaagctgatcctttgttcttggcttaactttaattaattcatcaatttgttcatctttaaaaatcataaatggtttaattctttcttttttagctatctctattctaaacttctttaattgatttctcatctctaattcccatttagtattagattcatcatcaatcttcttatccgcatttgcaacatattcttcaataatctttaaaatatcatttccatacttattaatctttacttcacctagtcctttaatattaaacagctgttccgttgtttttggcttattctcaacaagattattaatcgtgctaccagaaaaaacataatgatattttaaagcattatatccttcttcttttgccttttcatttctatagagttttaatttttctgcaagctgactatcactctcgcttaattcaaccgtttcatctattttctttttacttgatttttctacatttttaatatcgttaaaatctacttcagatacttcacaaatacttttctctacaatattgatactagcttctttactaaaatcttcttctgtaattccaaactttgcttcataatctatatttataggtgtatgtttttctttaaagtaatctgctattttaaaggccatttcttctttgaaaacagttttccttaattcattttctaaattttcaatgtaattccccaatttttctgctcttattatttgattttggatttcttcaggtgcatatttttttcttattatcgcttttggattagccattataacaagagatcttaaaggtacattatcacattcaaaaacttccttaagaacttttcttattagattcacatgctttttattttgttcaatgggactaagcataccttccttattttcatatccattcttgttcttataaactcgtatgaattctccatcactatttatatttacgtctcccaaaagctgttttgtctcaataacacaaatatatttctttgttataagtagataatcgatttgagagactagcccatcatattcaattcttatatcatgtaaatatagaaaaggtaatatgcaattttttaattcgaaatcaactgttttttctccttgtaatcctcttttcatagctcgtatttctttattaactaattcctttttttcatcgttatttaactttgataataacacctctaaaacttttaaattatcattttctcctataaaatctttaattgctgttggctttgtaatacttttaaattctgaaccttctatatttaataaattcgaaataaaccccatatcatttatacccaccttctttaaataatttcagttaatattaagcttatttttattatccttatttcgataataaaaagattattatcaaaaattatagcataattactccttattctccatcatttgtaatatacttgttaaattctttgcataaaataaatctaacacaagaaataatacttggttagatttgttggattatattcacaatatagaacaaaatttaataataaaacagtttagccaaattattcttaagcttcctttatactttacttccattagtagacagtcttaatatttgaatattatatttttattttcagtatttcttctttactaagttttgaatattaactccatttaagctcacatagtttttttgatctcttaaagaagtctgtaattatctaatattttacttatgcaaaattgtatcatattggtacatatgaaaaagcagtaaatcaagtttttattaatttaccgcctaaaatcatatgctattatagaatattagtgtatattgctattattattttaaaaatcccaactcataaatgagtggcctaagtttattttcaaaacttttaatcatatcttcaaataattctagatccttcttcgtacattcattaagaagaaacttaatttgataccagccagcatcccaggtatttatattgtatttaggatgaagtttattaaattcatctctatacttaaagctttcccacactagttttcttgctgtttctaagattagctttccttcttttgaaagttcaatctcttttaattcttcatacataaagctttctttattaaatcttaagcaatcattatatatggcttcatttctattaatattagctaaatctttaatttcttttaggctcataaagaacatttcatttttaatattaaattctttattatctgtttttatatctctaaaggagctgattccattttcatttgcaaagattgaatatattatactgtcactttcatattgtttaaatttcaggttgtttgtcttcggaatcatatagttatctttttgattaagccagttagacttgattacttttcttgcagtaaataagcagcagcactttttataattttcccttgttataggagtaattttgacatgtcttgtaaccggtgcagataatatatatactccttgagtattagcatatacattattgctgtcattcataagaaaggcaattgcattttcatccaccattcttgtttttttatcaagagtcattgcagattttaaggttatagtttcaatcttattcgtgaactttttattattaatccatgaggacaatctttctgactcatctaaattatatattgccttttgaccaacgctttctatttttccgttatcacttaactccttaattaggaacttaaaattattcttttcttcacattcaccagagctccatatggagaatccaactccccattgtgatgaaacattagaaaaatagcttgcattaaatacaatacctctttcaaacttaaagttccttagaaaaagatctctaaacttttcacttctctctcctgataaaaataaggttggtgtaaagattcctatgtttaaattatctaaattaaatatttgtttaaattttaatattctataaagaaattgaatatataactgttgagatgatttcttaaagccctcttttaccatcatatacttaacttttgtatttgacataccatctttactttctttatcaccttgctttccgttacttccctccgcaaagggtggattaataaaaaataataatggcttattttcaagaaatactttgtataaagacttaggaattaaagaattgtttactttattggaggttagtaattctggattgtcatttaagaagtcatatacaaatttatgagaagttttattgtaactatctccaagttcaaggtcaattttatccaaggttgaacaatataattccttaaaataataatcccttgttaaattgccagtaccccaggcacaatcccatactacatattcctccttccaattctcaccaaagacataacagagctctctatgagcttcatttacccaaattgtaggagtaaaaaattctccattaaatcttcttttcgtatcttcagtaagcctgtccttaatagatataaatctattcttttcttccatagaatacttaaccgaatactcttcttcaaattgtttataattatatgaatctatctctatacgcctatcttttttggcaatgaatttactatttttcttttcagatatctctacttcaccaagaatagtatcaataaaacattgtactaaatctgatgcagaacatttggatggatcttttattatacgctcaataaagtagtcataagtttctaatatgttagattctgtaaccttgaattttgttttaatatcaattattaatcttttaatatctagagctacacgctcaaatttaaagcttttatcaatattaaaaattataggattaagagatttattattacttatttcaagagttaaatccttatatttattaggtgattctgaaggcgctatgctccaatctaaatttctctctaagtaattttcaacatcactagaactaataataaaacaagtagttttatcaccagctaaaattacatttggcatgtccatatattttttatcttctcttaaagtaaatttctttaaataaaaaatgacctgaactaaaactttggctctattaattggaatattaaaatccaagccatacttaaactccataataagtcttaagacttttgttacatcatcatacattagagtttcttctaaatagccatcacatttaaagggatatgttatttcagaatttttaaaatgagcttttatattatttttatagactaattcaatgtctctttcttcagtagaatctttaatttctgtatagaataattttttcatacttcctcataaaatattgattatatgatattttatgatggattgagtttcatatacctcatttataactaactataataaaaaagacttaaggatatatatttagttttataaacataagtcctaagtcttttatattttttatctatctatatataataaatagtatcatcatcattttgattgtcaggtagatttgtctcttttcccatacttatataaagagctaagtttcctgttattaatactgcactacttaatttcaatataactgaatagaatttcattaaagagttgtttgctaaaagagtatcgcaatctgttgtataatataacatatcaataatattaccgatattattatcaaaaatatttattccgttaaagtatttatatacaaatatatttaatacataatatagtacaacgtaatctaatataatatttacatagcttaatacagctataattactaatcttaatctgcctttttcatctttctttttatttttctccatttttactattaaatctggtacaaaaactaaaaagaaatgtattggcctagacacaccataaaaatatactaaaatagcaagcatgtacatttctacactagcaatccgaaaatcctcattacaaatatatgtaaatattagtgtaaaagcagctaaaatatatataacttctatattctttataaccacatataaaattttacttttacttaatatgtattcttttatttcttttaagtatttatttttaaaagaaattgaacgccaacataatacagccataataatatttatgattaaaaatgcaagtttactacctgaaaatccttctggattagcattaactatattttttaaatcagaaatcgaaaatattgtaagtataaatatagtcaatgataagtataaagccttcatcaaattacttaaattcccattatgtactttccaattaatattacttttctcatctttaagatgattgtaaactgcaaagcttggtgacaacaaatataatatccacctatatttttttataaattcttctattttttcataatacataccttttcacacctcatttcacagcggcaaattgcatctaacttttacattatttcggttaaattctggtggaacaggcttaaatcttttatccgcaatttgtaaattataatctaagcactgaaattctcttaatgatgcaacatctatttctccaataagcactgtatcattaatacctccacttatttgcaaaatgtttttttcattagtggatgctggtttaataattctattgtcccccattctagaataattcacatgagcaaaatagcaatgaacatctctagataaagactccataacattagaataataatttacatctttattatgaacacttcctataagtaaatctacatacgaacaaaatagggatctatcttttatattagctaactcaaaacaactgaatgttgaaaaatctacgcctttccatctaaacaaatcatattctttcttccaattcttttctttttgaggctctttccatccatatccttgaacccactccttttcatttggtgaataatgattttttaacctaagctttattacagcatacttatattccttatattgatcaggcaatatggtaactatataattacagcataatccattttcatatataacatgttctaaaccacatactatagcgatatcatgattttcactaaacttcgcaattacatccaaccactgcattgggatactaacttctggaaatataatcatatctgcattatttttaactgaataatttaataatttattcaaattttcaagtctactgctttcgagattaggaacctttttaaagctttttttcaaattatcttcttctacgttcatattaactatagcaatcttaaatttatcctttctattttggttcgcctcaatatagtttatattaatatccttttgaataaaaagatattcatttttattaaaatatcttagatgtgtgcattcaaataactcctttttctttcgttcttcattctcatctacatttcggaccttatcttcctcactaccactactatttccttcttccatctgtattggcatattaattgcgtttaaaaattttgattcaatatccttaaattcttcactaaaattattaattaccttaaataactctattccttttttaatctccatttcaccactaactatttttcctcttgccattaattgattaatataaaataaaatacattcgtgcagatgcacatatctaggattgaaattcttatgaaaatcagttatctcaacaagacattcatcatcattttttctactattttgattatcatctctggtttttttaatatccttattttctttcttaaatttcttattaatacatttcttacatatttcatagtctgcatcgtccatacacttaatattatttatacaagcaaaacattcataataattattatttattttaaaacatctcatatctgactttatatctggcaacattccaacattagtaatataattaattggaacatccttatcgtattttctataacaataattcatcaatggttgatgcactattgaatgattgaacatatttgatctcctaaattcttcttttaatgtaaaaattccctttatattagtacgcttgggatttatcccttttccaatcaaatcttttattaattcattatatatttttgaatcttctgctgaaaatccacctttattactgtcaccttcttgtccacatttaagagattctaaaaaaagttcatcattaatagaatatgtcatagataaaactatttttagatattctcttaaatcccttctaattagattttttatctctctacgagtctttaatttattcaaattatatttatgttgctttacttctaaattttctattgacaaatatatactagaaaatatatctttaacatatttatattttttattcaatagatagtatatgaagactttgttccataagaaatagaattcaatagctattggattcttaaatatccataaaattttttcatcaacatcttttgtatcttcagagttttctagtttatctgagtaaattatactagctaaaaatttcgaaatctcgtatctacttatttttgccctttccatattagataatttacttaaattatctttataagaaattttataaacatttctatcaaaactatcaatcaactgatttttctcaggtaaaaatttaaaagcacttgcattttctaataattcctttttaaaattatctattattgctttagatccatttcctttaaaatcatataccctaattttttcatcttgtatacatactttagcacccgaatcattcttatcatctttatttaataaacttgatattaaaaatattttcttaaaatctgaattatctaattttacattatctattccttcttttgagaacctagttactacttctttattttcacaaatttctcttaatattttacgcatctgttcatcagttttccaatccgaataaactatataatcatatttattttcaatttgctttattaaatcttttttacttgaatcatattttcttaaaattttaataacttcatttaaaaaacttttctttaaatgaatgttttctcttttaacttttttgataaattttaatatatcctcttgggtatttaattcataaatgttctcaatatcctgttctttattatcttccttacctatcattaaagctggcctaaacaatccatttttacagaacagtttatttaataaatagccttccaactggttattctttacgtcttcataatcaataaaatccccattaaaaaccaatattatatcatcaatatatctcttataatataacggatttatttttttaataacttctgtatcaaaatctttcaaataccaattacataaaataggactcggtaaaaacccaattggtaataagtttcttttatcctttgaaatttcgctcgaatacttttctataactttctctatgaaattattaattttttcatatgctttccttctagtatagcttgcgttctttttcttgataatcgccttgatttcatcattaaacttatttttaaaatcaatattagttgaatagaagtattctttaacatctaatgacatcataatagttctcttcttatcatccattcttttttcaaccaaatttacagcatcatctctccatttactatattgagtataataaggcttaaataagtttaaattatcccttaaaatattatcttctaattcatttcctgctgtatttttatcataagtcttttcaatatcttttcctaatagcattatccataaaacacctataatttgtgcttcaatacatatatctaagtaatacattactttatcaataaaataatcattttcattgatactgttggatatgattgcatcatcgtcatgttgtatactcttcggtaatattctaatcatgaaattcttctcaggcccattattttctattaactcttctatattcccactttctataatgaattctaattcctcgaattttttgtctaactcatactcatatttcttttcaaaatctacaattctctttttcaaaaaaacatttctattttcataataagaaaaagattttaattttttatatgctcttctaattaaatcttttaaattatcatctttgcccttcatatagtagtcccttctaaaatacacaatttctaaacattatatacattatagcatttttttataaaaatttcatatttaatacatttcttcgttatataaaaacactgggtcttattaaaaatattcatttcgtaataattaacatacaaatatcaaaaatggagactttttgattataataagacctccacttttaaattcgcattgtcaattttaatattaattttcagtatctcttccttactaagttttatcatttaattaccttctctattttattccaataaagtcacctaaataacgctatttccatttatccattaataatttaatcatacctctatctctcgaaatacatcttacttcttgtcgtgaattgctcctctgaccttttttactcagccaattatgagaacctatgattaaatattcattatcataatactgaaagctctttcatcgaaagactgaatatattagagcttatacttaatccttttcgaaacataagatactatttatatacttacttgtagtcattccacatagaaaatacaagagaaagatttgcttcattaagattcagatgatatatttcttctttagtagttgtagtaatatctgtattaaaaacaacaatccatgtatattttgtccattatcaggtttcacataaagcttttactgctaaatgtaaaatatcaataacgttttttattgcatcattcaatatgtaatttaataattgatgcattgaactttctttcatgaaggaacgacgctgcgaaatatgtcttccagatgtaaaattgtaaatgttaatatgaaagtgcataaaagttccaacatggaaatgtaggaatttatgcactttttatgtatagttttttcaatatataattgtatggaatttctaaatgaagtttacacatactctcttacactctaaaggccaatgacttaacagcagaaaaatatttagtctatttgtttgaaatccttgcaaatgcaagagccaaggaaagtgatttcttaaaaaatgtatgctatgatctaagaatattccaattaaaatatatattaagtctaccaaataattatttctatataaagttgttccaacagagaataagttttctgccgagtttattttatcacttaatttgtacttctaatacgcatcgattccttgacgcttacaaagtctttaacccttacgttgttcgaaaacagaagtgaaaatgaccaagaaaacttattttcttggtcatttcaaacaatctttattaatattactctgtttagttaagtataaactattttatgttaatcatatttttcttttgcttcagcaataaattctggcaatttctttgttaaagtcatcatatgccttaatttgttgcctgctgatttatctgctgccttatcataatccacactttttgttaattcatcaatatatggtattggtccagcttgtcccaccgaaaatgcattcacagatttgaaaagccagtctctgtcaattccccattcgtctgccaattcattaatgtttgcttttaattttttctgtttccaaatatcaaaagcttcatcaaaatttaaattataagacaagtttccaggtactaattgagtatctacaaattcctttagcaaatgtgctttattatcctcacccatatcactcagttcttgaatttgctcataaattatacgtaatttttccccatctaccgtttgaataccatctacattactcactttcgagccaattaatccaagtatatgagccgcatcaattacttgtgttcctgcgagctttgtttttccaacaagaggtttaataataattggtacaggatcacctggtccatcatttctcattaaatttctatatgcacctacatattttaaccaagtatgctcttcaataccaaaggtactatcatcccatttatattcataatattgctccactaaatttaactgttcagctgcatctttaaaagtaagaataaacttgtctttcttttccttatcatcttttatctcttgccactgcgaaggatctggtaatgaattaatcatttcaaaagcatttatactgaattttttgactgctacagtatatgtatcaacgattgctttactactacttccaccactaccatataattttaacgcaatatctactgtttcttttgtcatccttggatactgaaaattaacaattgttccaaactctttatttttaccaaatacacggtttgtcctagaatatgcttggattaatccttgcagttctagtgatctatcaacatacaatgtattcaatcgtttagaatcatatcctgtgagcaattgatctgccacaatcaccaggtctatattctttttattacgtccgcttccaccacgagttgcacgtgccactacgtcttcaaaatatgcattctctccatgttttttatcgcctgcaataaattcaatacctgtaaattcagagtaatccttaaacattcctttaataattgctggagaaatattatcaggatcattttcattaccaaaactaaatgtcatagcgatatttagtttttctccacgctcatttaattgcttcttaaattcatcgtaaaatgcaattactctgcttttgtacgcaactgttaagatagcattaaattctcttccctgagattgagtatcccagttatttaatatttcttcaacaactcttggaatatgtgtttcatcttgatatattaaaatattactttttttagcctccatttcaacttctgtttcagaccattcttgtactttacgttcaatatctctatctgcaagttctgggtactcttctttgattttttctactaactgctctcttaaatcatcgtagcttttgaattcaccagtatttatataatctacatgaaaccctagaacatttccatccgaaatagcttcatcaattgtatactcatgaagttgtggtccaaatagcttttctgtagtgtttattacttcacttttctcatttattttccctttaatattattttcatcaaataaaggtgttcctgtaaaaccgtaaaaaagaccattctttctaaaataatttttaattgaacccatcatttgtcccattgttgttctatgggcttcatctacaataaatacaatttttttatcttctaaagtagtgtccttagcttcttctaactccttaacgacttcattaagcttaaaggtagtagtaactataataccttgattgtgtgatttaagtttattttttaattgataggtgaattttgtatcatcaaccgttactggctcataagctgcatatgccttaaaattatcactagtagtcctatccaattctcgtctatcaactaaaaatactaccttatcaaatcctgcacgtgtagataaaaacaatgctgtcttaaaactagtaattgtttttccagaaccagttgtatgccaaacaaatcctccatgtggtatacgttcatcattatcccatccaaaagcagcaccttctactgcttgcaatgcataaacctgatatggacgcatgagcatgtgtttcctgttttcttcttctttatcctcatcaatgactaaataatctccaaccatttgatgtgccataggtatcattaaaaaatgttcaattactttctgccaattatttattggcttattttttttatctgaccaatgaaaaacaaatgcaggattgaagtcactgatagattttggtgttgcaaaataacaagtttctatctccgtagttattaccatcatctgtgaaaatgccatgaagttattacagtattcaccgtcattataataccttttaaactgtccatatgcttcatctaacgacttatcagtacgtttttgttcaacattaattagaggtaagccattaattagtaaaactatatcaaatcgattatcattaggagttactacctcccttgcaatgcggtaacttgagtctccaccccttacctcagctttttttaatatggttaaagtaatctgtttccttgttatattgggattatcatcacgataaatcccatcaatttttcctttagattcttcaattgataatattttagcagcttcataactattgcctatttggcttaccttagccattacctgtttaaattcattatccgttaactcaacaccttcaagttgatccgcatttatacgattaagctcacttctccaatgattaattaaatcagataccgttactttcttcttacttccgtttaagtaatcaggagcctcccatttgtattttcccagttctttcacaaaattctcctgaaaagccctttcagaaacattcttaggtgtattactcataaattacactcccctctaaatcaagttcaactaaggtcgtgccactgttatcacacacttaaagaagtggaggtgttacagtggctagacatcagataaacatttcatttaagtatgctttttttatattttgtagtttttcaagcttatgctgatggaggttgataaggttgtcgacacttttgaaaaatgtacctattttagtctgttcttcacttgacgaaggcatacatgatatataactacttatttcatttaatgatatatgtttaatagttccaccatgagatatcaatgccatctttttgaaaaactctccagtattgagaaactggtacacaaattctggatctgattttgcagttaatctcccaactcgttgagcaagaatttgcttttgttctaccacctttgctgtccttccgaccgttccatccatggtaacaagaatgtcatctggatttaacacatattcgctgagtgcagcattattaaaatttaccctgcttccaagtgagctatcaacaattggcgaatcattttgaatatttccattagttattactaaatactctcccttatcatcaaaatcattgctgtcaaaaggatatccagttctgactatagcaacctcacccaacttacgctgttcccaatcgtctgtaaaacctgaaaatcttagttttggcttacgctctccttcagcaggaaacatatccgtaagatatgctttttttaatgcttttatcttttctaacttacgctgatgtagcgtgataaggttatcgaggcggtgaaaaaagattccaatctgtgcttgttcctctttatccgtcgggtattttatagttgtttttaccaagttacctctgcttaatgacagcacttttattccctgcataagaggtaacaattgcttatgatatgaatcagaattcatataatatccaaggtaataaggtgccattttaacaatgggtctacatactatcgtatgcaatccagctacaactgcaatatcctgaagattggttatttcagtggcttttcccgttgtttcatcttctgctgtatccgcaataatgatatctccattttgaagtaattgaaccttgtaatcagcaactttcccttcagtaatataagggatttcatcacttacaacgtctgtataagcaccatactttattaacacatcaccataatgaatgctcttaacttcgccctcgtcataattcaattctgctctggacaaagtgttattacttacagaaaaatcaaatacttcttccaacttacgctgtttccaacctccatcattttcgaactctttaaatcgtctttttggtacgttcttcttgttttcgctcattatttcaccaccaattcgttcttaagtgtttcaaattcacgcatcaggctttctatttccatatctatactatccagtgtatttgcataacgttcctgtagcatttgtaatgtgtttaattcggctttcaatggaatttgcactaagcctaccattttgaaggcagtacttccaaaccattttttatacattagcttatctatttcctcatctgttaatactaaaatacgttcctcaactgcatctttaagttctttttcctctgttttaatatctttagtaagggaagattttttatttattaatgtttcaaccttttttagtaactcatattcttctgaacctttttcagctttctttaactcttcctttaataatttattgtcaaaagcatcacctggttcatcgtcttcgttcttttttaaagcatcatataaagcattattttctacactatcttcaacttttgctgcttcaatcaaatcagctaattctgtttctatatcttgaatagcatctcttttattttcaattgcttctaattctgcatgataaagttcctgtgcaatcaaatcattaggaataatacttccaatccatccatcttgttcttctcgtttattactacctgaccctttagttatcatcttaggttcacgactgcggcctatctcataaaatccaccatttgcaataagctctgtatcatgcgttaatgcttctttccaaatttccgcaataatctgatatccaccatatatatcaatatattgatagtcaggtaagatcttcttgattctatcaagcatttcttccataagatttctaagatcagtagaactatcaacatttcgtaaaacatcccaatattgctttatataatcctctgtttttgtcttgatttcatcagacatagtagtgattctagcatcatttagaatctcacttgttaattcacatactggctttgtaagatttatatatccaggacgaattgtttgcaaatagctattcaaaacatctggaacaagtgcttgtaaaacttttaaatcctcaatatttttttgtggaattccacctagcaaatgagcatccacatcttggctaatttctgtatcgatagcttcaacgtaacgaggaatattcatattatattcattatttttgatttcttcacgtgtagcaagatgactatatcctggtatctctgccttttccatgtacacatctactattttagcaatgtctttttcctgaagtacattttgctttcctaccttaataaagctatttgatgcatcaataataagtactggagcatcaattttacgattcttttttaatattataattacaactggaattcctgtatttgtaaacagattacttggtaaaccgataattgtatcaatataattcttatctaataatctcttacgaatttctccctctgaagaaccacggaataaaaccccatgtggtaatacaatcgccatagttccattagttcccaaatgatataatccatgtagtaaaaatgcaaaatcaccttttgaatctggtggtaaagtgcctgctacctcaaaacgaggatcacttacttttaatcccgctttattccaattctttgctgaataaggcggattcataacaactgcattaaattgaactccttcattaggatttttcggatcctctggccaatcgtttgaaagagtatcaccattcttgattgtcattttttctggacgcactccatgaagaagaagattcatacgagttaaattataagttgctgtattcttttcttgaccatagtaagacagatctctttgaacatccttatccaaatgctttttaacagtcaaaagtaacgaaccagaaccaactgttggatcgtagattgacttaatttctgaggattttgcaactatctgcgccataacttcacttacttgatgtggtgtatagaattctcctgccttctttccagattccattgcaaactggccaattaaatactcatacgcatctccaagaacatcacctttttgcaattttaccatattaaggtcagcaaatagtaatatcagtgctttaatatttttacttcgttcatttaaattgctgcctaaagcagtgtctgtcaaatcaagagtcgaactagagaataatcccttaaagtcacttgaatctcctgatacagctattgttctttcaaaattattaagactatctgtaaccttttgaacttcaaactcccccgaattaatatccttaagccatgtttgataaagatattctggagatacataataccccaacacaccttgaatcattttttcaagttcatctccgtactcagtcttagctttaatatattcttcaactaactcattttctgataatttatctactcctgcagttactttaaaagtttccaaagttttatcacttaaaaacttataaaacattaacccaagcatataatccttataacggcttgcatccattgaccctcttaattcatttgctccatcccataatcttctttttatctcttctgatgtaatcattcttttgtctccatttcttgttttctatctaaagtctcaagttttaaataaatagtaagaattatttcactcacttcaattaattatataaaactagcttcaattcttttaattcgcctgaaatcattatatctcatccaatatatttttatatatttaattgtactatataaaatattttttatctataattcttatggtgttcgtttttataaacactaaataacacaattcacattatctataatcatttttataagattttctgaataatataaagtattttttcatgaaagttaatatttctaagctctacctagaacaatatttataaaaaactcaagtactttttaacatttctttactaatagcaagtccccttttattattaaactttaaatgaaatatataagcattactttccttatttttatgatctagttatttttctttataaaatttccttgctaattcaacttctcgtatgactaactttatcctctattgatttttaatttatagatttgttttatcaagctaaaaatatactccaattcctcatcatcagacatttgaatctcataatccccgttgccccaatgaccagttttagacatatcttttgcaaggtgttttgaatcatctatagttccccacttagtgtttaaccaaatctttaatgctctcttttgcaaatggatatctatcataattttattgttataaacaaatccaatctctaattttttagcttttatagtgatgttgtcatttaatgaagttatatattctttaatcctattatataaatcaattatttcttcagaagaatttttaaaatgatcttcttctgtatatacaatcacttcatcaattacatttctagtttgagtatttgtatttgctttgtttattgtttttattgattcagatgttttagatggcttaatattattaaaataaactgtattatttgaaaatttcttaacttcccacagttcaaaaggtaaatctttaaagttgattgactccttttgataattattaaatgatggtgatacgaatataactcttgattgtgaccaatcaatatcatctctctttaaagtcgtattacaattttcattgtattcaagtataaactcagccttattatttaataatagagataaataagcataaccttgatctatcacactaaagctacttgtatttttatactcaattattacaaaagccttgctactctcatcaaaagctaaagtatctaacctaaaattattaaaagcaaattctcttttaataaactttaatccaaatatattttcaaggttactttcacataacttatgtaattctatttcttttttaaaaggtatttcttttatttcgtttagcttgtcttcatttattttgtataaaaacatttattttctcctaaacctctaatattattttttaaatatacttccaaatctaaattctttaatgcctcttaatcttcttaccttgtgcaaaatatcaccttttgctttaattgcaacaccttcttgacttgccttatactcattcccttcagtatcttctaatataatttctatattgaacaaactagagcaatctccatattcatccattcctaatcgcacacaatcttcggaaccaaaactcaaaaataaatcatctaagaattgatcctttcgatctaactctaatttaaaatctaagtttctgccaatatttttatgtcctacaacttcattccggcatactacttttccctcatcgtcttttattaagatatatcctcctagaagaattattttcgagttgcctttatttattaaatttattttaagtggagcatctacatatggaccaaaagaatttggatttttaatagttcgaacaactattatataatctttaattgatattttaatatcttttctttcgttataaaaaatatcataatctctccttagtgctattgaattagttgagttttttctgatataacattcaccttgtctaatatttctcccttttgtatattgttttttggctatatacggtctatctctattatcttttgagattttataataccctaaaattttgtctttatatgagactattctgtattcaaattttattttaggttcaatattatcgttaacaagctgctgaaattctgcctgttctttttcattctcaattccccttatctctttttctccattaatcttatctttcacacctataattatatatttatcatcctcatacattgaatttgccattgacatgatatctatcaaaaactcccctttatcaatataatcttttgctttaaagtctagatactcgccctcatgtccattttcaattaaattaattatatctctcactatcaatcacctaacatataaatttttccaaaactccaaacccttgatttaccgccactccataaactggcccaatctcttgtttcattcttctaacgaattcctcttccttattttcttttttaaacttcttaagattattaaccttaagtacttgtacatattcttctatttgattttttctgttttcatcaactacaaaacagaaggcttcgtattgcatttcacaaaacttatcaatataagtatcatattggagtaaattatcactttttttactattgatattcttaaaagttggtactaaattccacatttgatcatgaaggacaaagctccaaggtataaagtgatctatgcttaaaacaccataatcattataatttgtttctgtgaaatctaaacctgtatacaagtcagttatatgcctttgttctataacttgcttccatatctttgtctgctctctcaagtctctatttttaggagcttctaatttcattgctatacctggtacatttggattgcgcttttgcaggaagcatactaatctataatacgcccagccttgaataattctgtagttaaactttaagtaattacaccaattgtctttaatcctaatgcaattttcatccttattatttttataaatttcataaatgctttcattatcttctttggatagttcttctatgagcttttgaacttttttctgacctctaagtttattctcaaaaaatggtgataaaaatctatacggtacatttaaagttaattctttaagcattttatttaatgttttatcttgtgatgaatatataaagttaaaaagcttacgttcatcataattgctttccaagttatatgtatctgaaatgtaattagctacttttgctaaattatcacataatccaaaacttaacttatatttcaaaagaggataccaagcctttacgaccattttacatattaatgttctaaattctatttcaaaattacccaaagaaatttcatctaataaagccagcagccaatacatcttataacttgccacaacattatcatctctaagtgccctagagaatgtggcataatcaacttcattactataagggacttcacatatttcttttggtaatattatatcttttcttgtgtatatatcattcataaaactctccacctaacacctagtgatatacattataactatattttaacataaaataagagcttattttacataaactctcataaaagaactattttatatgcgtagcctaatcccaactttcaaaatctaatcattttcaatatacacatcacatttttcatctcttgcccttcttaataatgctaaaattaaagcttgcacttcctctatttctttgatcaagcactcatcaatactcttataatctgttttagttaaatttctgctatcaaaaagtgaaaattcttcaatcgcttgatctatgttatggattttgcatttatcagaataagtatcgcaccagcccacacacatattccactctaacactattccagcatcatacaaaatatctcttttattaatctctgctgcaattattgcttgcatcataggttcaaaatatccattccaaatgcttaattcatatatttcttggtctttgaagtgaaaatacaatataactccaggttcaccatcatatccatcataatatttagtattaatcatttcttctctccttaactattaatataaaataaattcactctctagtgcagattacgtttaatgtagaaaaataccgtaaattcatttctaaatttacggcattacaaagatttaaaattaaatatcgatgatggtttcaaagaatttaccatgtaatccatccataggttttataataatgtggtttagattgtactaagcttcattatataattatgcttttaccttataaattcataaaccaaaagtttaactcctatcaaatagaatatgaccacttttatacaatttaagaatacaccgccaagtatttaaattatctaacagatctaagcacaatcactttcttaaatcccctatgttcctatctcttcttatcaccagcacaagttcctcttatctataactaagctatcagcaaatccatacaaaacttctatcatattatattatgatactctctttataggaatccacaattcacaaaataaacctgtctccccttcctcaggataaatttcatagtcagtgtcttctgtctgttcatagtcagactgtggtaagaattctttaaaaaatctactccacatttcactgatacaattaccattattaccatagcatttaaaaactacataggttgccgagtcaacttcccatatacggtaaccttttttaagcattgcttcttcattatctatatgagtatcttcatcaataagtactccaattccataatcaaaagttatttcattcttcttggtagggctgcatagaccatataaatcttttttaccaactggcctcatattcataatttcttctactaaatgttctttatgacattcaccccaaaagtcagtaatatcatgattgccagcctcattcataatttcattactaaatgctcgtacctttgcaataaatctttgtttgcctgtttcttcaatcctataattcatagtgtttccgccttccaatataattttaatggccaaagggttaaagagacagagttgagttccttttcttttagctaactttggtgatacgccatgaaaccgataaaaagcctttgtaaaactttctggtgtttcgtaaccatacttaaaggcaacgtcaataattttactgtcagttagctgtaattcttgtcctgctagtgataactttctattacgaatgtactcatttgctgtcattccagccattaaactgaatattctatgaaagttgtaacatgacatatgcacctcttttgctacattttcgtaattgatcttctctagaagatgactctccatataatcaattgcgctttgtaatgactttccaaaactcatctatcctttcccctttcactatgtattataaaattccttgtaagaatattcctgtcctagtttgcagtattttgtcctgtatgctttttaattgctcgtacctgcattgattaatattttaactctgaaggaagcaaaagctaaaggaatgcaccaatctaaatcaaaagttgatagttagtcgtttcgatattatttaagttctacatattttaaagtaaacaaaaatagtttttttaatatacaaaactaatataaacaaatagcttgctacgataagataaaaatatcatagtaatctattttctttataaaatgcaagctcataatctattctttgttataaataattaattaaatcctcataatcaatatcaggtttcctcttgttaagtggatcgctgcaaaacaagaaacatgtataaaattcatcttcgctcttaaaaataaaataactttccatttcgtatatcctctcacaaatgcatatctatttgcataataacttctaaaactttatctaatcaattttaattcttcaagagccattcttcttataatctttactttaccatcaccatctcccaaaaattcagtttctaaatcatctgctaaagatggttcacctttatcaaaaattatattccaatattcactgctatcatcaccataatatgtcccatctgtaattgttttgcactgtaataaaattgataatttgtatgcaatatatacatctactctagtttgatcatcaaagtcttttcttgaagtttttccttctgtcaaaagctaaatgccaaaacaatctcctcatcttttcctattaccggctccccttcagtaatcttcatcagatcatcattttctacttcatcaacaatactaatttcattaatcttctcttttttcttaggcttacttttattttttactgctttcttctctaaggtagttactatctcattaggtaaattctctttgcttttgtatttttccatatttaatttctgagtggcttcattatctgcttctgttacattcttattacagctgtttaaaggtacacttgtacttgtttccatacagcttttattatcagcattagttacatttttatttgcaatattatcttttatatcaattactttattatccttatgtttattctcactctccacattgatattctctatacagctgctgcttagctgtttcttatcgttaatttcaacttcttctgctttatgtttattttgaactttttcttttgttttaatattttgatgctttacaaagttttttactttatatattttatcttgagtaaattcaaccatttctaagtctataaaagtttttatagctaattctatttcagatacttctctattgaactctatagccaaagtctctagagtatatggtatatttctagataaaaataattctccttctaaattgaccttacctgcaagaaccacaagcctagtccaaacataatttataagatctcttttttccattctatctattattttaaactttgtatcctcatacatattcacattaaatttaacacattttctttctctcatttttaacacgctcctatataaataatttatctatataggat

SEQ ID NO: 69 - DNA, 33494 bp, Clostridium beijerinckii
tggaacaactgaaaatgctgtctataatcaacttttcatatcattgatagcttatgttttgcttcaatttacttatgttgaaacgactaaaaatttaaaatatgttaaattatcactaattcaatttataagaaaattgcttaaaaaaagtcttaaggtcgaagtctatatatatattaacttatttttgaaaaatatcaaaaataagttaataatttaaagtgaaaatttggttaatcaacacttgtgggaaattatattgttggataatctgtggataacttataagaaaggctgatttagaaggctggcttttaaaagagaataaaaaagaaaatatattcgcctgcataaaatgttcttatatgcagcatagctgccatttcttatgtgcagatttttctcacatgcgttcgaaaaggcagatgcgtaaaaaaatctccggctccacagtcgcctgcgattttgttctttcaattgtttaaatatgttttaacaatatgaattgttgacttaactaagggtttaatgtaatataacaaagataagaatgttataataaggggtgaaaaaatgaaaaatattataacaaaagtaacctctaatggaattgcagaggaagtcgggatagaagaaaatgatatcttagtatctataaacaataaggaaataaatgatatcatagattataaatttttatctgcagatgaagagattgttttagagatagaaaaacctagtggtgaaatatgggaaattgaaattgaaaaagagtatggtgaagacataggaatagaatttggtggaggcatcatggataaggcaaaatcatgcagtaataaatgtatattttgttttattgatcagctgcctaagggaatgagagaaacattatactttaaagatgatgattcaagattgtcatttttacaaggaaatttcgtgacattaacaaatatgaaagatgaggacattgataggataataaaatatcatataagtccaattaatatttctgtacatacaactaatccagatctaagggttgaaatgctaaataacagatttgcaggcaatgttcttgaaagaatgcaaaggctagcggatgcaggtattacaatgaatgcacaaatagtttgtgttccaggaataaataatggaaatgaacttaaaagaacaattgaagatttatataaactttatccagaagtttcagatgtagcagtagttcccataggtatcacaaagtttaggcaaggacttaagcatgttaatacgtatacaaaggaacaatctattgaggaaatcaataatattaaagaattgcaagatacatatattaaagaaactggtaagccatttgtgagattatctgatgaattttatttagtcgcagataaagaaattccaaatcaggaattttatgatgattatcatcaaatagaagatggtataggaatggttaggtgttttagagatgccatagatagcactttagatgacttggatttaaatatgaagggaagcttttctatagttacaggagagctggcgtataatgaattgcttgaagccagcaataaaattaaatgtaaaaatcctaagatacagcttgatgtctacaaaatagtgaatcattattttggagaaactattactatagcaggacttttaactggaactgatataataaatcagatgaagggaataataaatagtaagtatttaataatgtctaataacatgtttagaaaaggctacgaattatctgattctaatgagcagataatgctggatgatattaaaattaaagatattgaatcagctttagatgtcaaggtaatagtagttgactacacaggtgaagatttaatagaaaaacttaatgaggcatatgaagaaaaatagactagcatgctggcttgttatttttgaatatgtctaaatataaagaggaggaattttaatgggtaaaccgatagttgctatagttggaagaccgaatgttggaaaatcaacgttatttaataaattagcagggaaaagaatttcaatagttcaagatacaccaggggttacaagggatagggtgtatgcagaggctgaatggctgagatataattttactatgatagatacaggtggtattgaaccagagaataatgatattattataaaacaaatgagaagacaagcaaatattgcaattgagacagctgacgtaataatatttatagttgatggtaaagaaggattaactgctgcagataatgaagtggctactatgcttagaaagagcaaaaaaccagtagttttagttgttaataaagttgacaatttaaaagatgaaaataatgcgtatgaattttataatttaggaataggcgatcctatggcaatatcagcagggcaaggattaggacttggtgatatgcttgatgaggtagttaagcattttgataaatctatttatgatgaagaagaggatgaatatatcagaatagctatgattggtaaacctaatgtaggaaagtcttctttaattaataaattacttggagaagaaagagtaatagtttctgatattccaggaactacaagagattcaatagatagtcatttagaaacagaggaaggtaaatttattttagttgatacggctggtcttagaagaaagagcaaggtaaaagaagaaattgagagatatagtgttataagaacttacgctgcaatagaaagagcggacgtgtgtatacttatgattgatgcaacagaaggaattacagaacaagatgaaaaaataataggttatgctcatgaattgagaaaggctattatggttattgttaataagtgggatttggttgaaaaagatgataaaactttagataaatttaaaaaggatcttcaatcaaatttaaagttcttaagttatgctgaatacttattcatctctgcactaacaggacaaagaactaataaagtgcttaagttagcaagatattgctatgataattacaataagagaatttcaacaggtatattaaatgatgttataagtaaagctgtactaatgaaggaaccacctatcgttggaattaagagaatgaaaatctactatgcaactcaagttgcaactaaaccgcctaaatttgtgttcttcataaatgatgaaagtgcaagacacttctcatatgaaaggtatttggaaaatcaattaagagatagttttgatttcaaaggaactggaatacaaattgaatacagacaaagaaaggaatagttatgagtaaaattacttttttaggaggaggaagctttggaagtgccttagctgttttacttgcagaaaaaaataatgttgttaatatatacgatagagataagaatgttgttaatgaaataaacattaagagaacaaacgaaaagtatatgaaagattttgcaattcctaaaggagtaactgcatttaatagtattgaagaagcaatagatggtgctgattatatagttttatcagtaccttcccatgtaattagaagtatgtgtatagctattaaagggaaaattcctaaagatattccaataatatctattgcaaaaggtattgaggaagatacagataaaagattatcagttgtaattgaggaagaattagataatccagttgtagttttatcaggaccaagccatgcggaagaagttgtaatgaagataccaactacaatagttagtacatctaaagaaatgaaatttgcaactgatattcaagatttatttatgacaccatattttagagtctatactaatgacgatataataggggtagaagttggtggcgctgtaaagaatgtaattgcgttagctgcaggagttatagatggccttgggtatggagacaatacaaaagctgcacttttaactagggggatgaaggaaatctctagagttgggatagcacttggtggaagagcggaaactttttacggattaaccggtatgggagatttaatagttacttgtacatctatgcattctagaaatagaagggctggtttacttataggtaaaggtatgtctcttgaagatgctttaaaagaagttggaatggttgttgaaggagtaaaagcttgcagagcattttatcaactgaaggaaagaataggtatatcaatgcctataacagatgggctctataaaggattatttgaaggaaagaatgctaagtctattattgatgaactcatgaacagagacaaaaagagtgaattattttaatatttttagtattgtaatatgagtatactttagggatttatatttaagttatttgtaccagctatataaaaaagattgattttttatatagctggttttgtattttcaaatattagtaaattgtagtctaattaaattcctcaataggttgtgtgaaaagttcttaggctactatttttttattctttttcaattatgcctaatgttaatgtttaattttaaagataggaattttaataatattttaatcatatatttagtgattagaattgtgttaaaattttttatttattatatttgtatattttaaataaagcatgaatatatatatattggaaaaaagaatatgggagggaaaaatgtggacaattttaacatatacaaagatatagccgatagaacccaaggggacatatatgtaggagtcgtaggaccagttaggacagggaaatctacatttatcaaaaagttcatggatcttatggtaatacctaaaattgataatacttataaaaaggaaagagcaaaagatgagttaccacagagtggctcaggaaaaaatattcacacaacagaacctaaatttgtacctaatgaagcagtagaaataaatttaggggatgaaataaaatttaaagtaaggatggttgactgcgtaggatatattgtaaaaggagcattaggatatctagatggtgaagaaactaaaatggttcatacaccatggtatgattacgaaataccttttgaggatgcagcagaaattgggacaagaaaagttataaaagaccattcaacaataggattagtaattacaactgatggaagtataactggaatagatagaaatgactatgtagaaccagaagaaagagtaatatatgaattacagtcactaaataaaccttttattgtagttcttaatactaataagcctaattctcaagaaactaaggcattgaaaaaagaattagaagataaatataatgtaactgttcaagttatggatgtttataatatggaagaacaagatattgaagatttatttaaacacgtacttaaggaattccctgtaaaagaaataaatattgatatgcccgaatggttagaaaaattggaatgtaaccattggctaaaaaaagattttttcaacataattatgaacatgagtcaagatgtctctaaggtaagagacataaaatactgcttaaatgattttgaaaatgaagactttatgggaaaagcaaccataaatgaagttgatttaggcagtggaacagcaaaaatatctatgaaacctaaggatggaattttctataaggttcttagtgagatatgtaatttagaagttggttcagaaagtgacttactcagcataataaatgacctaagtcatgcaaaatgtgaatatgataaggttaaagatgcattagaagatgtaagagagagtggctatggattagttgcaccacaactttcagaaatgaagtttgaggaacctgaaatagttaaacaaggtaataaatatggagttaaattaaaggcaagtgctccaagcttacatcttataaagtgcgatattaaaactgagataagccctataatgggatcagaaaaggaatcggaagaactagtaaaaggtcttctagaacaatttgaaacagatccagcccttctttggcaaagtaatatgtttggaaaatctttagaagtgttagtaaaagaaggattacaaaacaagctatataaaatgccagaagatgttcaagttaagattcaaaaaactttgcagaaaattattaatgaaggtaatggtggattaatctgtataatactttaaaaaatctgatataaagatttttataatttaatcctaacaaagtgttgattttatattgtagttaagtaaattagttatattagtgatactacatattaggcataatcaagagaataacgagtgcatatgccgagcctattttcaagtacatggggaggctcgactcgctgcaatccatgagcaagtgattcacacttaaccatagattttggttctcggttcacggaggcggagaaccaaaataggctagatataagagaaatctgcttccatgcctaatgaaaataatcatggtatcttgggctcgtttttctcgtatatgccttatgtattgtaaagtaataaaatcaacactttttttaccatgattttttatttaagtggtggaaaaatacatactactgggatataataaaagaaaggatataaatgaggggtattatgaaaagagagtataaagcttataagaaagttggtaaaattaaaatctctataagtgagctcttagagcttgatttacctagaatagtttatgcctctccaggtgttgtaagccatataaaaaaaagacatggtaggcaattcacaaaaaaaatcaaggataatataatagatactatagaaaaagtgattaaagatccacaatatgttggtgtaaattataagagatcagttggtgactctcttgaattagttaagaagattgataatattatcttacttttagggttggaagttgatttagaagagcaatatatatatgtcgcaactatgtatccaataacattatcaaaaatgaatgctagaatatataggggaagattaataaaagttgaagatagtgaattaaaagaaaatatattataattaattttgaaataaattttgttttttgaggtgagaaaaggctcctcacgcgctagtcttagtaatcagagatgcaggatacgccgacctgccaaaaaataaattatattagagagattacttaacaatggtttaataaatagttgttaagtaatcttttgctatttaaatagataaaacaactataatctatacttatgggtatagttcaccgaaatgaataatatacttttgttccagtttctaggcagcaggttgtatccactttagcatgctccaactttccgagggaagctcgactcattacattcgctgaggaagttcgagaacccaaaataaaattttggactctcacttcacaagctaaaatggaacaaccaatagcggaaactcgactcacattcgttcactgagtaagcgattctcaccaaatcaaagatttgtattctctgcttaagaacctttaacagctcattttcaaatgttttctccatattatgacccttgtggttacaaatatatttatgatttctagtgaagatatgagcttaaagttttagtaactttgtaaatatgttcatctaataagtctaattcttaaattgtttatctatagataaaccatctaagatctgaaattatacatatagatctgagaaataagaaatatcattttgttccagttacgaagaaaatttcacctttaacttgtcactaatttctagtaaatatatgaatttgaagatttatcaaatttgcaaatataaatgttaacaatttgtgaacagaatgttgacatagaaatttattatgattatacttagtaaagcaaactccaaattgtttaaaagttaaaaggaggtgtacagttgataaaaagtatgactagctttggaagggctcaaagcgaagatggaagaaagtcaagtttctctatagagatgaagagcgtaaatcatagatatttagatataaacataagaatgcctagaacgatgttggctttagaagagaagataagaaagataattagtaaaagactaaatagaggtaaagttgatgtttttattaattataaagcctatggaaataacattggaaaagcaaatctaaatatgaagttagctgaagagtattataaatgtttaaaacaaatccaaagtgaattgaatgttattgatgatatatctacaactaaaatagctaaatttcctgatgttattacattggaagagttggatgatgatttagatgatatttttagtgagatatcgcctctgattgaatctgctctagatttaatgaatgatatgagatgcaaagagggcgaaaaattaaaagttgatattttatcaaaaattgagattatagagaattatgttgaagaaatagaaaaggtagctgacagtattccaaagaattacaagaagaaacttgaagaaagattggaagaattattatctggtgttgatatagatgaaagcaggatagcattagaagtggctattctttcagataaggcagcagtagatgaagaaataacaagactcagaagtcatttaagccaaatgaaaagtacgttagatttagatgaacctattggaagaaaattagatttcataattcaagaaatgaatagagaagctaatactatagcatctaaatcaacagaaataaatatgactaacaaagtaatagagataaaaaataccattgaaaaaataagagaacaagttcaaaacattgaataattaggaggtaaaaaatgggaataaagttaataaacataggctttgggaatatagtctctgctaatagattagttgcaattgtgagtcctgaatcagcacctattaaaagaattattcaagaagcaagagatagaggtatgctaatagatgctacttatggaagaagaactagagctgtaataataacagatagcgatcatgttattttatcagcagttcaacctgaaacagtagctcatagattatctacaaaagatgatatggcagttgatgaggatgatgaataatgattactaaagggagaggtctattaatagttatatcaggaccatctggtgctggaaaaggtactatatgtaaaagatttatggagaaaaataaggatgtaatgttgtctgtatcagcaactacaagatctccaagagttggagaagtagaaggtattaattacttttttatgtccaaagagcagtttgtagagaagatagaaagcaatgatttcttagaatatgcagaagtgtatgataattactatggtacacctaaatctaacgttgaagaaatgttacaaagtgggaatgatgttattctagaaatagatatacaaggtgcattaaaagttaaagaaaacacaagagaaggagtttttgtattcatccttccaccatctatggaagagttaaaacaaagaatcattaacaggggcagtgaaaccaacgaatctctaatgaagagatttaaatcagcttataaggaaattaattttatttcaaaatataattatgcagtagtaaatgataaagtagagatagctgtagaaaaattagaagctataatatctgctgaaaaatgcagagtagatagaataaaagatagtatattagattcaaaggagggaattattcatgaacaactctatgattagtccatcagtagtagacttattagaaaagatacatgacagatattctttagtaattttaacatcaaaaagggctagacaaataatagaaggtgcagaacctcagatttcaataaaatcaaataaacctttaacaattgcaataaatgaagtagatcaagatgcagttgaatttgaaattttagaagaaggtcttaaataagatgaaaaagaatttagtgttgggtgtaagtggtggaattgcagtatataaggcattagaaatagtaagtttacttgttaaaaaagatattaatgttaatgtaattatgacagaatcagctactaaatttgtgaccccattatcatttcaatctttaagtcagaatatggttacatgcgatatgtttgcagaaccgaaagcttgggagattcaacatataagtttagcagaaaaggcagatgtattcttagtagcacctgctacagctaatataataggtaaagttgcaaatggaatagcagatgatatgctttcgactacaataatggcaactaaggcaaaagtgatttttgcgcctgcaatgaataccaatatgtatgagaatcctatagtccaagaaaatattaagaaattaaagtcacttggatatgaattcatagacccggctgaaggaagacttgcttgtggaacaagcggtaaaggtaaacttgaaagtcctgaaattattgttgacaaagttttaatggaattaaatgaaaataaagatttgctaaataaaaatgttgtagtaacagcaggtccaactatagcacctatagatccggtgaggtttattacaaatagatcaactggaaaaatgggttatgctatagcaaaggaagcaagaaatagaggagccaatgtaacattaatatctggaccaacatcaataatagctccaaaagatattaatgttgtagaggtttctacaaatgaagaaatgaaaaatgaagttatgaacatatttgatgaagcagatatagtaataaagtcagctgcagttgcagattataagcctaaaaattatagcacacaaaaaataaaaaaaggtgatggagagctctgcatagaatttattagagataatgatattctaatggagcttggaagcaaaaagaaaaatcaaattctagtaggatttgcggctgaaagccaagagttaaaagataatgctatgtcaaaactacaaagaaaaaatttagattatattgtagcaaacgatataacagcaagtgatactgggtttgcctcagaagataataaagtaataatcttgtctaaagaaggtaaggaaatttacttagataagatgagcaaagaaaaaattgcaactaacttatttgatattatacttgagaagcgctagaatttgcgcttcttttattaatattggaaatacttatacatatgatacgcaaatgaaggtagatgtataagtatgaaatagttctgattattagtttttatgtaataatcagaatgttaattatctaatattgaatattgttaatataagattagatgtgaggtggtaggtataaatatcatgtatgctgaaataattataaatagtgatgctttggagattgataagccatttacatacaaagtacctagcgaacttcaggataaaataggaataggatttagagttaaagtgccttttgggcctaaaagcagaccaatagaaggctttgtattttcaatattgcaggaagatgatttaattaatttcaattatagagtgaaagagattttaaatatatgcgatgattatgctatattaacaaactatgatatggaagtaattaaatttttaagaagaaagtatttatgtaaatttattgatgcaatccgacttatgattcccgttggaattatgaaggggttaagggaaaaaaagaaaaaagtagttttagtaaatgaagaaatacatgaagatcagcttgataaagaaaattataaaaaattatatgatttcgtagctagcaacaatgggatttatacaaaaacagaaattgttagtaatggatgcttttctttatatttattaaataagttaatagaaaaaggtatactaaaaacagaagaacaaacagtatttagatacaatactcgaatatatgatactgatagtaataagaaacttacaagagaacaggaaaactgtcttaatacgattttaaacagtcctgatcaaaaatatctaataaaaggtgttacgggatcggggaagacagaagtatatataagactagttgaagaaatgttaaggcaaaataaaagtacaattgttttagttccggaaatttcattaacccctcagatgattgaacgatttaagggacgatttggagaaaatgttgcgctttttcatagcaggttaagtgatggtgaaagatttgatgagtggtatagagtaaaagaagggaaagctaaattagttataggagcacgaagtgccttgtttttgccgcttcagaatcttggacttattataattgatgaagaacatgaaaatacatataaatcagaacataatcctaaatatcatactagagaagtaagtgagttcatatgtgaaattaaggactgtaaattagttatggggtcagcaactcctagcattgaaagttactacaaagctattcgtggtgaatataaactaatagaaatgcataaaagaactaatgggaaagaaatgccgcatatggaaatagtagatatgagggaagaattgaagagtaagaatttatcattgttcagtaggaaacttttggctgaaatagaggcaactttaaaagataagaagcaggtaattttgtttctaaacagaagagggtattcaacatttatttcgtgtagaagttgtggatatgtatttaaatgtccagaatgcgatgtttctatgacgtaccataaaaatggatatttgatatgtcattactgcggaagggcagagaaatcaaaaactgtatgtccaaaatgtaatagtaaatatgtgaaattttttggagcaggaacagaacgcgttgaattagaagtgaaaaaatatttcccgaaatcaagagtattaagaatggatgttgatactacacgacataaaaattctcatgaatcaatttataattgttttaaaaatggagaagcagacatcttaattggaacacaaatggtgtcaaaaggattagattttaaaaatgttacactggttggagttttagcggcagacatgtctttaaatttgcctgattacagagcatctgaaagaacatatcaaataataacgcaggttgcaggcagatctggaagaggtgaagatgaaggcaaggtaatagttcaaagctatactccaaaccattatagtttaaagtgtgctcaagaagaggattatgaatctctatttaaagaagaaataaagattagaaggttgatggaaaatcctccttttggtaaaatattattaattgttggatcttcaaaatttgaagaaaaattaacaaaatttatgtatactttagaagctgatttgaaaaaattagtagtagatgatcttactattctcggaccggttccttgtataatttctaaattaaaagaaaattacagatggcagataataataaaaggaaattttgatgatgagtttagtgaaaaagttaaagatacactttatctattaaataagagtgtatataatgaaataagggttagtatagatattaatcctaacaatatgacatagggggaatacaaaatggcattaagaaatataagaaaatatggtgatgacgtattaagaaagaaatgcagagaagttgataaaatagatgatagattattgacattaattgaagatatgaaagaaacaatgtatgatgctgatggtgttggtcttgcagctcctcaagttgggatattaaagagactatttgttgtagatattggagatgggccactagtatttattaatccagaaataatagaaacaagtgggtctcaaatagacgaagaaggatgccttagcttaccaggggaaacagaagaagttatgagacctaattacgttagagctagagctttaaatgaaaagggagaagaattcgaaatagaagctgaagaattacttgcgagagctattttgcacgaatatgatcatttaaatggaactctatttatagatagagttaaaggtaggggagcttcaaaaaaataaatactgataggaggataatataatgaatatagtatttatgggtactcctgattttgcagttccttctttgcaaagaatgattaaagagtacaatgttactgctattttgactcaaccagacaaaccaaagggtagaggaaagaaaatggcatactctgcagttaaagaagaaggattaaaacatgaaatcccaatataccaaccaataaagttaaaagacgatagagatttgatagagaaattaaaagagctaaaaccagattttattatagtagtggcatttgggcagattttaactaaggaagtattagatataccgaaatatggatgtataaatcttcatgcatctttgcttccgatgtatagaggtgctgcaccactaaattgggcaataataaatggagagaagagttctggaaataccacaatgcttatggatgttggtttagatacaggagatatgattcttaaggatgaagttgaaattactaataatatgacaactggtgaattacatgatatattaatggttagaggagcagatttacttgtaaaaagtatagagggaatttcaaaaggcgatatagtcccagaaaagcaagggaatgagactttttatgccaagatgcttgataagaatatcgctaatatagattggaataaaagtgctgaagagattcataacttagttagaggactaaatccatggccaattgcctatactgattataagaacgaaagaatgaagatatatgaaacagaagttctaaaagaaaaaagcaataaagaacctggtactattatagatgtaagcaaaaatggagtgaaagtttcatgcaaggaagatgttctattaataaaaagagtacagtttcctaatggtaagcctttggcaatagaacaatatattaatggacatgaaatagaggaaaatataatcttacaataatggagttgatgtataatgcatttttatccgttttttgatccaacaatgatattattagttccagctataataatttcattttgggctcaatccaaaattaatagcgcttatagcgagtatagccaagtaagaacaataaatggatatactggtcaacaagttgcaagaatgatgttagatgaagctgggctttttgatgttagaatagaattgataaattcaaagcttggagatcattacgatcctgcaagtaaaatccttagattgtctccggaggtatattcaggtgcatctatttcttcagcaggcatagctgcccatgaggtcgggcacgcattgcagcataaagaaaggtatgctccactagtaataagaaattccattgtgccaattgtaaatattggctcgaatgtatcatggatgctattctttgttggtatattattaggttttaagggattaactacacttggaataattttattttcaggagttgtaatttttcagctaataacattaccggtagagtttgatgcatcaacaagggctttgaatatattaaagtcaagaggaatactatatggtgacgaaactaaaagtgcacaaaaggttttagacgcagcagcaatgacatatgtagctgcgacattaatggcagtatcacaattaataagattaattgctataagcaatagaagaaatgattagtaaagaggtagcgtatgaattgtagaaaattagcagtaaagatattaggaagagtcttaaatgaaggggcttactctaatattgtattagcaaaagagttaaatgaagcagaattaagtgataaagataaagcactattaactgaaattgtttatggagttttaagaaggaaaaaaacattagatattataatttcgaactttgtaaaagatcttaagttaatgaacaaagatatcttaaatattttaagagtagcaatataccaaatgaactttttggataaaatacctagctatgctgcttgtaatgaagcggtagaggaagcaaaagaaatatcagaaaatgattcaaagttagtaaatggaatacttagaaatttcactaaaaatcctgatgatattgaagttgtaggaaataaaattgacgaatatgcatataagttttcatttgaaccttggatgataagacttttaataaagcaatatggtgaaaatgtatcaaagaaaataatgtctggattaaattcaattccacaagtaagtgttagagtaaatgaacttaaagctgattatgatgaagtatttgaaaaattagaagaacttgaatatgaagttgaagaaggcgttatttgcccagaagcaatttgcataaaaggtggtaaatctatagaaaataatccgttattccaagaaggaaaaatcacagttcaagatgaaagtgcaatgattatagcaccattattagaattggaagaaggaatgacagttacagatttgtgtagtgcacctggtggtaaaactactcatattgctgaaatacttcaaaacactggaaaagtattagcgtatgatcttcatgaatctaaacttggattaataaaagaaaattgtgagagattgggtataactaacgttgaagttaatacaagtgatgcaactaaattaaacccagatttaatagcatctagtgatagaatcttaatagatgttccttgttcagggcttggaataataagaaaaaaaccagaaataaagtggaacaagacaagaaatgagttaagagaaattataaaagttcaaagagatataatggaatgtgcatggatgtatttaaaagaggatggaataatgatatattcaacttgtacattaaataaagaagaaaatgaagaaaatattgagtggtttgttagcagacataaagactgtagcgtgaaaaagatctttattggtaaacaagataacttagtatacaatagagatggctctctaactattatgccaaatgaaaatatggatggattctttgtgactaaattagaaaaaagacaatagtaggtgaataaatgaacaatttgctagattttactttagaagaacttaaagcatggatgaaggaaaatggtgaaagtgcatttagaggtcaacaaatattatcatggatttataaaggtgttaaagaattcgataatatgaagaatataccaaagccattagtacaaaaactaaaagaaaatttttttgtaggtctgccaaagataatagaagtatataaatctaatatagatggtacagaaaagttcttgttaggatttaaggatggaaacttaatagaatctgtactaatgagatataagcatggaaattccatatgcatatccactcaagttggatgtgcaatgggatgcaaattttgtgcatccacaattgaaggtaaagttagaaatcttacaactggagaaattttatcgcaaattatggttgttcaagattatatcaatgaaaggatttccaacgtagtattaatgggaagtggcgaaccacttgataattataataatgttataaagtttctagaaatagtttctgctgaatatgcattaaatattgggcagagacatataacattatctacttgtggaattgtacctaagatatacgaattagcagataaggaacttagcataactctagctttatcactacatgcatttagtaatgataagagaaaagaaattatgcctatagctaataggtatagcattgaggaaatattagaggcttgcagatattatataaataaaactaatagaagaattacgtttgagtatgcgctagtgaaagatgtgaatgatggcagagaagatgcaaaggcattaggcaaattgttaaaaggtatgctttgtcatgttaatttgattccagtaaatgaaataaaagaaaatacatataagagatcttcaaaaaaggcaatagaagatttttcagaaatactaaaaaatcatggaatagaagttactacaagacgtgaaatgggaagtgacattaatgcagcatgtggacaacttagaagaagttacataaatacccaagaaatagagggggagcaaaatggtaggtttagttagtgatgttgggttaaggcgaacattaaatgaagactctgcttcgtatttagaaagagacgaattcaaaatttatgtagtggcagacggaatgggtggacataatgcaggagaagtcgctagtcagatggctgcaacaaatattgttgactatgtaagagaaaatttttcttcgagtagagcagaaaatttgcttgtagaagccatagaaaaagtaaataaagatatatttactttttctaacactagcgaaaatttaagtggaatgggaactactgttacaacttgttttatgactaaaaattttatacaggttgcgaatgtaggtgatagctgttgttttgcagttaaaaataatgaaattaagaagattactaaagatcattctttagtacaagaactagttgatattgggagtataagtgaaaaagaggcggaaaatcatcctaagaaaaatattattacaagagcattaggaactagcattaatgtgaatgtagatatatttcagttagagaacagagaatatgatctttatatattgtgttcagatggattgacaaatgaattaactaaagaagagattctacaagtcgtcactgaaggagaaagttatgtaaacattgctaataaacttgtatacttggcaaagcaaaacggtggcagagataatataacagtattgttgtttggaggagagatgtagcatggatggaattgtacttggaaacagatacgagttgttagaaaaaataggggaaggcggaatgtcagaagtatttaaggcaagagacaataaattaaataggtttgttgcagttaaaatacttaagaaagaactttgcgacaaccctgatattgtagaaaaatttaaaggtgaagcaacagctgttgcagccttatctgacaataatatagtaaatatactagatgtaggaacacaggatgaaataaattatattgtaatggaatatgttaaaggaaaaacattaaaagatattataaaacaagttggaaagatgaattatgaaacagctatatcagttgcaattcaaatagccaaagctttagattgtgctcatagaaacaatataatacatagagatgttaagccacaaaatattttagtaacagaagatggagttatgaaagtaactgattttggaatagcaaaatcatcaaattctgaaactattacaaatactagtacaataatgggatctgctcattatctttctccagaacaagcaaaaggaaattttattgattgtagaacggacttatattcattaggagttgtattatatgagatggttactggaaatctcccattccaagcagatactgctgtaactatagctttaaaacatcttcaagaagaagttgttccgccaaaaagtgttaattcaaagattcctgagagtttaaatcaattaattttaaagtcaatggaaaaggatcctattaagagatatcagaatgctaaagaaatgatctcagatctccaaagaataaaggatgatcctaatgcaaagatagataaagaagacgacaatgatcatactataataatgtctgctgtgaccgaacagatagcaaagcaagaggaaaagttgcctaataaaaaagatgatgactatgatgatgaagacgatgatgattattactacgaagacgatgaagatgaaaaaggcagtggaataaacaagaagagaataatgaaaataacaataggtgtagttttagcattattgttaatagttttaggtgttgcagcttttaaaatggttagttctgctagtgctaacagcaaagaagttgaggttcctaatatagtaggaaagaatgttgatgatggaaagaaagcacttgaagctataaatttagttttagtggaaggtggaactgaagcaagcgatcagccagaaggaactattcttaagatgaatccggatgctggaactaaggttaaagaaaaaagtcagattagggttattgtaagtggaggagcaacaaaacttaaaatgcctgatttgaaggagtatgatatagatactgcaactactattttaaaatcctttggacttaagattagtgataaaagcgaagcttttagcgatagtgtaccagagggacaaataataagtcaaactccgaaaaaagatactgaagtaacagcagatgataaaataacagttgttgtaagtaaaggaccggaagttaagactacaaaagtacctagcgtagttggtaaagaccaagatacagctacaggcgaattacaagatgctggtttaaaagtatctgtaaattcccaagaaacacaagatgagagtcaaaatggtaaagttttaaaacaaacaggagaaggaaatagagtggagcagggaactacaattgttataacagttggtaaatatgttgcaaaacaagatccacctgtaactaataatcctactcaaggaaatactaaaccgggtggaaatggaagtactcctgataaaaatactggaggaacaggtggtactactactgatacaccaggaaagactcctaatactccaggtacaactaatcctacaggtccatgggatgatacaaataacagccaaaacaacactcaaactaaaacatcaaatcaaaaccatcaataataaggtaaggagaggttgataaaaacctctccttatatgatatatatgttgcaattcacaattacggttaaaattcttacaatatttttagaattatgatgaagaattatttttgcaatatatatttgtatttaaacctacattaaatctctaaaaagaaaatatactatgatagaaaatactaatttagaaatttaatatattttgcaattaagttgctaagttctagttgtatttaggcacttggcttattaaaatcttaaacttaaatttatctaatttatcattgcagcatatattacattctataaaagaatatataaatttattttataagttatggagggaaattatgaatggaaaaataataaagggcataggaggcttttattatattaagacagatcaaggcttaatagaatgcaaagccagggggaaatttagacataaagacataaagcctatggtaggggatgatgttacaattaagatggaacatggaaaaggcgttattgaagagatacataatagaaaatctcaattggttagacccacggtggcaaatgtttctttagcatttgttgtttttgcagttaagaatccagacataaattttgatttattaaataagtttttgattctatgtgaatataataacattgaggttatagtttgcttgaataagatagatttagtatcggaagaagaaagagaagaaataaagaagcgaataaatgtcataggttatgaagttctctttataaatgctaagaaaggaataggaatagagcggttagaagaaaagattagaggaaatataacagttttttgtggaccatcaggggcaggaaagtcaacattaataaataagctttcaaacaaagaacatatggaaacaggtaatgtaagcgagaagcttggaagagggaagcatactacaaggcatagtgaattaattgaggtagcggacggatatatcgttgataccccaggattttctacactagaaataaaggatttaatggataaaaattctttaaaatattgttttcctgaatttacacagtataatgataagtgtaaatatagaggctgtttacattataaagaaccaaattgtgctctaaaagaggctgtagaaagcgaaaagattaatagatacagatacgaattttatgtaagagcattagaagaaataattgaggaggaaaaaaataaatggtaaagattgcaccatcaatattatcagcggatttttcaaaattaggagaggacatagaaagaatagataaaggaggagcagattttattcatatagatgtaatggatggatcttttgttcctaatatatcttttggtttaccagttataaaatctattagaaatagaacaaagaagttatttgacgttcatttaatgataaataatccatcaaattacatagatgcttttatagaggctggggctgatataattacaattcatcatgaagcagataaacatatagatagaacaattaattatattaagtcaaaaggaaaaaaagcagcgatttctttaaatccaggaactccaacaagtgtattgaaagatttaataccaagtttagatatggtgttgataatgtctgttaatccaggatttggaggacaaaaattcataccttattctctagataagattagagagataaaagaacttagtgatagattgaacccagggcttttaatagaagttgatggtggtattgataagacaaatgttaaagaggttatagaagcaggtgcaaatgtcattgttgcaggttcagcagtgtttaatggtggggaaattgatgagaatataaaagctctaagggggtaataatttgaatgttgcaattgtaagtggaggaaacccaccttcagagaagttactaaagaaatatattagtgaagttgaatttataatagcagctgataagggaagtgaatgcctttataattataatattattccagacttgcttttaggtgattttgactctgccaaaaaggaaattttagataatatgaagttaaaggttaaggaagtcttggaatttcaaccagagaaagattatactgacactgaaattgcagttatggaagcgataaaaagaggcgcagaaaagatatatctattcggggcaactggaactagaatggatcatacactaggaaatataggacttatgctaactacgaaaaaaaaaggtgctaatttagaaatattagacgataataatagactttaccttggagaaaataaaatgaggttatacggcaaatatggtgaaaatatatcatttcatgcattaagcgataaagtaagcaaacttcaaattagtggtggaaaatacgatctaccaagttatgatttgggtttattagatccacgagctatatgtaatgaatttattgatacaccaatagatataacttatgaaaaaggagagttattagttattcattccatagactaaatattcatgaacttatttaattattttttatatttaaaagtggaacattttgagtagtaactgaatattaatataataagacggattaaattttcattttaatttttaatatattaatatttgggaggacttgtaaatgaaaataatagcttttaaactacctaagtttctatctaatataataaagttttttagaaaaaaaggctagaagtacataatgtataatttagttttaagctttctaaatagctttaggcgtaatcaaaaaaaataacaagtccatctgccaagaaaagttccttgttgcagcatagctgctcttttcatcatgcttcatcaacagattgaactaataggctcgctatgagcccgatctgcttcttcgcctgatgaaaaataaccatggcattttagactcgttattttctttcatatgccttaaaaataaaaaatgcaattgggataacaattgcattttttattatgaacttatattgctctttgaacctttccagatctaaggcatcttgtacatacatgaacagtttttggtgttccgttaactaaagcttttactttctttatgttaggagcccaagttctctttgattgacgatgtgaatggctatagcttactccagctacaacacccttatcacaaatttcgcatcttcttgccattagaaaacacctccttatattccaaagataatcatcttcaataggacagtgtaaattatatcataggaaaatgtaataggcaagataaattattaattataaattaaaaattatgtattggcagttaatatgcggctttacagcgaaaatgaaacttatgtgaatacctgccgaaatttgatatgtattatgttgtaattcacaattcacaattacggccaaaattcttgaaatatttttagaattatgatgaagaattatttttgcaatatatatatttatttcataggtaaattattctcttgattatgttttaaaaactttttagaaggaaagactttgtagagatagatttttaaagaagagaaggaaatgatgtggttgtactttatgttttctaagtggagtataatcttgagtggacttaatacttttttctggggaaaagatcttgattgcagttagttagtattgaattgtgatctacactcttttcgtatgtatgttttttataaatttatgatctaggttgcagtttatgctttttcatagggggaaatgatttggttgtactttattttttctaaagggagaattatcttaattggactcgattcttttttctaggaagtaagcttgattgtagttaataagttcgaattgtgctttgcacttttttctatgtgagtacttttttcttattttatgatcttggttgcactgcggttttaagagaaaaaagatatagctatactgtatgttttctaaagggagaattatcttaattagattcgattcttttctctagggaaaggacttgattacgcataataagtttctaactgtgctttgaaatttttcatatatgcgtgctttttagatggaaggatcttaatttcagtttgtgttttttttaaggaaaaatgatcttggttgcgctgcgcgctttttataaaggtaaatgatcgtaattgcacttcgtgctctttttaaaggtgtatattttttgaatacttgaataaaatattgttctaatatagaatagaaaataagatgtaaatatagaatagaaaataagatataagaatttaggaggaatatggatggttggattttcaaacgaaaatggtaatataaattattcagaggaagttatagcaaaaattgttggattatccacaatggaatgttatggagtagttggaatggtttctagaaatgccagtgaaggcttttgggaacttattggtatagaaaattttagtaaaggtgtaaagatacagctaacaagcgagaagaaattacaaatagaattatttgtaatggttgaatacggaacaaagatatcggttatatctaataatataattcaaaaagtacgctatagtgttgaaaactatacaggacttaaggtgtcgtccataacagtaaatgtgcaagcggttagagtttaggaggttaaactaaatggaatatacaaagataaatggccatgatttttataacatggttgtgaatgctagcaataaattgctagagcaaagtgatttcgtaaatgcacttaacgtatttcctgttccagacggagatactggaactaatatgtctatgacgtttaaggcagcagttaaagagatagaagatatggatagtgattctataggggaaatatcaaaaaaattagctaaaggtgctttaatgggagctaggggtaactctggtgttatattatcgcaaatacttagaggtttttctaaaggtctagaaggaaaaaaagaagtagatattgaggagtttgcagtagccttttcagagggatcaaagtcagcatacaaagctgtaatgagaccgactgaaggtactatactttctgtaattagagccgctgctgaagcagcagtgtcatctgatgctaaggatatggttggctttatggaagagataacagttaaatcaaaagaaatgttagatagaactccagaattattacccgcactaaaaaaggctaaagtagtagattcaggtggaatggggctttacattatacttagaggtatgtttgaagcattaaagaatgatattaaagctgaattaagtgatataaaaataagtggcgcaaatggtactttagctaaatctacagaagaaattgatataaagtttgggtattgtactgaatttataatacttggtgacgctaaacgtgcacaagatttccaaaatgagatagagagccttggagattccatgatagttgttggatatgatgatgttataaaggtgcacatacatactaatgatcctggattggtcttatcaaaggcagttgctataggggaattatcaaagataaagattgataatatgagagaagagcacagagagttattaataaatactaaggaattaacagaaacttcgtctgaagatgaagttggtgatggcgaaaagaaaaagtatggctttataacagttgctatgggagatggaatttcaaatatctttaaggacttaggaatagattatgtcattgaaggtggccagacaatgaatccgtctactcaggatattttagatgctgttgagaaaataaatgctgaacatattttcattatgccgaacaataagaatataattatggcggctaatcaggcggcagaaatatcaagtaaaaatatattagtagtacctacaacaactattcctcaaggaatagcatgtgccacaatgtttaactatgattctgaagttgaagaaaatttcactaatttaaaggatacaattgaagtagttaaaactggttcggtgacatacgcagtccgtgatacagaaattgatggaatagatattaaacaaggaaatatgttaggacttgtagaaggtaaaataaaagaggtaggcgaggacaagaaggttgttgccggtaaagttctagaagatatgatagatgatgaaagtgaacttattactgtatattatggtgaagatgtaagtgatgaagatgcaaatgaattcgaggttgagttacaagaaaagtacgaagatttagatattcaattttacaaaggaaatcaaccactatattactttttaatatcagtagaataagaaatagtaagggcgcctaatgctaggtgctcttattgtttagggaggaagagaagggctttggatatatatagcaatatttcaacattaaaaggagtaggcccaaaggccacagaaaaattaaatagatgtggaatttttaatatactagatattctgttatattttccaagagattatgaatttgtagatagtaatgtggaatttgaaaatattacaggagaagacaagcagattttaaagtgtaaagtcattagatttagaagcgatgtaaaaactaaaactggtaaattattaacaactgtagaatttgattataatgggcacaaagtatctggaaagtggtttaatcaaaggtatataaaaaattcctttaaaataggagaaatatataatttgatgggtaaatttaaaagggtaggaaatactttagaggtggttaatcctatggtgacatgtgaagaagctatttcgaatgagatcatacctaaatatcctctaaaaggtgatataagcaataagttgtttgaaaaattaattaatgaaattttgtccaagatggcagttaaggagaatttaccgcaaaatatattagataaatattctctaatttcattaaatgaagctattagaagcgtccattttcctgataataaggaagtgctggaaaaggctataataagacttaaatttcaggaattatttacatattcactaaagttactgcttcttaaacataaaattaagaaaaacaaaaatggtagactttttcagtgggtagatgaacttagcttatttaaagagaagttaccatttcctcttactaatgctcaaacaagagttatacgtgaaatattgagagatcaaaaatcaaattcatcaatgaatagacttatacaaggagatgttggtagtggaaagacaataattgcacttatagctatttttaatgtgatcaaaaatggttatcaatgtgcatttatggctccaacagagattcttgcaaatcaacactttgaagaagcaaggaaagtttatgatgaatttaatatagaaatcgaattattaacaggaacaacttcagcaaaagaaaagcagaggatcaaagaaagaattagaactaaagaaccaattttagtgataggaactcatgcacttttccaagatgatgttgaatttggaaagttagggcttatagtaactgatgagcagcatagatttggtgttgagcaaaggagtaaacttataaacaaaggaaaaagggctgattgcttagttatgacagctactccaattccaagaacattggcattatacttatattcagatcttgatgtatctataattgatgaactgccacctgggagaaagaaaatagatactagattttatgctgataatcaaagagatatagcttatgatttggcatatgatgagataaaaaaaggccgacaagtatatattgtatgccctcttattgaagaggatgaaaaagaggagttaaattcagtagaaactttatataataaacttaccagtggaatttttaaggaactaaaggttgagatacttcatggaaaaatgaaaggctctgaaaaagatgaaataataaaaagattcaagagcaatgaagttaatgttctaatatcaacaactgtaattgaggtgggggttaatgttcctaatgcatctgtaatgattgttgaaaatgcagaacgatttgggctatcacagttacatcaattaagaggaagagttggaagaggtcagtattcatcttattgtatattaatagcaaaggctaaaagtaatgtgactaaaaaaaggatgcagataatgacagaatgtagtgatgggtttttaatatcagaaaaagatttagaactcagaggggcaggagaaatgtttggtaagaagcaaagtggtgatgaaggctttgtacttgcaaatctttatgatgatatgaagattttaagatgtgctaaattagaggcgaataacattttacaaaacgaatttgaggtaaatagggaaataattaatgaacttagtaaaaatttgaaaaaaagtagtaaatatatttgctttaattaatttgaaatattatgtatagatatgttaatatataaaatatacacctatgaaaagagcacgaagtgcaattaagatcatttcacttttgaaaagactgcgaagcgcaattaggaacttttcacgtatgaaaagagtacggagtgtataattaagtttaattttaaattgtaaattaaaaatctagagagtagattttcttatatgcttattttaggaggaataaaattttgagaataatagcaggaaaagcaagaggacataaattaatacctccagctacaatggaaacaaggcctacattagatagagttaaagaggctatgtttagttcagttcaaatgtatataccagaggcagtagttgtagacgtttttgctgggacaggaagccttggattagaagcggcaagcagaggggcaagtgaagtttatttatttgataaaagctctgtgacttttcctttattaaaggaaaatgtagaaagccttaaatttcaagatttctgttttcctatgaatatagatgcttatgaaggcttaaagaatcttgcgaagaagggaaagaaatttgacataatatttattgatccaccttattgcaaagaaatgattccagaagctatgaaaattgttaaggataatgaaattttaaagaacgatggaataatagttactaaaatagatactattgaagagatttatgaagggtataaagatataagattaacaaaaagtaagaagtatggaaatacaacagtatgttattacaagcatgaggagaagtaaaaaatgagagttgcagtgtaccctgggagctttgatcctataacaaatggacatctcgatattataaaaagaggagcaaaggtctttgataaagtaatagttgcagtattagttaatgttgataagaaatatctttttgaaagcagcgaaagagttgagcttataaaaagagtgacaagagatattgagaatgttgaaatacgaagctttgatgggcttttagttaattttctaaaagaatgtaagactaatataatattaaagggattaagaacagcttctgattttgagtatgaatttcaaatggcgtttattaataaagaattagatgatgataccgaaactgtatgtatgatgtcatcggctaaaaatatacatattagttcctcaactgttaagcaggtggcaaggtttggaggagatattagtggacttgttcccaatgaaattatttcagatataatgtccagaataaatctataaatggtgattttttaaggaaaagtattttcgtaattagaatgtgctgtgtttaagcaggcgcattgacttgaaattaatgatattaataatactaaaagcaattaaaaatactagattaagatttgttcctggtattttgagcatttatagaataaatatctaaggagtgtttttatggaaaaaatggaggtaaatataatagagttattagaatatttacaagacttggtggaaaattcacctaaagtgccaatgagcggtaaagttatgatagataaaagagaagttgttgatgtaatagatcaaataattaactatatgcctgatcaatttaaaaaagctgaatgggttatgaacgagagagaaagaatccttaatgaagctaaaaaagagtatgattctgttagaaaagaaacaatgactatgatgagacagaatgtcgagaatcacgatatagtgagggaagccaaggggagagcacaagaaattatagcctcagcacagagagaggccaaggctataagattagggtctagggattattctgatgaaatattaacccaattagatcaggaattagaagaacacaaaataaaattaataaaaagccttcaagaaagttttgaagtagtagctaaagagatagatacaaatttaactggtacatgcgatgttataaaagagaacattaaagaattacgcggtatgaaaaaataatttcaaggttctattaaatatacttaataaaagtgttaataacagtatagttaatgcaggatatatatatacaaataaacttgaagaatggctcatttgtaagtttgatgtataaatacttgtaggaaacactttgcataacccataagttataataaaactaacgattccttggattacttttaaaaaaatatatctgctataatttatcttagtatcgcttacgaaagaacttacttgtgcgattaccgcaagaccagaaaatgaagttaaaaagcttattataccaagcttcaaggggatagaaatttctaggggagagattatactgcacccattagtcatttcaatgcttcctaaaaatatactgtataaagtttgggaaggcagttttaaaacattatctagctgcctaaatgcaatatgaatataaggattgtttttaacaagagatataacaactgaaaaaattattatgaaaccacctatagataatgtggtgtttattccgttttgaactgcattttttacagcattaccgaaattcatactttcatttttaggacaagggagagaacttagagcatttaagtttctctttttttttgtcaaaaatcccattatgattattgataaattgcttcctagaagcaagatataacctaaggatacatgccctaataaagttccagcaacagatccgattaaaaacaggggaccaacgttagacgctatgtttaaaagtctttcgtattcattcctatctatatattccatcttgtataaatctacacaatatttagcacctaatggatagccacatagtatacttgctacgattggaaaggaacaatttctagaaaggcctaatggcttgcagattaatggcccaagaaatttagaataaagatttattccatcgtagtatattaataaattacatataactacaaaaggaaaggtggttggcaatattgagttataccataatttacaaccatcaatagctgcgactatgcattggtttatgtttaaaacaaaaagaactattaagacggatataaatatacaaatgatagtattttttttgatattaagttgtttaattaaaataaagattaagctaataataagaaaccataagataataatatatatcatgaaatcactccaatcaataatatttatattctcatggttatgtaaaatattactatattataaaaggcccttttaaataatcatccataggacttatttttggatttagcagtgaatatgcttttgttcctaagatatctatttttagatgatcacattgattgtttcttggcacctttgttattaaatttatactagaattagcttttatactctttagaattctttgccctgtagaattaaaagcaagaactcttgcgtaaggtgcggggctcttagataagcttaataaatcaaaattctcaaggttcaaaaagctttgcaaaagaattctacttatcctcgtgtatgtatatcttttgctttttgaattcaatattaattcgttaagcgaattggatcttacaatttcttttaatattttattatctatgccctctgatacatctggcaaatttaaaagagatctttcgttagtgagtaatttatattttatatatttaaaggtatcttcctcaaaaataaaaggatagttagaagaagataaactaagcagaatgtcatagctcgcctttggcataatatcagctaaatcatttaaagatttctcttttagatgttttcttatcgatgtagcagaagcaaatgaagcgcttatgttgacatcgttatataatgaaccttctcttttgatggttttaggaactattgcgctatttaaacgaattagagattttatatattcaatacctaagatattattagaatttgatattgtatctaataatttatttgagtttaaataatctttaagtgcatttgctcggctcaaatgaaaaggtaagccagagtccaaattatcttttaaaagttttttataatttaaaggctcggaaactaaaactttggctatgtcttctaatatagatacatttccttcttcgcttccaaagtataagtgatctattacgcctaacgagttaagaagagatacgcttccgaaagcaaaatgttcagcagaagaaatggaataaactagaggtagctctagaactagatcaacaccatttttaatagccatttcagctcttttccatttatctataattgctggaattcctctttgcataaaattaccactcattacacaaactatgccatctgcgtttgtgtcggattttgctttactaaggtgatattcatgacctttatgaaatggattatattctgtaattattcctgtaagtattaaaatcatctcctttataaagctagtatagcatattatggaattttataatattagttattaaggtttaatatgttgtgtattttttgtaaaatgtcaata

SEQ ID NO: 70 - DNA, 32777 bp, Clostridium beijerinckii
ctaagtcgggaagggataaacgctgaaagcatctaagtgtgaagcccacctcaagatgagatttcccatagcataagctagtaagaccccttgaagactacaaggttgataggtcagaggtgtaagtgcggcaacgtatttagctgactgatactaataggtcgagggcttgaccaatataatcaagttgtaatatacattaaatagagagaaagctcgactcactagcgttcgctgagtaagttcgaggaaccaaatatgaaatttggactctcacttatgtgcaattttgaaagaacaaagttcttttaagtagtaattatttagtataattgctgaaaaaatagtataagcgatggacttgggttattttttctaaggaaacactaactcacatacgttcgttggtgtgctgtttttcaaccaaatcgaagatttgggaaaaacatgcatctcgtgatgatggcatagaggtaacactccttcccattccgaacaggaaagttaaggtctatagcgccgatggtactgcatgggagactgtgtggcagagtaggacgttgcgaggtaagtataaaagatagctgtaatggctatctttttttgtcttattaaatatactaattaaattggtagtgaggaagtttttctatgttacttatttacatatatagaatatatattatcaatttaattttcttgtaacatatgaggtaatatgttaaaatagtgtcaaataattaggtgtaaaagttttattattgggatttatcaaaaatactctgataataatattaaaacaataatattgttatacgataattaaataataagagctaaataaagattcaaaaaatatgatatatttaaaagggatatgagaggagaatatttaatggaggcagattgtaattcatctgaaggggaatctatcttaaataattggatgaaggaaaagtgtgataatatggagttggtagtagtgaatgatattccgattttagtggaggattgtttatctatactaacaggtactgttgctaaagttaaaaactcaactgacaagttaattgtcacaactatagacaatactaattatgttttagaatcgttcacagaaatgaatattacaaattaaacgtattttgaaaattcatattaacatgttggaattcgattttatacagaaggagatagctttttacaagactataagagtgatatttggattcctataatatcagagagtaaaaattagtaataaaatattttgaattaaatataattggcttagtattgccgaaatttaaaataaaagcaggtggttttaattaaactatctgtttttattttagaataaaacgagttaactctcatttttatatattagaaagtggctataaaggttaaagtatccataaagtggaatgaaaatagttttaatattcgtaggagatttaatgtattctgatgaaaaattaacaagccactttgaagttcatgaaattattttgatagtaatgtatttatatgaataatattcatgtaaaccctttataaggaataaaatccttgtatgttatgaattgtaggggatatgccactatgatataattatgttaaaagatgaagcaaacactataggaaattatggaatgcaaaattatatggactaaattcatagaatatgtatgacagttactgaataatgcaagataaagtaatattctgtcactattcgtttgaatagtttttggttatatagaattataataaaattaatcaaatctgtttatcagtacagttccttagaagtgcagataaaaagttactttgatttataggaggagggaagaaggtctaaaagagtggtgataagcttaattaagtacatttacgaaagataaatttaaggaggggtacacaaatgaaaaaaattatttcagcagttacttttttattagtagcatttggatttacagcaaatgttaatgcagcggtagtaacatcagtctcaacatcaaatgaacgagtaatcgtcgtatttaaaaataaagctgataaaaatgtagtttcaaaagtgagaggaaatgtaagacgagaatacaaaaatgcaaacgttctatcagcatctgttcctactacagctattaaggatttgagagatgatcccaatgtattagccgtagaacaagatataatagttaaaacaaattctcaaacagtagactggggagtgaataagatccaagctccgacagcatggtcttcaagttatactggaaaaggagtaaaaatcggaattgttgatactgggatagctaaccatgaggatctatcagttgcaggtggcgcagctttcacatcttatacaacatcatatttagatgataatgggcacggaacgcacgttgcaggtataataggagcgaaaaataatggttatggaattgttggagttgctaatgaggcaagtctttatgctataaaagtattaggaaatgatggggctggatacctttctgatataatcgcaggaatagattggtgtattacaaataaaatggacattattaacttaagtcttggtagttccgtaccatcaactgcattgcaacaagaagttgacaaggcttataatcaaggcattttagttgttgcggcagcaggaaatgatggtacatcagatggatcaacggatactgtagattatccagcaaaatatagttcggttatagcagtggcggcaattgattctaataataaaagaccttcgttttcctctacaggaaataatgttgaagtagcggcgccaggggttagtgttcttagtacatatttaaataataaatatgtatctatgagcggtacttcgatgtcagcaccttttgttacaggagatttagcattattaaagcaggctaatccagggctttctccaaatcaattacgtgcaaaacttaatgaaaatgttattgatttaggaataagcggaaaagatagttggtatggttatgggctaatacaagcacctagaggacaaacatcaacggtgacacagccaatttcaacaataccaactaatacgcagtctgttactactcaaccagttgtaagtcagcctgtgacaacgcaaccttcaaaattagggacaagaacggttgtgtctacaaataaagcctattacttagcaggtgatataatatatattaaagctaaggttacagatacttctggcaaagcaattcaaggagcagccgttaaatttagtattacttcacccaaaggtgttgtgacaatatataaaggaatgacagatagatctggagaggctttttttggtattttgacatatagaattacaggaaaaggtacttataaagttctggctgagactacatatagtagttatatgacaagttcgtctaatactgcatttcaaatttattaaaaatagtttatatagtagaacttagtgaaatacattacctaccactattttgtgggaggtaatgtattttttgattagaggacattactaaagcaaggaataattcacaataaaaaagatagatgcattggaatttgttggactaattactataattaataaaaaatgtctgttttataggaggtatttcactgatattgtcgaatattaattaaagtactaatctaatattttagaaatatataataacttaggaggaaaaacatgaatattaaaaggaagttgacgttaacacttcttcttgcgagttctgtgcctttaataatattcacaatcattaatttgtttttttcacaaaagattgcgatagaaaatgcactagctgataattttaaaagagcagaaattgtggatgaaaagataaatggtttaattgagagaaatatgtatgggataaagagcatggctagaaatcctattattagttcctatgatgcagaaaaatctaaaccaattttagttgagagttcaaaagtatatccagatttatcatttacggctgttactaaattggatggagttcagtttgtgagaagtgatgactctaaatcatctgatatatcagatcgtaatttttataaatcagcacttaaaggacaggatgaggttgtatctgaagttcttgtaagtaaagataatggaagtttaatcacagttctagcaacgcctattagagataaagagggcgggattgtaacgggaattttacaaggaaatattgaacttccagtgctaaattcttttgttaaagagctttcgcaggataatgcaactgtttatatcgtagattcagacggcaaattgctagctcatcctactaagacattagacaagccagaagatcgtacagatttaaatgatttcgaatttattaagaaaggtgtaaaaggggagagtggttccgaagaagtagttaaagatgggaaaagtatgcttgtgagctatgttcaggataaaaagacaggatgggttatttgtgctgaaattcctaaaagtattactgttgaaaaaagcatacattctttaattaatactagtttaataggaatagttatattgtttattacatgtggaggagtttttgttctagttggttatgcaactaaaccattgcatatacttttaaatgcagcaaataagatttcaaatggagatttaacagttaataatataaacataaaatccaacgatgagataggtaatttaggaagagcatttgaaaaaatggctgttaacttacgagaggtaataaataatattaaagaacattcagagagagtttcatcagcatctagtgagatgacagatgtttgcgagcagcagtcaaaagttgctacaaattctgcagaaaatgttaatgaaattgcggaaggttctatgttagtaagctctaagatagataaaataaattctaatatgaatattttagatagcgcaataaaagatataaatgaaaaatcagataatgtttcttcagccgtacatactgcgtctagctattctgagaagggaagcgaggcactccataaagttaactcaagtatggttaatattcaaggttcagttaacgatacatctaaagttatagacaagcttggagagcattcacaagcaatagggaaaattacagaagtaataaagggcatctcagaacaaacaaatctgttggctttaaatgcagcaatagaagcagcacgtgccggagagcaaggaaaaggatttgcagttgttgccgatgaggttcgaaaattagcagaacaatctggagaagctgcggggcaggttagtgctcttataaatggtatacaaaaagaaactgaaaatgtagctgtagttatgaataaaggcataaatgaagttaatgatggaactaaagtagtaaatgaagctaatagctattttcaattaatatttaaatctatacaagaagttgcatctaatatgcaggaagtaagtaatgctatagataatatgaataaaactgaaaaggaagtatttattaacataagtgatattacacaactttctgaggctgtagcaggagaaactcaaggaatatctgcggctacagaagaacaagtagcttcaattgaagaaatgacagcatcagttcaaagctttagcgatatggctacaacgcttaaagaattaacagataagtttaagacaaattaattctatttatctgtagtataaataaaacttaattgtaatcatctaagttttttataaataaaggtctattgcgttaatagattaaaatttaatatgctcccttttatgattgatagttttttcatcttaactgtctaccatatagggagcatatcattaatttatagtgcgatagtccttttttgcttataaaccatggaatagtagtgaaactattatactttatataataaaaattttagtttagataatatagctaaaatgaattaataaaactaataaattctaaatattcaagcctttgagaatttaaataagattggaagttcctgatgatgaatctatcagaactagttaaaatattatttttacaccatttcttataaaatttatatctataacgtgctgcttcagaagatattgaacagtacgtttctatgtcatgagaagatctaatattcaacttatgaagaattactggattagataataaaagaccagtaaaataatttgcttcagcctccataattttatattcagattctgacaggtaatcatcaaatattttggtattatcagatgaataatggctacataaaatatgacctaattcatgagttaaagtccatctaattctttcatcagatttaaaatctaaatcattataataaattatatacttatttgaaggtttaaaataatcagtacatccttcgtcagaagttaatatttcaaaagtttcttctttggttaaattgtgatcaagcatgaatcgatgataagaaactatttttatattatcgaaagaacctattatttcaaatacgtttataggaaacttactaatatttaattttatataaatatcattaactatctgttttatacgcttatatctaatcgtcgaagtactcatcaaaagcagaccttaaaattttcatcattttttctttgtttttaggatccatttttcttcgagctctctcaattcttcttatatcatcatcgccaaatccagtgtcactaattctcttatcaggaaagtctaattcttctatattatcagacaataagtaatcaacagtagtatttaaagtatttgccaacttaattaatgtatcattgctagcaccttgtctatttccttctatcattcctatagtagattgacttacaccaatagcttcagctaacttttgctgtgtaatttttctctcttttctaagtagttttactttatcacctaacattataaattcacctcttaagataattttatcatagtgaccgataaattcaataaaaaaattaaaaaaatgaaagtaattttattattaatctataaaccacattattttcataacatgaggacaaaataattaataaaattaaccttaaaattaaataattaaaggagaaaaatatgaaaatgaagaaatcggcaattttattaactggcataacaatactcagtttcttattaatgagaaattttcatgttaataatctgaagtgtattaatctaataaaaaaagaggctttagctgttaataaaattaattattttaatatggaagtatctttacgtaatgaatcaaaacaatacgaaataattaatgaagtttatagtaaagatcatgtgaagatcaattaccctcaaataaaaaattatgctgatgcagtaaagcttgactctataaataaagatttaaaaaatgcagccctaagtattgtaaatatatatgttgagaataatacaaatattaatgatataaacatggaagtaaattatgaagtgaaaactaaaaataataaatatatatcaatagcttttaatggattagtaaatattaaaggaacagcatatccaacttcaatcttttatacggttaatatagatttagagaacggtttaacagttggtctttcagaatatgctaatgtgcagggagtactagaaaaattaaaaaagttagatgatgttaaaatgctttcagaggatgataaattaatagaagtacagaagtctgttataaaaaacattagtgatgatgaacttttaaatatattaaaagatgctgattttcacgagaaagatggcgtgattgaaattccaaagaaaggagcctatagttatatggaagataataaaatagtaattagcattccaatgattcatgctataggagatcatgcggaatttataatagaaaagcaatagaaatttttaagtaaagtttttgtaagataaaaaatatagttggattgaccacctatatttttcaattcattgatgctgtttagcctccgccagtaacatttttgaaaacttataattctagtttttgagccttatacatttgaatagtatagaaaatgtaagtaagttattaaaaattaagaatttagtaataagaatatattactattatatgatataattggataatggattttgatgcagataattatttattcaattaaaatatataatttggagggcgaaatatggcaagtgtattgaatgatgaagaaatactatgttctattaattcttacaaagatattaaagcttcaagtaaagtagcaaatacgttggttaatttgctagcacagggagttgcaggtggagtagtaaatgattttaaattgattcttactcctaaaaatttatatatacaggctattactcatgctgtttggggagggctatctgatattgcttatacagataaaatatcaagagaaaatataaaatcatttaatgtcaaaaatgaagatgcaaaagaatatattgaaataataacaaaagatgataaagtagcaaactttattagagataatgaaaaaaagaacgatttagcattagtgatgtcgtcaattttaaaagaaggtaaataaaattcaattgaaaaatcattgagaaagtcatcttgtatggaaatgtcatttagttaactaaatgacattatttatatagtggcttttttgatataaggtgagttttaatgctattagcctaaactatatatagctgctcttaagcagaagtaaatcgcgttttgctgattgtagtcttaaacttataaattgtacaaaatcttaattggaatttatagtaattataaaagtacgatcattaaatactaaataaatcttgtagatttattctcttttaagatatagtcacttctccatttccaactacaactattttatatccatctttaagcggaagtaaattatatttctgtgattgaggtctcaatcgtaaagactgtataaaattttgttcggaatcaaaaacaagtatgtaagcacgctcattataagaatcattttgaatagtataacttgtattaggagatagttttaaatcttctaatgtgtagaaccccttttttaaaactctagatatggacagagcctgaattgttgaaatatttaatgacaaaaataagaaaaataatattgaaacagtaaattttttcatagatatgaccacctttatattttttgctaaagtaaactaatctatatactctaagaaatagtaatttcaccatctccaattattattatctcatatccaatttggataggtggtaaagcatatttttctgatttagggactaatcttataaattcctgaacaatttcatttgaatcaaaaagaactacagaaacatattcagtgggagaggtattttgtattgtatgcagagcatcaggggataaatttaaatcttttgttgtataaaaacccagtctaagaattctaggctgatcggcagaagccgttattgttatattaaataataagaaaataaaaaatataatgctgatttttctcattaaagtaatccacctttctaaattgaaccgtaaatatattttattttttgaagataaaaaaatatattcacaaaacataattttaaatattttagttctttgctcagtaacaatgcatttccaattttcatattatgttatgaagaatatgctgcagatgtagcagggagggaaattaatgactgaagagcaatttgtggtgtttcatataggaaaagagaggtatgcggtgccaatagaacaagttaatgaaattattggttatgcggctcctactaaaataccattgagtagagaatatatactaggagtcatgaatttaagaggaagaattataccaattattaatttgggtcagaagatctgcataaaaaataaaaaaagaaatgatgaacagaaaataataattattgaagatagtgaaggagcttttggtgccatggttgatgaagtagatgatgttaaaaggattcagaaagatagtataaaaaagattaattatgatgtatgtaacggaaatgaatatataattggaattgccaaacaagataattatctaatagttatattagatttaaatttattttggaggaagtgttcaaatgaaatttacaatcagaaataaacttattgcttcatttggggtaataattttgctaacgtcttttttaggagtgtattctataatatcaattaaaaatgtaaaagataaagcaagtgaaattgcagaagtttggtataagaggagcgaattggctcatactatggatcaaaatatgtcagaatatagacttagagaatacagacatgtactagaagatgatcctgacttaatgaacgctacagaaaaagaacttcaagatttgagagaagagtttgaagatgaattaaaagaatatcaaggaactatgatatcaagcgatgatattgagatatttaaagaaattaaagagtattatcctaagtattttgaaactagcaggaagactattcaattaagtagagaatctcaaaataaggatgcatttaatttaatgtatggagaatctagacaggattttgagaatgtaaatagcgcaattgaaaaacttgttcaatataaccaggaacaggcgaatttggccaatatacaaaatgatcaaatttataatcactcaagattaatgctcacactgaacgtaataattataataataatcagtcttgtagtaacaatatctataataaatattattacaaaaagaataaactttttggttaaatttattaataaaactgcgaatttagatttagtatttaaccaagctggtttgaatataataaaaagatataaggacgaattttacgatatgggtattgcagtagcaaacatgagaagaacactaagagaacttgtggaaagtattaaacagaactccgtaaatgtagcattaaattctgacgttttatcaaatataatatctgaaacatctcagtcaatagaggctatagcgaaggcaattgatgaaatggcacaaggttctactgatcttgcaaggaatactgaaactggagtagataaattagaggttttagcaaaagaaattcatgattcggtagaaaatactaattcagtgaagaattatatagaattggcgttaaaatcaaatttggaaggtatggagaatataaataaattaaaaagtgttgtagaatcaaaccataaagtagcggaaaatatacttgatcaagttagtgttttaaataacaaatctcaatcaattgagaaaataactgacgcaattaagggcattacatcacaaattaatatattgtctcttaatgcagccatagaagcagcaagagcgggaacacaaggaaagggatttgctattgtggctgaggaaattagaaaacttgcatatgaagctgcggattcaacaaaagaaatagatgctatcgttagagaggttaagaaggaaataaataaaactaaatcagaaatgataacggtaggaaatatggtaattcaaatgggtgaggtatcaaatgatactgaaaaggcatttaaaactatagaaagttcagcatctaatgtggttaagcaaatagataggatagtagttagtataaatagtatagacaataataaaaatgatgttataggaagtataagcgatatgtctgcaatagcagaagagtcagcttctactacggaggaaatatcggcatccatagaacaacagtctgcaagtatggaacaaataaatcaatctgcaaaagatttaaagaatgtttccatagagctgcaagatttaatagctaaatttagaacttaaactaatgatgaggtgtagtaggtatgaagattctacaccttaaatttttttgaagtatatggaagttaataaacaatgaaaggaatgtttaccaaatgtgttataattgataataataacaaaagttaaagatataatttaagcttatggggggcaaaaaatgcaaaacatatatctttttatttctactttatttgcatattttacgaaaggtataactggctttggaaatacacttgttatgggttcgttattttcctttgtagtatcaaataggttaacaacaccagtagatcttctctttggaattccaacaaatacatatatggcatggaaagaaagaaaaaatatctctttaaaaattgtcattccattatctctcatgctgctggcaggtattgtacctggaacattactattaaaggctggaagcgatcggatattaaaatgtatactaggtgttgtaattgttggaattgcagtagaaatgttaacaagaaagcctagtaaaattcaaaataagaaagctagcattatttttctcatagtaataggagtaatttcaggaatattagctgggctttatggaattggagcacttttagttgcatatgtcagtagaactacagagaataaaaatgaattccgcggaaatatttgttgtatttttttagtagataatatatttagatttttcttatacctatttacaggaatattaactaaggaagcattaattatggctttatgtctttctccagcagttattattggaatgattataggagttaaagttgattcaaagatggaagaagaaacagttaaaaaatcagtaattgctttacttatagcaagtggaatgattttatttttaaagagcttttttagctaataatgcataacccaaataataaaaggacattagatatatcattatcaaattaatttttaaaattaaaattagaatatttaagtaatattaaaaacatataataaagtaatgaaaactatgttataatttatatagtatagtttttactattggataaaatatattaaatttaagggggagttaaatgacgaaaaaatataatgatatttgggttaaagcaagcagaatactatttatgataataggttcgattttggtagcagtaggtttagagatattcttgatacctaataatataatagatggaggtatgactggaatatcaattatggcaagctatctaacaaaagtacaactaggagtatttacatttctatttaatttaccatttgttataataggatataggcaaataggaaaaacattcgctatttcaactatattttcagtaatatgcttgtcagttgtagtaacattgcttcatccagttccaggaataacacaagatgtacttttagccactatatttggcggaattataataggagttggagtaggcttgattataagaaatggtggttctttagatggaacagaaattgtagctataatattagaaaagagaactgcattttctattggggaaatagttatgttttttaatcttttcattttaggtacttcggggtttatatttggatgggatagagcaatgtattctttaatagcatatttcattgcttttaaaaccatagatataacagttgaaggtcttaatgagtcaaaagcagtaataattgtatcggataaaaataatgaaatatcagaagcaataatggctaggcttggtagaggaattactttgttagatggaaagggcgcttatagtggcacagaaacaaatgttatttatgtggttctatcaaggcttgaaatagcaaagctaaaaaatattgtccatggttttgatgaagatgcattagttacaattacaagtgttgaaggaacgggtaaaaaatacgcaaagaaagctatacattaatttatagcaatcataaaatataataaaaatatgttaaataattgcataagattatggaattaaaagagccaaaattaattttagttttggttctttttgcgttcttatttacaaaataccctaaaagtagtaatatatatgcgaacgtatgtttgcaataacgtcgtctgataatttaaatatgtttaggtattatattgaaataaccaactttaaatattaaatgacattatatataaagctatagggagatggttctatgttaacagaaaaacaacaagaaatattggatattataaaaaactatataggcaaagagaagatatctccaacggttagggaaattggaaagttagcaggattggcatctacgtcaagtgtacatgcacatatagagagattagaaaggaaaggatatatctataggtcaagtaattgcccgcgaagtattcgaataaaagataatatttaattaagatgaatattacagagcataaaagttcaaaaaaatcaataaaaactttagatgggactattaaatctgtaaatgaaaataggaagattgtattagaaacatatctccccaataaaattgatatcttattaatatgtaaaattttaaagattttataatataagactattcaaatgaattttagatatttttttgatttgctaggaaaaggtgatattaccgcctccaataattatgattatggaaccaaattctaaaggttttacaaggtaatcaggagaattcggttcaagtctcaaaaattcctgcatttgttgatttgagtcaaaaataatgataacagatctaccagtaggggatgtatttctaactttataagtagtatttggtattaagcctatatccttaactctgtaaaagccttcggttaaggtctttgggttgggatcagcataagcgctccttatactcatactaagagacataaataagaaaacagaaaatataataataaattttttcattggtacaactacctttcatagttttgtctatagaatcaaactattctttctagcttttctttagtatgcgattattaaataaaaattatgtataattcactcagtgaaagtacagtagaagacataatacttctagcgggtttctatctactatttttctatatttatattttggatagccaaccatgacagctcctgttataactttgttatcaggaatttgaagcagttctagtagtggcttatagtttgaaaaagcacacatttcaaataatccagcccagcatgaacctaatccaagagtagtagcaaataattcaagatatgagaatgcagaaatagtattttttattccatttttaaaatcttttgtagatgttgctaatattatgtgtggagcattacgtaaaattgagtcttcaccagcttctctataatttttgacatgtcttgaaaagctccaatgtggagatggggaatttttaagttgatcttccatccattctactactatgcttgcagcttgttgtaaaatctttttattttttattacaatatatgaaagtccttgggtattactagctgtaggtgcaaaacgagctatgttaactaattttaataatgcctgttgaggaactttagcttctttgtagcagcggattgaacggcgagacctaagaaaagattcggcagtgctagaatctataattggaaatgattctaaatataattgattagataaaggtgttttaatattatctattgaactagagggacatactgcaacacaatggccacaggtaatacaattatctgggtgaatagctattggtccattttcattcatagataaaactccacttgggcatacatttgaacaaagtccacatttaacacatgttgattgatttacagtaattaagtccattgatatcactcctatttgagaatatttaataaagttctagattaattattttaggatacttacaaaatataatttatacgttataggaattattatcaagaacgcactttttagtaacgtagttactatttatatacttgaaattaaagaggtagtcaaaaatgatgagatttaaagaaattgaatacaattgttctatggaattaactttaaatattataggaggaaaattgaagccaataattatttggcatttaggtaaaagaaccatgagattcaatgaattaaaaagaagtttacctaatattacacaaaagatgttaactcaacagctgagagctttagaggatgatgagttgattaataggattgcttataatcaagtaccacctaaagttgaatattctttaactagctatggacgaagccttctgcctattttagctaatttatgtgattgggcaattgattattcaaatactgttgaggaaaagaatatgcttaaggaaaaaatataataggaaattaaatgaaatttagaatacagttctcttatgtaggaatacattgggatggggggactcctacaacgaggagtccgaaaaataattatgaaaacttaatttatgtcacataattagtattgcacatatagagagaaatattcaaaataggaataaaaaattgaatatttttagatgtggattcttgaaagatgatttaattaagagcaataaagataatagctaaaaatatttgtatttactcatgtaaaatatttattgccataaagtgtttctgcattttgtaagatagatacattatgcatatttgataaagttgatataagcaaagatttaccgagaactataggcgattggatactaattgtatataccaaaatggaaaataagtatttatttgataatttgagattgtaattaatatataattattataaaaatataaaaaatagaggtagtatcagtgggggacactaacgatactgcctctattttaattaagatattactcttttcatataaaagtattgaccatgtttaagtaaaatatacaattacaacaaaaaatttaattatcattaattaagttaatatcagaactaattatcattataaaaagcatgattgatataactaagaagaaagttctaagtgaggaagtacatatgcataggtacgtgtaacataatttatcatttgctcataaaatatattacagtcagtaaacttatgataaagaggaactgaaattatgtcaatttaaacaaaggaaattgaagttactactgcagagaatcaatttcaagctgaaataagtgatggcaacattgttgattctttatttcaaaactctatacaaatatcgaagactggtcctgcatatagcagagttggagatatagtaacttacacctatgctattactaatacaaatctactaggagatggaacaaattttttgatttagcatacatttatataattagggtgagaaatatgtatacagaaagaactttaataagatgtatattcaagtacaaaggaaaaaaatataatattgaggatataatgccacattgtttagaaaaagaaagcttactatttttatatgaacacgggaattattcagatgatatctatagagcatctttaataagaataagatatggtgatgatgagattcctaaattaccaaaaggaagtaatgaaattgagttagtagatattgatataaattgtaattaagcaccacaaatgtaggtgctattttaatgtttaaaactatgatacgaattttaggttgaagttcgaagagtataataataaaaatacagaataactgaacattatgaatacaaaagaatatagttagaaagtaaaatacattatatggaatatgtggtataatgaattcaatatgttaatattaagagctgttaatttagagaaaaaggtattgttagatgtttcgtatagtacataaaattaataaagcagtataaatttatagctccacaggttataaggtgttatgtatcttagttaaataaattaaagaaatgttttgtaacaggggggtaaccaatgaaagtagcagtcttattagatattcatggaaatggagtagcattaaaatatgccataagagacttgaaagaactagggattagcaaaattgaaatagttaatgagcctctttttagaggaggctcattaaatggattacaatgaagggaaagttataatttatcccaggagtattatatggagttaagaaataaatattcattataaggaaattattattgctataagataataattatgatttgaataaatttaagagtgagagctctattgctgaatagtgattgctatttcaccttttccaactatagcaatacgatcatcatctaaaatagtacctaaatttacagactcatttgcagtatcaaactttttataaaaaatttcattaccatttgggtcaaatattattaggcttgcaatctcatctggcgttgtaagcatggctgtggctttaacttgttgcgtatctgtaatatcatataccccttctttatatgtatttgactcgaaaattgcttttgcgctgtgtatagtagatactattaatatcaaaagtgctattaaaaaagttcttagtttcatttatactagcctcacttcccgatatttgaatttggataaaaaaattatgttaataatacatgacgtgtcaatatactgttattatgtgaatacttagttagactattcataagtagcaattgttgaaaataaaaaaagctctcatgttgagagctttggagatttaaattgtgttcatttaggatatttgttttttaattgccagaactgaccctctttacgagggcagctgttaattaatagattaaaataaaattcagattataatcttttcaatagatagtatatgaagttacaatttaattattcaaatcatcaattggtaatttatgcaattaagattgtttgcaaagctgataggtaaaaattgttggcatcaaaattagggttggaaataaagagatgttttatttaaagaagggggaagagcaatggaggttaaaaagatcataaatgacaaaaagaagtttcttgatttattgatgttagcagatgaacaagaagatatgattgatagatatctagagaatggagaaatgtttgctttatatgatgatgatttaaaaagcatttgcgtagtagtaaaaaaagatagtaatatatgtgaattaaagaatatggctacatatgagaaatatcaaggaaaaggatatgggaaaaagcttataagatacattttagattattataaaggaaagtgtacaactatgattgttgggacaggcgatagtaatctaacaattccattctatgagaattgtggatttcgtgtatcacacagaattaaaaatttttttacagataattatgaccatccaatcattgaaaatggaatacagctcgttgatatgatttatttaaaaatagacttataaaaaatgaaatagaagagcctaaggaaactaaaatttttcaatcattaactaaaagctatggcttcgtgcaagaaggtttattaataaatgatcgtatccacaaggatggaaaatattataatacagttataatgggaagaataaatagcaccagttattaaaaatttaatgaggtcgtatgaataaagcattatagttttattttctttcttaaaactttattggaagttttaattattatattatagttttttgagtcacttattgctccaacattttcaaaaatagcataaccagttacggaagtatgttcaggtatatttgtattatttagaatgttttctaataatacgtttgaatcgagagatttaaggttatttttagcagattgtgttgttggaaaagttgctaaatgtgatttaaatccagaagttaattttacttttataacatctattggattagatgagttattttctatagttagatttataattgctattttattgtttttattatagtaactttttgagttgttgcaagacagttttaagttagtattaattattaaaaaagctttataagctagtagaaaagtatcaatcgttaaaaatataagtaataaaggaataaaaatatttaagttcgacattataaatccagtcattctttagccacctttcacaatgattttatcatatatttagataaaatagaaaatcaaagtttaaatttcaagaaatggagatattaacaatgaagattattgaaaagaatccaagtgatcctgattccatacgtttaatggatgaattgtctaaagaactggaatttataactggagatagcggaagaaattcctttaatccagaggatgtatgtgttacccggtccttgtttgtggttgcatatgatgataatggagaggccgtaggatgtggaggaatacggtatattaataaagatatagcggaagttaagcggatgtttgcgaagattaagacaatgggtgttggaagtgaaatactatcatatttagagcttcaggcaaagaaaatgggatactctgttatttggctagaaactagattaataaatgagcaagcagtaaatttctataagaaaagagggtaccatcagatacagaattatggaaaatacaatggaaattttaaagtaatctgctttgaaaagaaggttatctaataatataataatatgaaaatcagtttattatacttaatataagctaactggtttattttatagagatttgtataaaatttaatattaataaaagccaaaataaatattttctttcactgatgacaacaataatgttaaacaaaagtgaaagagaggatttaaaatgaatatatcaaagagaatattagcaatcctagagattatatttatcgttactgcaatggaggtatcagtatgtgatgctagagttattgcaggaacaagcggattaaggcagagagctgtaatgatagatgtagtaatatataatttcaaggataaatatgtctctttagttaaggaaaacttagaagaaattcaaaagcaaaatgaaggaaaagtagtatttagattttatgatggaaagggtaaccaatccacacaggatgaagtactaagtaatttggtcagtgatagcgcggatattctaatggtaaatttggttgatacaaaggttacacaggatgttattgatagatttaagtctaaaaatatacctataattttttttaatagagaaccattagtggctgatgtacttaaatcttatggtaaagcttattatgtaggaacaaatgctaatgaagctggagagatgcaaggaaaaattattgttgatatatggaataaggatagaaagtttatagataagaataataatggagtcttgcaatatgttatgctagagggtgaacatggaagtatagaggcacgggaaagaactgaattttctattggaacaataaataaagcaggaataaaaactgaacagcttgcattaaaagctgccgattggcaaagagatctggctaaaacaaatattagttcactacttctgcaatatggtaagaatattgaggcgataattgcaaataatgatgagatggctataggtgctattgaagcattgcaaagcaatggatataatttaggagataaaaataagacaatagttgttgttggaattgatgctacagctgaggcacaagaattaattaaaaaaggttttatggcgggttctgttatgcaagatccatatgaaatggcagaagtgagttatgcaataggtatgaatgtatttgaaggtagagatgcgctttatggtactaaatataagtttgatgatacaaaagttgctattcgtttgccatatcatgaatatgttgcttaaagtgatttagataggagcttcagattaaaaaaatgagaagttgtttttttagtaaatagtaaaggagtttattatgtttaagagacctaatttttctaatggaacactaaaagcaatacagtgtatttggtgggccgttagtttattaattgcaattgttttaaaagataatttagatttgaaattgtgggagtatctttgtatagcggtaccactaattttaattggagatgctctaattagaaaatttattaaaggtaagatataattaattatgagaattatatacatttaaaaataaaatctagtaatatttaatgaagtaaattacatgtttggttgttgcagattaatgatacaagctagtgagtttatcaagtatttaagtatccttattataaaaatattgaaataataacatgtatagacctcgttaatgaatatatattaaagatagtaattttgattttaagaggtttaggatgatattagaaataaaaatagtattcaaaagtggatatatcgggtattttactcctttaactgatgaagaaccaacagaagagaatatattaaaattaagagaacttataaggaatgcaaagcaacagggaatgagaggaagttttgaattaaaagagttaaaaacaggttgtataactgtaatagatattcaagaggttgccgcatttggcactaaattaatagaaaagacagggatgaataatgagcaaggtagcataagaatacgtaagaaaaagaaaaaagcttaaatttacaataaacatgaagcctattgataaaacttaattaataatttatagacagagggactgtccattaagtaaggcattcacaaagcataatgaaaatggttttattttggtaggaaataaggagaaaaaaatgattaaagattttaaattggataatttgaataaggtaatggaaatatggcttgatacaaatatagaggctcatgattttatacctaaagaatattggaaggataattttgaattagttaagcaaatgcttccgtcagcagatatttatatatttgaagaaaataatattataaaaggatttataggaatagtagaacaaaattatatagctgggctttttgtaaaaaaagaatatcaaagagaaggtgttggtaagaagcttatagagtattgcaaatctaaatatgataatcttacattgcacgtatttacaaagaacgtaactgcagtaaatttttatatgaagaataatttcaaagttatagatgaacacataaatgaagatacaaaagcagtggagtatacaatggcatttggaggaaaatagttcataaggttttattagtatgcacatgcactaataaaaaaatattaactttcaactttaaggaagataaaataaaagttttaagtaccatattttgaagtgagtttgtagtacttttttaggctaataaaaatttaatttatgataattgtaatttaggattaaggctaaattaatttttttcagatataattaaaacactttgaagcaattaaaattaataatatactagtactaagatttattatacttgaattagttgctgataattagtaagtataagaaatagaggttgataaaatgaaaaaacaatatctaaaaagattagttgcaattggcttaatatctacaagtgttttagcggtggctccaattaaagcatttgcagcttggaaacaggataatgttggatggtggtatacagaaggaaatgaatatgctacaggttggagaagcattaatggagaatggtattattttgatggcaatggttatatgaaaacaggttgggtacaatatcaaggaaaatggtattatctatatagtagtggtgctatggctaaaagtactacaattggaagttattcagtagattcaaatggagcctggattcaaaagaatgatggcactactggaaatacagctgccacttcatccacaaataatggtacaattaatacttcaacaaatgttgactctgaatctcaaaagataagtggtgtaagtggtataaagtttgatgatgttacaaaaatagtattttatgatggaagaggcggtaaatcaataacaataggtgataaagagaaagttaaagaattcatgggatatttagatgggtataccattaaaaaagcaacaaatgttgaagcatcagatggatatatacattctgcacatttttatataaatgataaggatgtaatggatataacatttgtaaatcctataattatcaataataattattataacgcaataaaaggtgaattagacacagataaaattgataaatatctaaaatcaattgattcctcttatgttacaacaagtgaatggaatgatacttataaaaatcaatgagattagttaatgttgttaaagcttaaatattagagtaaagaataaataatagtataataattattgagttaaacaaaaaatataatcataatgaaaattaaaaaaataagcaaaataaatgggcagtagccataaatttagaagtacattttagtagatagaattatttatatttttacattagatatctaccgtaaaaatgatatcaaaaatttggctgctgcctttgtttttgtattaaagaactaaagaatatgtcattaatttataacataaatttcagtgagaagtgaagaaaatgtcatttacaatgattaatatattatggagtagtaaaaatgttactacaaatggtttttaaaagatcaattatataaatataagataaggcagcaatttaaaaggctgccttatcttgtatttaatgttaggagaatagtaattcatgtctaatataattatagacaaaaatagttatatataatcattaaatagaataataatttccatataattaaggatagctaattaaggaaagttatttatgattaaaaaaactatgattgtttagaatattccttttaaggaatcctaactgtattacttgtctcatcgaatttataatttgttccgttaagcggattttgccctgaaacaatattcattcctatggaataaactgcatttgcataattaatagttaattagaaattgttatctataattatcagcacaataaaaaatataatgactaagcatttttaagtaaatgttactggactagtgccaaaaattattatagatgaaccatagtcaagaggttttatagtatgttgaggcgattggggaccaagacgtattaattcctgcaactgctgatcgctatcaataactattataataactctgctgtttggtgagtcaattttagcagccataggtgaacctatttttaggtttgcatctcttgcactgtatattccttgactaagagttttaccaacctggccataggcaagttgtgatatggtagtagatgagattaatagaaatataaaaattaatataacatatcgtttcattaaaactatcaacctttcataaatttagattatttaaataatgtattaattattatgtgaatattaagtgaaattattcaaaggaattaatcaagaggtagtggattttacaatttgattaaaggtagttcaatttaatttattagataaagttagagaatttgttagttcgggattatagctaaagagatatgcataaataagttaggaatttgtgaaatatacatgaaagaaattatattaataaattttagatattataatgttgtagggaataaatgtataaacatatttaaatataagttcatatactattaactagaataaataatactaaaggaagagtagaatgcaatcttcttacgaagcttcagctgacaaaatagaatttacagaaatattaggtaggtattcatttaaaacatctatagataatggagcaatagatggaattgtaaatttaactgagctagctccaaatggagttgtgggtcgatatccgtatatttatggatattataatgcaagtatattgactttaacaggtacatggtcaacagtatcttatccttatgcataccctgaaagcgcttgtgtatttggcgcatttaaattttatttctataaaaagaatggaaagataggatttaatggcacatggggatgtggacgtaatcaatatggcggtcttaatggtgttgattattggaatggtgtgaaaatagaaaatcaaaattgattattcacaaattcctattctaatcgatatgatatagattatagatagttttttggaggttattataatgggttactatgtcaaagtagaaccagatgtaaagatctatgtagaagaccttaatgagggtgccgataaaacaattttatttatacacggttggccaggaagtcataaattgtttgaatatcaatttgatgttttgccaaagatgggatatagatgcattgggatagatacaagaggattcggagagtcagacaagccatataggggctacaattttgataccttgtcagacgatgttaaatgtgtaattgatacattaaagttaaaggatataacattagcaggacattcaaatggaggtggaatagctgttagatatatggcgcgtcataaaggttatggagtatcaaaacttgctctttttggggcagtagctccaagtcttattaaacgtcccgattttccttatggactagataaggagacagttttacagctaattgaaggaacatatatcgatagacctaaaatgcttcaaggatttggagatatgtttttttaccaacatataacagaagctttttcacagtggttttttcaattaggattgcaggcagcaggatggtcaacagcagcaattgcaaaggcttggataaatgaagttttcttttctgatttagaagagatagatgttccaactttaattattcatggaatccatgacaaaattgttccattcgaattaggacagatacaagaaaagatgattaagaattctaagcttattccattcaaatacagtggacatgcagcgttctatgatcaacgtgaggaatttaataaagagctaatgaagtttattgaagaataagattttgtaagtaagaaaatactcctatacaaatagttcatatgaatagttattttaataccgtatgattcattaatttggatttgcggtatttttatttactggaaatattagagtctatatgaatctaatattaaagctaagaattaatatttaaatgtaatacgttaattaaaacgaaattccttatatgcaattataaaatgttacacaatatgtagaaagtatttaatgatgaagaaaaaggcacgtttattttgagtaaatgtgcggaattactcgataggttacctattaacataggagaccggtagtattacatggaatatcatggtaagataataaataggtgcaaaagcacaaatgaaaaaagctgaaaattggagggcttcattatggaattatataactccttcgatttcattggggaacaatcatatataatggtagacaatgggatcgctactgaaatcagtaagttatttattgaaatgactgaatattcagaggaagaactattaaataaaaatattaaagaattattcaatatattaaaaatcgggcctaatgccgatttagaagatattgatgataagaaagattattttttatttactaaatcattagatgctaggtttataaatatagatgtggcagaaggtgcaattggaaaggtgtatattttctcagaaaaaccaaattcacgtttagatgttaaattcacagcagtagaagctctatgctctcataacaaatttggaattgctatttttagtactccagatataactctattgaaagcaaatcaaacttatctaaactttctcgataaaccatttaatagtatagaaaattcaataggcaaaaagttaaatgaaataataaaaggatggactggaagttcatcagaagaagtgtggaaaggagtgctttcaagaaagaaaccgttttacagtgatgaatatatgtttgaatttgaaagaggagtgacgtattgggaggctagtctcgctccggtgtttgaggatggaattctaaaatattgtattgaaattacaacagatataacagaaaaagttttagacagaaaaagaatggaagagcaaacaaaggttataaaaaaacaaaatgaacagctgatgatgcaggcaaacctattaaatctatcctacgatgctatcttagcttgggagattaatgggtctattatatattggaacaagggagcagaggaaaagtatggttataacagcgaagaagctataggaagtattagttatgaactgctaaaaactacatttcctattagctttagcagtataaaatcaacacttttaagtgacggaatttggcatgctgaaatagagcaaacaaaaaaagatggcagcaagctttttgttgaaactagattgcagttaatagtagaggagaatgggaaacaaattgtccttgaaactaatcgtgatattactgaacgaaaagaaatggaagtagagttaaagaaacacagaaaattgcttcaagctattgttgataactctcctgataatttatctgtaatcgatggtgaaggtaattatctattttataaaaaccaattcataaaaaaagttgcaactaaattcaataatatagatgatatatatgctgtggcgaaactttatgacagtaatggggataagcttgctggtgagaatcacgttggatatcgtgtattaaatggggaaactgtagaaaatgaaattgttatagctaagttagacgataaggaatattatgttctttgctatgcaacaccaatttatgattcagaggggaattttctgtggggaatttgctataacagagatataacagatttaattgaaatggataaagagttgagaagacaaaaaaaattgttggaaactgtacttgataatatgcaagagtcaatttatgtatttgacaaagatggtaagtatataattaaaaataaagtggcgagggaacgtttttctggagagtttaaagagttaggggaaggttataaagctacaaaactttatgatttagaaggaaacaaaatgtcaatagaggaaactccaatatatcgtgtaaaatctggagaaatagtaagaaataatattgtgaagtttaaaaaagacgatatggaatattacaatatcattagtggaactccaatctatgataatagttttaatttattatatggagtggtaagttttcttaatgtaacagagatgataaaaagccaacaagatttacaagaagtacaagaaaagttgctagctgtagagcgtgaaaaaaacgaaggacttgagcaggcaatggaaatgaaagatgagttcttatcatttatttcccatgagtttcgaacaccacttaatgtaattaatacagctatacaaactttaaatttagtttactcaaatcaaatgactgaaaagataaaagcatatatgggaactattaagcaaaatactaataggcaattaagattagttaataatattcttgatattactcgtgttaatgcaggccggatcacgataaataaaaaaaatatagatatagtttttttaacaaaagctataactgaatctgtatatgaatttgcatcaaaaaagggtgtaaggttaacatttgtatcaaaacttacgaaaaagataataggggttgatgacgagaaatatgaaagaattattttaaatcttctttctaatgcaataaagtttacaccagcaggaaaatctattattgtaaatttacattctgcgaaaactaatatatgtattgaagtaaaagataatgggataggcataccaaaaaataagatagatgtaatatttgaaagatttgggcaggtagagagttctttatcaaggcaggcagaaggaacaggtataggtttgtcattggtaaagagatttgttgaagcactaggggggagtgtaagtgtaaaaagtaatttaggcaaaggtacaacttttaaaatattacttcctaatgagaaagtaatagaagaaaaaaatgaaaaaccgatgattgatttaatgactgataatagacttgttcaaactaccaatatagaattttctgatatatatttatagctaaaggtattcagatatgaatattttatggtgtgaatgatccagcaatatattaattataaaatcatttggaggtgtattattatactttttatagaaaaaataataaggaataggagctagtaacatatagttagtctcctattctaatgaaacaagtgacaaccaccattttgaggaaatggttcggggtgtagttagtggtagttatcatattgcactattattatgtgaaagaatgagatagatattctatttatattttacaagagcttcagattccatggattataggtgatttaacatggattgttttaaagatggatattttggaaagaattaaaattaatagattatgttaaatcaaaggagataataaaattatgatgtgtagtggagagctattagaagaaaaagtacaggaattttgcaagaataacaacagagatgaaggacagatatggcaggttataaataatgctcatacaaggacgtatggacgtaacataatgtgggaaaaggaacaatatcaaaaagaaaataatttgggagatataccaatggctgaacagtttgccaaattaaatttagttcatagagcaatagaaatattaaaaaggctccaagaatgtattaaaaatggttgggagttagaatagaaagcctactttaattaatataaatattaaagttaaatggaaaattaagatgaaaatctaaagcctaagtatggctttagattatgatggttttggataaggctttcagttatttgctttcaaccttgaaatctcttaagcaagcgacaatatttccattgcctcgatgaaaatttacacattcgcaacacttaccatgtctttcgcaattaatattagagcatgtacaattcttttcgttacaaccagccattatgaattccccctacaatctagataaaatattttaattcattaacaattataaactaatttctaggaaatatatagaaaattgaagatgattactgaaattttaatgattagaatttatatgtatgaattatcatttaacttaaaaaagcttattaattaaagttgtattgttcattttgtagagagcaaaataataaatggactaacaggtgataatagtatattattatttaagtcgaaaacttaaaataaagtcataaaacacccgggaaggtagattaagtagaaaatgcttaatctatctttatatttatttgaatttaagataatggttatacagaataatgataaaattacaatatgtgttataattaaggataagaatgaattgattctaaatgaggcaaaattgttatttattgtttgaagatttactattatataaattggaaaaatgatatgatgaattacagataaattagtgttatttctaagtgatttcactacttaatcagaaagaaatttgtatgcaatgttctaataattaagttaattgaaggaaggaaataaatatggaacttattatccggaaaatgaaagaagaagattgggatagtgttgctgatatttatatggaaggaataaaaactaaaaaggctacatttcaagcagaaattcctagatacgaagattgggacaagggacatttaaatataggaaggtttgtcgctactaatagtaataatagaattattggttggatagcgctaagcccaacaagtagtagatgtgtgtataaaggtgttgcagaagtcagcatctatattagtgaatcttgtaggaggaataatgttggatatgaacttatgaatagagtaatagaggaaactgaaaaagaaaatatatggacactgcaatcaggaatattttctattaatgaaccaagtattaaattacatgaaaaatgtggttttagagttgttggaataagagaaaaaattggatgtgatgttgacgggatatggcatgatactatccttatggagagacgaagtaaaatagtaggtatatagaaaagatgacagtgctaagagttaacagctattaattataaatgattctatattttatctatagcgatgaattagagaagacaatattatttaagatagacttaaaatatcaatgaataataccatattcttgatatgtgatataataattacaagataaaaaagaatgaacacaaaaggagagaagtaatggacagtgcagttaatcacaactataagaatcaaggtataaaatttttaaaggaatgggtaattccaatagcagtagcccttataatagctatgttaataaaaaatttcttgttttttaacatatatgttcctagtgaatcaatggtacctactataaacgtcgatgataagatggttgttacaaaaatatataatatgggtaatattaaaagaggagatattattgtattctattctgatgaattaaagaaaacacttattaaaagagttatcgggctaccaggagatcatattgtaatacatgatggtgttgttaatataaatggaaatgatattaaagaagattatgtaaaaaacaatgaaaaatataatagaacctttgatgttccagaagataagtttttctttttaggcgataatagacctgattctttggattcaagaagatggaaaaacccctatatagataaaagtaacataaaaggtaaagctgtttttagattttatccatttagcaaaatgggctcattatcacaataaaaaataagaataaataacatattaaaaatcgcagtattcataataatatattttacttaaagtagtggattttgatttttctatctatctactttaaaaagaatagattgtaagtg

SEQ ID NO: 71 - DNA, 32341 bp, Clostridium beijerinckii
acattatataatttaaatatataacttatagataatataagttatcattaaacattgggttactgaaattctgaatgtaattttattattttagcataacattttatagcttattaagagaagtttttttggctatgattgttcatttataatcatatattttttatgtgggatgaaagggagaattattatgaacacgagaaaaagaaaaagaggatttaaaagagttatactaaatattatagcatttggtattatagcctttgccatttttggagtttatagcggctatatggcaaaatataatagtataaacttgaaggatttaaacacaaaaatgtatatacagaatgcagatgatgcgagcaaaggtaaacttcaagtaaattggaagttcatggcggctattgatggtgttagatataaaaatgatttttctaaagcaacagatagtagcataaatcaattagctaatatgttcatagataaaaatagtagtacaagcattaaaattaaaaatagtcaatataagctcgttgacttggatacagtgttagataagctatcttttgataaagaacaaaaagaaaaagtatataagtatttagatgatttaaaatatattggatctcaaaagaataatttaaaagatgaatctaagcaaggatttattaatgatttatatccagaggcaattgagatatatgataagtatggtgttcttccttctataactatttctcaggcaatattagaaagtggctggggaaaatcagatttaagtaccaaagccaataatttatttggaataaaagcagattcgggatggacagggaaaaaaattaaaatgagtacttcagaatattataaacaaaaaattgaggattactttcgggtatatagtagtaaagaagattccataaaagattatggagaatttctcagcaacaataaaagatataaacaaagtggagttttccaggcgactgattatctagaccaggctaatgctatagaaaaggctggatatagtacagtagaaaatgacaagggagaagaaatttattcgaaacttctgataggagttattcaagaacaaaatcttcagcttttagatttcgaatgtgaaatgaattattttaaagataaaaaataaattatacacattttttatgaatttatgttatattaaaacaaaaaataatagagtatataattgggggaaataaaatgaacattaattctaaagaattaagagatattattaatagtataagagaagcagatacttatgtaatcgctgaagcagatagaagaatggtatcacttgcaaagccgctgaagagtttaggaaagttagaagaaattgctataaagcttgcgggcattacaggaaaagtgaaaaataacataacaaaaaaaatggttataataatgtcctcggataatggggtggttgaagaaggagttgcttctgcgcctcaatcggtaactttagcacaaacaattaacttcacaaaaggattaacaggtgtagcagttcttgcaaaagaaaatgatactgagcttatggtgatagatgtaggcattaactgtgattttagctatcctggcgtaattaataaaaagataagaaaaggaactaataatattgcaaagggccctgcaatgacacgtgaagaagcagaaaaagcaattttaattggaatagaatctgttaaaaatgctaaagaactgggctatgaaatgcttggcgttggagagatggggattggcaatacttctactagcagtgccgtgttgtcagtattaacagatgtaagagtggaaacagttgtaggaagaggtgctggaatcacagacgaatcatttgagaaaaagaaggaagttattaagaaagcaataaaggtaaacaatccatcaaaagatgatccaatagacgtagtttcgaaagttggaggttttgacttagcagctatggcaggagtttttttaggctctgcttattataaagttccagttgttattgatggctttatatcagcagttgctgcacttatagcatttaaattaaattcaaaagctagagattatatgtttacttcacatgactcaaaagaattaggattcaaagttgcaatgaaagagctaagcttaagtccaatattagacttagatatgggacttggagaaggaagtggatgcccattagcattttcaataatgaaatctgcatgtgcggttatgaataacatggcaacttttgaagaagcagaaattaacgacagttatttagatgaacttaaggctatgaataaatgataaatatttaaatgattgcagagtattaaattaactatttataatttaataaggcacatgaaagtaaataataagtaaaaaactactaaggaatgtttttttatgtagaaaagttccgtattgcagtatagatgctcttttcataagtgtatagctgctttttataagtggtatatttctagtcgtgcgaggaagtaaaagatcatcatagtggggttaatatggaatttaaagaatatgttataataactgtatactctatgaaaacatgagtatgtaaagcggttaaaacttatgatattatgttttaataatttgataataatatatttgttttgacaaatgcttataaagtaatgattaagcagcatttttgaatataaaattacttgtttttatgaataagaaaggagattgtttatggaattaggacttattcatatttattgtggagatggaaagggaaagacaacagcggctatgggtcttggaatgagggctgttggacgtcaaaagaaagttttgttaacacaatttttaaaggataatgagacgggtgaattgaattctattgataagctaggaaatgactttgaagtttttaaaggggctccagtaaagaaattttttaaatttatgagtgaaaaagagcaaatagatactaaaagagagcatgaggaaagattttctaaggttactaaaaaggctgtagaagaaaattttgatttattgatattagatgaagtgattgcatctactaatttagatttaatccctttaagtgaagtaataaattttttagaaaacaaaccaaagggattagaagttgttctaactggtaggaatcctaatgaaaagttagttgaacttgcagattatgtttcagaaattaaagctgtaaaacatccatatgagaaaggaataggctcaaggataggtatagagaagtaatttatttttaatagtattttgggcttaaattagagtatatgaattatttaataattggaggttctaagagtggtaaatcagaagttggagaaagaatagctctaaccttaaatagaaatgaagttatatatattgccactatgaatccatatgatagagaagatgaagagagaatagagaaacataaaaaaagtagagaaggattaaattttaagacactggaagttcctagagatttggatagtgtgattaatataatcaattgcaaggatactgtacttatagatagcataacttcgcttttgaccaatgagatgtttaatgcaaatgatattataaaaaatccttcgcataagatactaagtaatttaaaacaaattatgaataatgcaaagaatgttattactgtgagtgattacatatttaatgatgctatacaatatgatgaaataactgaaaattttaagaaggaactagctattataaatagagggttagcaaattattgtgagaatgttatagaatgtagcttcggattaataaagtatattaaacatgaggagaaagtaactttatgaagaaattatacaaaggatttattatggcattaagcatgtttacgatacttccaactccatatgttgaatgggatgatgatggagtaaaaaatatgatgaaattttacccactgattggattaataattggaatattgtggagtataatatattatttagtgggtatattaaatatctcaataattttaaagagttcaataattaccatagtaccatttataataacaggaatgctgcatttagatggttttatggatgtttgcgatgcaattctttcaaggagaagtaaggaagaaaaactcagaatacttaaagattcagctacaggagcgtttgcagtaatatccctagtgactttgttctttttacaatttggaggggtatattctattttagaaaagaataattctctttatacattaattttgattccaataataagcagaagtgttgtagcgtattatcttttaagcagagcaaccataaaagaaagtactttagggacttattttaaaaaagggaccaatgtttatgataagcttattatgataataacattgataataacattaataatatcagtaattttgttaaacatttatggaataatattagttttattaatgagtttaggaattaaattgtcagtagaaaaatgcagaaaagaatttggtggaatatctggagatgttgctggatttgctttggttataggtgaagtggttggaatattaatactaggaataattccgtaagaggaaggatggcatttatgaaattaatctttggtggagcctataatggaaaattagattatgtaaaagaaaaatataaagtaagtaatgaacagatatttttttgtagagatgaaaatatagaatataacaaggaaattatatgtggattacatattttcgttaaagcgtgtatttctaataagcttaacccaatagaagtcttaaaagataaaatagatttgttagaaaataaaataataatatgtgatgaaataaattctggaattgttccaatcgaaaaatttgatagaatatggagagaagaaactgggcgcttacttcagtttctagcaaagcattcttcccatgtatatagaatattttttggaattgaagaggaattgaaaaataatacaatttaaagaaagaggtaaagtagttatagagttaattgaaaatctataacgattaaggtatgaaagaaattaagttatatttggtcaggcatggaaaaacttattgcaatgaaagacaattatattgcggtaaaagtgatgttgaattaagtgaaagcgggaaagagcaattaagggaaatttctagaagggttaagtatacaaaatgcgatttttactttacaagtggggcaaagagagcaaatcaaacattagaaattatttgtccgcagaataagtataaaattttaaataagttttttgagtatgattttggtgattttgaattaagatcatatgaagaactaaaattgtcaaaagagtatataacttggatagaagacaaagaaggaaatgtaaaatgtccaagcggagagagcagagcagaatttagaaaaagagttaatgatggatttgtggagcttataaattatatcattaaagaaaatatagatactgcttttggagtgattcatggaggaagtataggtatactattagaaatgttttatgatagtaagaaaaaattctatgagtggcagcctagcaatggagaagggtacgaacttacaataaaaataagaaaagatgaacaatttgaaatagaaaatgtatctcaaatacagtaagaaaatatgattagaattatttttgagatgcgaaagaaaataacgaggagaactatatgattgaacttagtataggatttgttttggatttattaattggggatcctaataatccgtttcatccagttagaggaattggatatgtggctaaaaaacttgaagcaatgtttagaagaatccttagaaagcatttaaaagcagcaggtctcattgtatggattcttactgtgtcaataatatttgcaattgcattcgcaattgttaacttatcgagagaattcaatatttactttggaattattttagaggggattttgatatatttttgtatatcatcgaaagcattagttgttgaaggatataaagtagttaagtttttattaataaatgatttagatggtgcaagaaagcagttatcatttatagttgggagagacactgcaagtttgagtaaagaaggaataataaaagcagttgttgaaactatagcagaaaatatggctgatggggtcatagctccgttattttatgctatgatttttggagcgcctcttgcatttgcatataaagcagtgaatacattagattcgatgtttggatataagaacgaggaatacatagagtttggatatttcccggctaaattggatgatgtttttaattttattccagccaggataacgggcatgttgataatattagcttctgcatttctaggatatgattataaaaatagctttaagatatatagaagagatagatataatcatacaagccctaatagtgcacatccagaagcagctatagctggtgcattaggggtacagcttggaggggccaattattattttggaaaacttgtaagtaagcctacaataggagataaaattaaagaaattgatatcaatgatgttaagaagactgctaaggttctttatttatcattttttataggatttgtgttcactttaatatttagaaagctaatgataacaatgttttaaatgtcagaaatttgagtggttaacgaatattataatatagagatgtgagagttaatattaaattaaaattaatgtatattgaaatagtgaatttatatttaagtttattgcaatctaaaaataaattaagattgaagcggagaaattaaattgaaacatatatgcactatacatagggagggaagtcatggcaagctttggacatggtggaaatgctaaagaaataagtagagaaaacaaaataaattacaaagacataattgatttttcagctaatattaatccattgggaatgtcaagtagtgtaaaagatgcgattattgaaggtatagatgaaattgagaaatatcctgatataacttattttgagctcaaggattcaatagagaagtttgaaaatgttagcaaagaaaatttgattttaggtaatggagcagcggaagttttatttaatgcagtaagaggagttaatccaaagaattcattaattttagctccaactttttcagagtatgaagaagcggcaaaggcaataaatagtaatattatttattataatttgaaagaggaaaatgattttaatataagagaagatattctacatgatataaatgaaaacttagatttaatatttatatgtaatccaaataatccaacaggtgttataactgaaatagatttattaaaaagaattttgaacaaagcagagagaaataatgttagggtaataatagatgaatcgtttttggattttagaaaagaaagcttttctatgattccatatatagatgaatataaaaatttaattataataaaatctttgaccaaattttttgcacttccaggtataagaattggttatgctatttgcagtgatttaacattaaaagagaagatagaatctatatctccagcttggaatataaatatcttggcagaaatagcaacaaaagcagcacttaatgaaaagaattatataaagaaatctatagaatttatagaccatgaaaaaaaatacctttataatgaagtaagagaaatagatggaattaaagtctttgaaccaagtgtgaattttattttattaaagactctgataaaaatagatttgaaaaaagaactattaaagaataatatattaattagaagttgtagcaattatgttggattagataatagatattatagagttgctgtacgaagtcatgaagagaattacagaatgataaaaataatgaaaaatatatttaaaatgcacagaactgaacaataatttaagttatgtataggataattttattgttggaatcagatgaaatattaagctttgataatgagaggagcaggatatgaatagaaaatttattgcttcaataatgagcgtgtttgtagggatgagtgtaggaatctctaataaagttaatgcagaaattaacaatggctggatcaataacaataatggctggagttattatgaaaatggcagtgtaaagactggatgggtaaatgataaggggaatttttattaccttaaagacgatgggaatatggctgtaggatggattaatgttaataacaagtggtattatatgagtgaatctggagctatgaaaacaggctgggttcagtataaaggagcttggtattatttaagccaaaatggagaaatgatttccaatgatactgtggatggatactatttaggagtagatggatcttgggttgaaaaaaactcaactaatgatgtgacggaagttaatgatgaatctaaaaataatattactatgaaaacagaaaaaactgaatatggtctaaatactaaagaaattactgtgtatatcacaaacaatggaaaacaatcagcttattatggagtagaatatgcagttgaaaaatttgtagataataaatggagtaaagtcccttttaaagaagaacaaatgtttatagaaatcgcttataatttagagccgggaaaaacaagtagtcaagttatttctctagaaaattttgagaatttaactgctgggaaatatagaatagtaaagtttagcggaaaatgtgctgctgaatttgaattaaagtaaaaacaaataagaggggtagtatggataaagaaaaagttgtagtttcattcagcgggggaaaagattgtactttagccttgtataggatgattaaaagtggttataaaataataggattattagttacgtttgaaagcaaaaaggattcgtatttccataaaataccaaagagtgtttttcaggatatttctaaagaattgggaattccacttattgaaatagattgtagcaataagaataattatgaagaagaatttgagatggcattaaaagtttcaaaagataaaggagctgaaatttgtgtatttggagatatagatatagaggcacatagaggttggtgtttagataggtgcaaggcagcagaaattaaaggagtattccctttatggcaagaaaatagggaaaagcttactaatgaatttatagattgtggttttaaggctataattaaaaaggtaaatctaaaggcgctaggaatagagttcttaggaaaagaattaacaaaggatattgttaatgaaataaaaaacttaggatgtgatccttgtggagaaaatggagaatatcatacattagtttttgatggtcctatatttaagagttcaatcaaatttaataagagtggtacagagattacagagaattatggatatttaacagtaaacggattattagattaaagatataaattagaaaaataattcaaaatttgaattcaaatgttggaaatcagagattaaaaataaatgttaagtattggaactcgaatttgaggggagtaaagaaatggataaaaaaagtataatgtttttaggtacagcgtcttctgttggtaaaagtactttagtaacagccctatgtagatatttaaaaaatcaagggttaaatgtagctccttttaaggccttaaatatttcattaaattcttatgtaacaaaagatggattagaaatgggacgagctcaagtagttcaagcagaggcttgcaaattagagccagatgcattgatgaatccggttttgctaaaaccaagtggtgaatatacacaagtaatagcagatggaaaagttttttgtaatattgagccttataaatacaaggaacttaatgaaactttaaaggtcagagttaagaaagcttatgataagctaagcaaaaagcacgatgtaattgtactggagggatctgggagttgtgccgaaataaatttgaaagatagcgatatatctaatatggctatggcagaaattgctgatgcacctgtaattttagtatccgatattgataaaggtggagtttttgcatctatagttggtacaattcaattattacccgaatcagagcgtgaaagaataaaaggggtaataattaataagtttagaggtaatatagaactatttaaacctgcaataaaacagttagaggatattataaatattccagtccttggagttatgccatatgaaaaatttgatattgatgatgaagatagtgtaactgaaagaattaggaacaaagaagaagttggaactttagatattgctattatcaggctttctcatatgtcaaactttactgattttagtattttagatagaattccagatgtgactatacgatatgtggataaacctagtgaattaaaaaatccaaatttaattataatacctggaacaaagaatacaattgaagatttaagaagtatgaaagaaaataaattatttgataaaataaaagaattaaaagagagtggtacacccattttaggaatttgtggagggtatcaaatgcttggaacgttgatactcgataaattaggcgttgagggtaatatatctcaagaggatggtttcggatttttggatataaagacacgatttaatgagacgaaagttacaaagcagactaagggaaatattttatgtgatctaaaatcaattaagtctatagaaggtagcactataagtggctatgaaattcataatggaataagcaagattggtaagaaagcaataccttttattaaggatttagacggtgatattgtaggtgtatgcgacaaagaaagaattgttgcaggaacttatcttcatggtatgtttgattcagaagaatttataagttcatttgttaaatctcttaaagagaacaacgatattgttgttacagaagatataattatagaaaaagtaaatgaatataaagataatgaatatgatagattatctaaactttttgaagaaaatatagatatatatcagttgagaaaaataatggaactttaggaagaaggggatagagatgttaacggctactgaagagagattattagaatatatagaagaacgcgcaagagcaaatgttagaggtaaaactttctataagatgacggatatattagagcaagcgttttggatatctgaagaaaaggcatatgaggttttaaagaatataatagctagaaaaaatataggaaattccaaagatgctattatagatgaatatattgatatgcttaaaaaaggatatggatcaatacaagaacaggtagatttatttggtggggataagtatacgagtgttatgtatgcagctgaaagaaggttaaagcagtatgaaggtggtacgttttttgatcttcttagagaagtttataaaatcccagacgaagaaattatggaggtaacagaaaagtatttaaagtttttaaattctccaatattttcatataggttagaaaaggagacctttcataagtttctacaatcagacctagaggaattagataagcagtttaataggtttgtaaatctatagtattaagttaaaaataattattaagcagagctggttgtagttaagaggtaataattgcgattttaagcattagaaataaatttagataaatagagcatatatgtattctaaagaataaagaaaataatagatgcaatttttatacccagtttttatagtattcatgtaataatatactatatgaactgggtataaatttatcattttaatactctaagtattgctaataatataagtagagctcctgataaccaagataattcaaggtgtactttttgagcaaattttcgtccaataactaccccaagagatactagagaaactcctatgataaagcataatactaaaacttccgtatagttaatgttacataggctagacccaattcctactgcaagactatctaatgataatgctaaacctagataaaatgattctttaatatttaggcattttgagttatcaaagtcagcttttatttcatctgcataaacttgtaggacaaattgaaaatcaaagatcttaaatgttaagggactatcggattttgagcattttgaaatatatgatttaaaaatatattcaaataatctatatattccaagtaacatcaaaagtacaaatcctaaaattgcgggaaggttacttgggagtatgcttttaactattgagccaataagtaaagaacaagcaagtgtaatggtgcatactaaatttattactactgcgcatatgggtggaatacgaattttcgaagtaccataagcaatacttgcaacaaaagaatctatgcataacgaagatactaataataaagactcaagcataactattacctcataagttttagatacaattcatgatatgaaagaaaactactattagttacaaattttgaggttttatattattttggaatagatttattaataataattgaaattcctatagaatccctgtaaactataagaaatagtaacagtgaatatataatatattgttgtaataacatattcatatatatagcctttggtaatttaaatatttataatgtagcaatttaatcgcaacatattatatctaaaaaaaataccaataaatatgctgtaaattatattatataaatggaggaataaaatgtataaattacttgcactagatatggatggaactttacttacaacggataagaaggtttcaaaaaatactgaggcagctataaaagctgcagaaaaaaagggtgttaagatagtattagcatcgggaagaccattagatggattaaataggtatttagaagagcttgatttaataaaaggtgaggactatgtacttagttttaatggcggattagttcaaaatactagaggaaaaattgtctcaaaggtatgcttaaagggaaatgatttaaaaaatatatatgaaataagtaaaaaacttaatgtaaatatacatgctttttctgcaaaggatggattaataacgcctaaaactagtcaatatacggagtatgaagctacaatgaatggaattgatattactattaaggacttcaatgaagttgatgacaatgaagatattataaaagtcatgatgatagatccccaggaaatattagatccagccataaaggaattacctagtgaaatttatgagaaatatagtgtatttaaaagtgcaccttactttttagaatttactcataaggaagtagataagggacttggattaaaaaaacttggtgaatatcttgggataaaacaagaagaaataattgcatgtggagatgctggtaatgatttatcaatggtaaagtatgctggtcttggtgtagcaatggggaatgctactgaagaaattaaacaagctgcaaattttattactgattcaaacgatgaagatggaatagtaagagtaatagaaaaatttattttaagtgaatctaagtaggaatctataggaaattgttttatttctattgcctaaaccacattttgataggcgatataaaacaatttctttttattctttaggaactacctatcaaggcaaatccctcacagagtataatgaaagttgttttattttcgcaagaaaattataatacggtgaaatatatggacattgtgcggcttgtgagtataattaatataatagctcctgcgaaagtgagggataaaaagaaccaaaacaatataaaataaatatatttaattaatgaaatttgatgtttaaggtaatataatatatttatgtacctatacggtaggattaatttacttaataattaaaaaattaaattaattgtttggttattattataggtgttacataaagaaaggctatttacatatggtctatatttaggggtatggtataaataataatgatttatttagggggagtataagctttgagattagtcccaattgaaaacgtaaagccaaacacagtacttggaaaatcgctgtatgacattaatggtagaattctacttagagctggagtagttttaagagaaaatacaattgcaaaaataaaggaaataaatattttatcgatatatatagttgataaatatagtaatgaagaaattgaagatattattaagccagaacttagacaaaaagcaattataacgataaaagaagctttttctaacataggaagacttaataataattcagtaaggaataaagaaagtgattatacttggcaagagcagagttatttttataatattggaaagatggcagtagatttaattgatgatatcttaaatcgaagggatgtaatgcttgcattagtagatatacgaagtatgaataattatatgtattctcattctgtaaatgttgcagtaatatcacttactataggaattgcgcttcaactatcaaaaaagaaattagaagctctatgtataggagcattgatacatgacattggaaaatcattagtacctagagagatatttgataaacagggaagtttaagtgaagaagaaaaagaaatattaaaacaacatccaagacttggatataagtatttatcaactacttataatattaatagtctaagtaaattaatagtacttcaacatcatgaaagaccagatggaaatggatatccagatggattaactaaggataatattattgaactaagcaatattgtaagtattgccaatgtatatgataatttatcaacagacttgccgaataaaagagcaatgtttccaagtgatgtactggaatatttaatgtcgaatgcaggaacaatgtttgattataatatagttaatatattttgtagaatagtaattccatatccaaaaggaactattgtggaattaagcacagaagaagttgctgtggttgaagaaacaataccaggattcccgctcagaccaactgtaagagtaatagaaagtcctagggtaagtagaattagtatgaaaattgatcttataaaagaaatttcaatagttattactggggtgaaatatgaaattgattagtataagcatataaaggcaatcttaatctaaagattgcctttataactattcaaaaatgtcaataaacttaaaattgataacatcaaataaacctttatctgtaatctttaaatctggtattactggtaatgataaaaatgataatgttaaaaatggattgaaatcaatttgtggtgctatgattttgatagctgaatggagattttttaaatcaaactcaatttcaccatatgttctatttgtcataagcccaccaatttcaagtttaatatgagcaagaatatttttatctttaactacaattataccgccgcccattcgctccaattccttagcagcaaatagcatatctttatcatttgttccagcaattattaaattatgggaatcatgagcaatggtggttccaattgcaccttctgaaattcctaaaccttttaagattccaagtcctaaattgccagaagccttatgcctttcaataactgcaatttttaataagtcatctttagttgaggaagtgaaaaatttataatcattgtcctttattgaattaatatctgaaatattgagctttaagtgaatgctttctaatttgttcggaattatttctattgcatttaatatatttacatctttatttggtatattaattttgaaactatcttcacttagcggtggaagatttatagaattataaaaagcattattatttgcgttttttgataaatctgtattgaaattaataagttcattattgtttacaactaatttaccttctttataaacttgagatatattaaatctttctaggtcatctaataatataaaatctgcaatgtatccaggggcaattgctcctttgttatttagtttatataagagagatggatttagtgttgccatttgaatagctgtttctggatttaaattagagttgtttatagtataaataattgagctattaattgatccattggcagcaatatcgtcaatatgcttatcatcagtgcagaagcaaaatctattactattagattcattgactgcaggtaataattcttttaagtttttagcaacggtaccttctctaattagaatatacataccacgtcggatcttatcaagagcttcttcagcattattacattcgtgatcagttaaaatattggcggtcctataggtgtttgtcatcatagatgtgaagccagctccatgaccatcaataactttattattagtaattgaatcgcatatcttatcaattatcttatcatcacattctgagacagaaggataatccataacttcagctaaacctaaaactttatcatttttataaaaatcttttaagtccttagagagcaaagttgcaccagagctttcgaagctggtaccaggaacacatgatggaagcataaaatatatatcaaatgggatgttttgtgaagaattaagcatgaaatttataccatcagttcccataacatttgagatttcatgaggatctgcaataacagatgtgattccgtttaataatgccagcttgctgtattcagtaggtgtgaccaaactggattctatatggcaatgggaatcaataagtccaggacaaatatatttgttagttccatctacaatttcatacccatcatagtcaccaataccaacaatatatccatctttaataccaatagtatctacgaatctattcttattaaaaacatcaattatggtaacatttttaattacgagatcacattttacacttctattagaagctttaatgtgatttattaatgtatctttattcaaataaaagtcctccttattacgaattttattagttatattcactgtgtctaaaaaatatattgccttattataattgaaatttgtgaatattgtcaaaagtaaaaatgtttacaaataaaaaaaatatatttttacttttgataacgtttagatataaaggttttatacataatatggagataaggaagttaggtgcatattataagcttaattataatatgcacctaacttttagttatatgattaattatttaactaaataaattctatacatgttggagttgggatgttttcagattttataaaagttaattctcctgttattgaattaatagaaaatatagatatattatcagaattttcattagcacaaagtaggaatttaccagatggatccaattgaaaatctctaggagaatcaccattacaagaaatagtgtcgatatactttagctttccattatctgaatttatatggaataaacttaaagaattatttcctctatccgaagtatagagaaatttattattcttgtgtatacgaattgcggaaccagattttgtccctttgtagtcctttggtaatgaacttaaagtttgaatattttcaaaagcaatatttgattttgctttataatcaaaaacaaatatttcagaagttaactcacttaaaacgtagtaatagtgttttccattagcataagtaatatgtcttggccctgtgccggcagggaatgtatagcttaaattttcattctgatatagtttcccatcttttattgaagaaactatcattttatcaatccctaaatcaatagataaaatatatttctcatcattagtaaacattgagcaatgaatatgaggtttttcctgccttaattgatttacactagacccactatgacttccaagcataggagaatttaaaatcaagccatctaaagttttgtagacaaacatcttgttttcatgatagtttgaagaaattaaaatctcatgactgttatttagacttacatgacaaggtggtttttcttctgaaagatttgagtttattaagtgtagtttattatcttctttccaatatttaaatgaagataccccagctttttctttaactttacatgttgagtaaagaatgtgtcgttctctatctagagttagatatgtaggattctctatattgtaagctaagttgatattttcaatattacctgaaattgtatcaaaattaattctatagattcctttactttcatttttggtataagttccaataaatccaactgaaatattttcttttagtaccattatatatgcccccttttattgtatatctattagtatagcataaatggaagtaaaagatatttatgaaattttgcagagatctattgattttaatcatttaattatagtagtggaagaaataaaaaaaattaataattgtgtataattattaatgttaaaatacaattaaataatagtaagtttttgtaaatagttaattataaacatttataaactgaaaagaagtaaatctatgatttattaacagtggttaccataaaattagttttatacaagtaaatagtaaaacaattctctataataattttaaaaatgtttcaagaattttagccgtaattttgaattgtaaaatgtgcattggtaatcgaaacctatataaattatcttaaagaatgtatatcatatatttatagtttaacttgtgaaaggtatagcaaaataaattatttaatcttacataattttagtattatatttatttttataatgttgataagaggtggaattttgatataataatatttatatacaaaaataattaaataataatctaaaataagcaataatcacattggggggaaacaaatatgccaataaaaattcctatagaattgcctgcatttcaggttttatctgatgaaaacatattcgtaatgaataatgagagggctaatactcaagatatcagaccgctaaaaatagcaattcttaatttaatgccaaaaaaaatagtaacagaaaatcaattattaagatatttatctaacacgccactacaagtggaggtaagtctaatacagactaaaagttatacttcacacaatacaccaccggagcatctaaataaattttatagctattttgatgatataaagcaagaaaaatttgatggacttataataactggagctccagttgaacaaatggcttttgaagaggttacatactggaaagaacttactgaaataatggaatggagtaagactcatgtattttcaacattctatatttgttggggggcacaggcaggtctatattatcactatgatatacctaaatatgacttagatgaaaaaatgtttggtgtgttctcacattgggttaatgatgagaaagctgatttgacaagaggattagatgatgtattttatgcacctcactctagacatactgaagtcaagcgtgaagatatagagaaagtttcaaatcttgaaattttatccgaatcggaggaagctggagtatttatagttgcaacaaaagataggagaaatgtgtttgtaactggacatatggaatatgatagaaatacattgatggatgagtatataagagataaagaaaaaggcgatgaaatagctttacctaaaaattattttaaaaatgatgatataaatcaaaaaccgttgtacacatggagaggtcctgctagcatagtttttggaaattggctaaattattgcgtataccaaaatacaccttttgatcttaatactctttagaaattttatagataaatataagtgctttttaagcacttattattttgttcttaaattttgtgaatcgtatataaggagatgttgatgaaggaaaagaattttcatttaatattattaataagtatatctgcaattttagttgcatcgggaataaatcctcatgataaatttacatgggtattagaggttcttccggcagtgataggagttatggtcttaataactacttataataaattcgtatttactaacttaacttatactcttatttggtttcatgcagttatattaatagtggggggccgttatacatatgcagaaatgcctttatttaattggctaagagatactttcgacttgagtagaaattactatgataggcttgggcattttgcacaaggatttataccagcaataattattagagaaattttcataagaaacaaaattgttaaaaatatagcatggacaaattttattacaatatcaatttgtcttgctattagtgcttcttatgaaataatagaatttattgtagcattaattactggtgaaagtgcaactgcttttttaggaactcaaggagatatttgggatactcagtgggatatgatctttgcgcttctaggctcaatggtttcagtattaacgctgggaaaatatcatgagaatttattaaagaaaaagcaataatattttctttaacaaaatttgaatattaatatgtcattattaataatttaaatatagtacagttaggaaaatttgcataagaagtatgaatggaactccaattgtaaacttcttatgctttgttttatgcctaaaactagacattccaataagcatgccaatagatcctccaaaaatagagataccaatgagtgttttttcaggtattctccattctttatgaatagctctttgtttgtctataagcataataagaaatcctagaaggttaataattaataaatatgtaaatacgacttttaacataaatttcactccaatatatcatcaaatataaattaatattaatgataacataattcatactcaagcacaaaatatagagatatggagtaaaagaagttagatttacgaaattttcttagtatttcttatttttaatctatggaattagccgcctaaagttacatcttgctcattgtaccaagataaagcatcataaaagtcgtctttcctaaaatcaggccagtaattatctaaaacataaaaatctgagtaaactgattgaactggcaataagccgcttaatcttcttcgcccaccccatctaattataagatctattctagaaatatcttttgattgtaaatatggttgaatatgcttttttgaaatatctgcactttttagtaaatttaaatcccattcccaaccataattgattaaaaagtttgcctttattccgcctaaaccaaatttttttcttttagtgaatggtaatagttcctttggaaagcagctagactcagtattacctaagactaatatttcgcaatcttctttcgtcaaaagcataacagaatcaatgcaagctttagtaaacgctactttttgctcgctgggacgtttggtattatcaattgtgaatccataaaaggttacttcctgaatattttctttttggcataatttaaagacctcaagtcctggatttattccgtgatcatatcccttatctttgcttaatgagttagataaagcccaacgtctatttccatcaggaatgatgcctatgtgtttcgggattcgcataatttttttcacctctcaaatttgatattgcttttaagagtataacccaattaatccaaaaaaatacacaccgatgaaaaaagcgcgaagcgcaactaggatcttgaataaaaaaagcgcgaagcgcaaccaagatcttagatgaaaagagcgcgcacatatgaaaagagtgcggagcacagttcggaacttattaagcgcaattaagaacttagtataaaaaaagcgcgaagcgcaaccaagatcttagatgaaaaaagcacttacatataaaaaaagcgcgaagcgcaattcggaacttgctaagcccaactaagaactttgtgtaaaaagtgcgaagcgcaaccgagatcttagatgaaaaagcactcacatatgaaaagagtgcgaagcacaaattcggaacttattaagtacaaccaggaaatcaggtgagaaagtactcatttatgaaaaaagggaaaagcataattattaaaataggttggatataaacttaaaaaataaaaaccctaagcataagtttaggggatcccatgcttagggtgagtcattataatatataaacgacttctattaattaataaggggtaaataattaactactttacgatatcagtataatcctgaaatgtgtcaaaaatatgtcagaaataaaaaatacatttaattaatataataatatttataaagagctgcatcgctatgaagaataagttattaagttatatgagctgattataaatatttaataattaattataaattaaatgttttttgagcgaaaatagtatatactaaaatattagcagaacaagatgtttatctgaggttagaaatttttttgattaatgttgcttttatacattctaaggaatataccttgactagaattttattaaatggagagcaagaaaaatatttttcattatctatattattcagagttaatctataattcttataagaattgcttggaaaaaacaatctctatctgataaacttaagtgagagtccaaaagtgaagatccaaattttacatttggctactgaactttctccttgcgagaatgtatcatttggcaactctaacttactcagcgaacgaatgtgagtcgagtttcagctaataagtccaaaagtgaagatccaaattttatatttggttactgcattttctccttgtgagaatgtagtatttggaaatgaatagaaaatgcaaataaaaaagtatgtgaggtgtcaatacgtgataggcttaataggcataagaaaaaatactccattggaaattagagaaaaatttatagttaagtctaaaaaatataacgagtattttaaggaattattaaaggagctgaatgaagtagttattttagctacatgtaatagaacagaaatttattttaatgcttctttaaatgaagaagaattattaaaaaagatttttgatatttttaattgggattatgaatataaaaaatatgtttttataactagtagtaaggatgcttataggcatttgtttgaagtttgctccggatttcattcgaaaatattaggagaggatcaaattctagggcaagttaaggatgcttatgaagaagctttagaatttaaagctgtttcattggaattgcatagattatttcaggaagctattacttgtggaaagcgattcagaaaagaagctaagttatttgaaataccagtatcatcttcttcgatagtggttagcgaatctattaagcgtgaatgtactaaatttatggttttaggttatggggaagttggacagcttgtaatgaaatatttgctttcacataaaatccaaactgtctacttggttgttagaaatcctaaaataaaagatgaaatacaggatgaacgagtaaaagtaattacttttgaagaaaagaataaatatattaatagtatagaatgtataataagttgtacttcagcaccacatccagttgtaaaaacagaagatattagtgaaagcggaaataggttagtaatatatgatttatcagttccaagagatgtggaaaaagaggtggcgttattatataggactgaggtttataatattgatacaataagccgtatagatgatgcaaataaaaaattaagaaaagacaagatggaagaaaatagacatataatgaataaatacctaaaggaatacgatgaatggttaaaattaagaagtatttctcatgtaatcaaaaacttaaaaactgttggaaataatgtttacgagaaaagagttcaaactttttcacataaaagcaaagataaaaataatattgctttagcacataaattaattaaaagtacatctgatttttacataaatagggcaattgaagttattaaagaagagactctaaagggatgtggtgaagaatggatagggataatagagaaaatatttatgaccaaggaatagagtattcttatatttcattaatttctaaaaaactaagagttggaatagttggcggaggtaaagcaggaacaataaaagcaagacattttgtaaaaaataaatgctgtgttgaggtaatctctaaaacttttgatggagaattaatagaactttccaaagaattttcagaaatacttaaacttaaaaatgaagatttaagctatgaatttttaagagataagcaccttataattattgcattagatgatgaaaacttaaaaaacatagtgaagaaatactgtgaagagaattataagatatatatagattcatctgattttataagtggaatgggagttgttccgattcaaagaagtacagaaaatgtagtatttgctttaaacactaattatggaaatcccaaaggggcagttttactttctaacaaagtagaaaagactataaaagaatatgatgaatttattagatatataggattaatacgaaacaaagcaaagtcatttccagagtttaaaatgcaaataacttcgtttattgggaatgatgaatttaaaaaatcttttgataatggtgaagcagaaaaagcattaagaagcaggttttcaaaggaaattgtagattatttaattaaattttaaatgagtttgtagatgaatgaattttggaggtagaattaaattaatggataaattgactatagcaacaagaaaaagtaaattagcacaaacgcaaacagaaataataatgagaagtttaaaggataaatttaatatagatagtgaaaaaatgcttattgttactgaaggcgatagaaaattagatgtttctttggcaaagataggcggaaagggattatttgtaaaagatatagaaattgcacttttagaaaaaagagctgatggggcagttcatagtatgaaggatgtaccttatgaattgagtcatgaatttgaaatagcggctataacagaaagagaagatataagggatgtattaatttctaaagataatatatcatttaaagagcttagaaaaggtgcaataatcggaactagcagtataagaagagcttgtcagttaaaacttatgagaaatgacttggagatagtcccaattagaggaaatgttcaaactagattagagaaaatgaaaagtcagaatttagatggaatcatactagcttcggcaggattaaaaagattaaatgaagaagatataatcactgaatattttgatcctaaagtatttataccagcagtggctcaaggagctttgggaatagaatgtttaaaaaatagcagtgctaaggaatattttgaaaagctagagaattcaaatgctaagctaacagttgaggctgaacgaagctttatgagaatgctaaatggtgattgtcatagccttattggagcttattctgaaattcagggtaatgatttatatatgattggtatatatgacataggcggaagaatagttaaaaaagatattttaggagataaaaataatcatattgaattaggaagaaaattggcaaataagatattagagatataggagagatggaatatgagtaaagtatatataataggtacaggtcctggagatgaagagttattaacattaaaggctgtcaaggtattaaaaagatgtactgctgttctttatgatagattggtttcaaataatgttttgaattatctagaaccaaattgtgaaatttattattgtggaaaggaaccaggagctcattcaaaaacccaagaagagattaatgaacttttagttaagcttgcaaaagaggggcatacagttggaagaattaaaggtggagacccctatgtttttggaagaggcggagaagaggtattggctttagttaatgaaaatatagactttgaggtaataccaggggtaacatctcctattgcagttttaaattatgcgggaatcccaataactcacagaaagatagcacaaagttttcatgttataacaggaaaatctgcgcaagatttaaatgtgaattttaaggcattagctaaagaagaaggcacattagtatttatgatgggattaagcaatttagataatatagtggaggagcttattaataatggaaaagaaccaacgtttccatgtgcggtagtgatgagaggaacttcagctaagcaaaaaaaggtagtaggaacgcttgagaatatttcacaaaaagtaaaagatgctaaattacaatctccatgtataattgttgttggtgaagttgtaaatttaaataaagatttgaactggtatgaaaataaacctttgtttggaaagaatatatgtattacaagatcaaggagacaatctgagaaattaaaaaataaattagttgacttaggagcggaagttacaagttttaattctattaagatagaaagcagtgcggaaaacttaaatgattatatagagaagatagaaaattatgatcatatagtatttacttcagttaatagtgtagaaatattttttgattatcttattgaaaaagattatgatataagaagaattaaagctaaaatatccgcaataggcgctgctactgcaaattctttaaaacaaagaggaattatctgttttgcaaaggccagagaatttgttggtgaaggtttagtgagcatattaaaacctcatttgaaagataaccaaactctacttttgccgtgttctgcaaaaagtaggaaatatatttatgaagaactaacaaattgtggtgcaagtgtagataaagtatatatatatgatacggtttgtggatcagtagttaataagagatcttttgatgaagttgacatagtattcttcacaagtccgtcaacagttgaaaacatgattgatatgttagggattgaggaaattaagaaaaagcaggttatagctataggaccaaagactaatgaacctttagaaaagtatggaataaaagcatacgtatgtaaagaacactcagaggaaggatttctaaaagagatagaaaatttactgcaatagaggaaatagatttttaaaataattaatatataaatttagatattaaataaaatgagggacatctttgaagatggctaaaataatggaggagtttgttatgattaaaagaggtagaagacttagagttaatgctgccattagagatatggttagagaaacaagtttaaattcaaaggattttatttatcctatttttgttgttgagggagataatataaaaaatgaaatttcatcattgccaggtgtttatcattattcagttgataggctgtatgaagtagttgaagaagttagagaagctaatatttctggagtattactttttggaattccaaaccataaagatgagtgtggttctgaaagttataatgataatggaattgttcaacaggcaataagagaaataaagaagcttgataaagaattgcttattattactgatgtctgcatgtgtgaatatacttcacatggacattgtggaataattcatgatgaatatgtagacaatgatgaaacattagaatatttaagtaaaatagcagtatcacatgcgaaggcaggtgcagatattatagctccttcagatatgatggatggaagaattggatcattaagaagtgcattagatgagaataactttaagaatgttagtataatgagttattctgcgaaatattgctcggctttttatggaccgttcagagatgctgcaaattcagcaccacaatttggagatagaaagacatatcaaatggatccaggaaatagaatggaagccattcgtgaaacgcaaatggatgtagaagaaggagcagatttcattatggttaagccggcactttcttacctagacataataagagattgtaaagaaaatttcaatcttcctcttgtggcttataatgtaagtggtgagtatgctatgattaaagcagctggaaagcttggcgttattgatgaagaaagagtaatgatggaaactttaacatcgattaagagagcaggagcagatataattattacttatcatgcattagaggcagcaaaagttctaagaagataaaagaacacaaatagatagtaattaaaaaatttatatattgcaaaaataattattcaccataattctaaaaatattacaagaattttagtcgtaattgtgaattgtgcattgcaacatatatatttaaatatataaattttttacaatttaaatataataatatgtaaatatgaaacaataaaaatataaacatatataaatatttatagattttatgcgggctaaggaggagttaaattgaaaaacgttgatatatttaaagaatcagaggaatacatgcctggtggagttaacagtccggttagagcctttaagggagttaatttaaatccgcctattataaaaagcggtaaaggcgtaataatcaaagatgaggaagataatgaatatatagatttcgtattagcctggggaccattaattctaggacattgcgacgatgatgttgtagaagctattaaggaagttagttcaatggcattggcttttggagcaccaacaaaattagaattagatttagcaaaatttatatgcactaatctggataatgttgagatgattagaatggtcaattcgggaacagaagctactatgagtgcagttaaacttgcaagaggatacacaaagagaaaaagaattgttaagtttgcaggatgttatcatggacattttgatggttttttaattgaagctggatcaggagtgatgacaggaggaataccaggttcacttggtgtacctaatgaaagcatagaaaatacgttaattggtatatataatgataaggaacaaattacagaattatttaaaaaatatggtaatgaaattgcgggagttattattgagccggtagctggaaatatgggagtaataaagtcagaaaatgattttatggaaactctaagagatctttgtaatcaatatggttcactactaatatttgatgaagtaatgagtggatttagagtagcatttaaaggagcacaatcactatttaacgttaagccagatttggttacttatgctaagattatgggtggcggacttccatgtggtgcatatggtggaagaaaagaaataatgaagaatctatcccctttaggcggagtttatcaagctggaactatgtcaggaaatccaattgttatggcagcaggtatagcaactttaaataagttaaaaaataatcagaattattatgatcacatcgaaaatataggagctagacttgaagaaggtataataaatatatcaaaaaaatatgatcttccggttgtaatgaatagagttggaggaatgatgactttattctttaatgatttaaaagaagttagaacttatgatgatgttaagaaatgtgatgtgaatagatttaatagatattttgaacatatgttaaaatcaggatttaatttacctccgtcacaatttgaagcattatttttaagtgtacaacataaagaaagtcatatagatgctttcttaaaagcatttgaagagtttgcatcaaatgaaaataaaatgagtttataataaaatgcatcaataaacttataaaaggaatgacttacatatgaataaaattaattatcaaaaggaattagattacttaattgaaaatttggtaaaaaatgaagaggttccaactttactgcttcatagttgctgtgcaccttgcagcagctatgtgttggaatatttgtcacaatattttaagataactatcttcttttataatcctaatatatacccaatggaggagtatactagaagagttgcggaacaaaagggtcttatatcagaaatgaaagtcaaaaatgaaataagatttattgaaggaaaatatgatacggaaagtttttataagttaactaaaggtttggaagaggaaaaagaaggtggagttagatgttttaattgttatgaattaagacttaatgaagctgccataatggccaaggaaaaaggttatgactattttacaacaacattatctataagccctcataaaaattctgctaaattaaacgaaattggtaaaagtttatctgaagaacatgatgtaaaatatttatattctgactttaagaagaaagaagggtataaacgttctatagagctttctaaacaatataaattatataggcaagattattgtggatgcgtattttctaaaaatgaaagaatgaacgatcataatgaaaaaaataagtaagcaattattaaataaaatataataaaaaaagtacaacagataaatacttaatattatataataatacaaaggagaggattaatgtgtctgataaaattatagattttaatgaattaaaaaataaggtcaaagataaagacatagataaattcgaagattatatttattctatgtattataaactggctgagggcaaaatgaatatgtctgatttctccaaaaatatattagcttacatggaagaaaataatatatcacaagataaattaataaatatacaaaaaaagtttctagaaagatatggagtagatccttctttaattcaggggcaatttaaaatacctggatttgatacgggtggaagcaacttagactatcagactattaaaaagacaatggggtttcaggaaaaatataaaagtagaatatctaataaaacaatgtcagaatatttcataaaaaacgagaaaaatgatttgaaagtacttctagagaatttagatgttatattagttagtgagaaaagtatagacttaaatgataatgagttaaatgaatttttatgctcatataaaaaagtaatagaggataagaaaataaatatagtaatatgtgaaaatgtaaaaaattacgaatattaattttctaggtgaagtgtcagataaagtagatgaaattatataacaagtcccaattatcatagaatgttcttatgtgcagaaaagttctgtattgcagtatatctgctcttttcataagtgcatagctgcgctttataagatgtatattttaggacattaaaaagttaagggtgagccataaagaaattagggcataccctttatttttttatacctatgtgtaaagagttggaaagtactaatgatgatagcctgtaatttggctgatagtatcaatcattagtctaggagaagaatgtccgacgtgaagtataatctgaaggaaaacgaaggtaaagtcttgcatcagatatacgaattacagttgaggattagatttgttgcatcacattacctacgatttctataaatatttactctataaaggtgaattgaaaattataaatttaagtaatccttcagaaaagtccataatatcatctttagagatatttgataaatcgtgagcactgctatttaatgtaatcagcttggcttttgagtgctcctgaacacatttatcgtaaagttcctttgagctttcataaggaaccatattatctgaatcactatgaattatcaaagtatttggattcgatttgcttacatagtttataggattatatttttttattacttcttctttatttgaaatagaagcaaaaatttttgttaaatcataatttaaatcttgagtatttagtagacttaaatcagttggtcctgcaaaatcgattaagtattttacctttgaagaataattacttaaatctccatcatctataaactcatcatcaccactataacttgccataagagaaagatgcgcaccagatgaaacaccaatgatgcctatttcacttgtattaagattataggaatattgattcttatttatccaccttatagtatctttaacatcagaaatttgcttggtgaaattttctttttctttcataagttcataggaagtacttatgattgtataaccttgttctctaaaagtatctagtaccggacttaatgcatcaggaatatttttatcgccataagcccagcttccaccatgaacatatacaagtactggtgaagatttatatacttgatttattgggccgtaaatatctaatttcaagggaataccattagtatttttataaataacatctttgtaattcattgaacttgatgatttttgagtgttaaattcttgtattgtccatgcgtgattttttaaagaaatatatttatcagcaattctgtatgataatataattcttttgtagaaaaataaactaaaaataaaaagtacaataaataaaattaagaaaaatcttttaaaaaacttcttcattaaatactgaatgcctaatat

SEQ ID NO: 72 - DNA, 31843 bp, Clostridium beijerinckii
caaatccaaaggattcaatgttggctcatcttttctgcatctcctccttacggataaaatacatgatttagatttaaaatctaatgcctttttttataaatgtccttgacaatgggaccactttagaaataattattccaaagcagccttttatatttgttaacaataaaaactctatttaatttgaaaaaactcatctttaatattcccatttagcgtcggcgataattcatttaatttccttaatatactagtcttactctcaccacctgctaaagttggaatataatcatttttatcatttcttgaagaaatcattgctggaattactttatattcaagaccagataatttatcatcttcaatattaactttaatttgaagtataaaagttcttttatctgatggattagaatttcctccaaaacaaaagtttcccatggaatatgctataaatctccccttataattttccatactttcaattacatgtggatgagaaccaataaccgcattagctccattatctatagaaaatctagctaaacttttttgaacatcatctggttcatattttctctctactccccaatgaaagtatggaataacaacttctgctccctgctttcttaactcactaatatcgcttattattttagattttaaattattagaatattcccaacctgtataccctaaaaatccaaattttattccttgaatatcctttaagattttatatccttcaccacatatatcaatattcttttcttttaaagtattaatcgtatcatttatcccttgctttccataatcataaatatgattatttgctatcgtaacaccttctattgatccgttagtaagaatattaacatattccttaggtcctttaaaattataaaatacttctccatctttatgtgctttatctttggaatctgtaaatgtagtttctaaattcactaatgtatagtcatctttactaaatatgctcgatacattttgcatgaaataagagtaattctttccactacctataaacgctgctgttagactaccatcataaggaaatttagtatcagtccctaaagtgaagtcccctgcgaaagaaataacaatcgttttctttattggttctttgagttgattagttttatacttgtcatcatcaattgacttatcagtttctccatttactttatcgttggctgtattttttttatcgcttaatccttctctatactttaaataaattaatgaactagttaagactaatatagttaccaatataaaagttatatattttaaataattatttttcttcttatctcttatgtatgtttctccatggctgatcctagagtttttatcattcatatatagacccctaactttttagttttgagttatctttatataaatactaacatattatacattttgactctatattttatatatattaatcacagatttaagttcttctgctattttcatttgttcccttatggcattaacaataacttgcacttggttagttactccattcacattcttttgtatatcctgtgacttgttagctgcttccattgaatttacactaactacattaattccccttgttatctccattatgatcttttgaattgttacacttgtatttttgacttcttctgccatcttagtaatcaattcagaatcactttcataacttgtcgcagtctgaatcagtaaatcataatcactataaacatcattctctaaaaaagtcagtaagtccttgctataattactcagattattgaatgcttcttggacttcattaataacatcttttatttcgttaacagtttctttgctttgctctgcaagtttcattatctcgtcagcaaccacagcaaagcctttcccttgatttccagctcttgcggcctctatagatgcattaagtgctaataggtttgtttgctctgatacgctcgctattacatctgccattatctttatatctctaactacctttccttgatcaatcgcatttgtaatagtataaatcttttcttcgcagatttcccttgctttctgagccgctctttctcctttttctttaactttaacagccttgcatcttattacttctgctgacttactatcttttatagctatttgatttaatcctgaaaccactgtttttatatcaaatgttgatttattaacattttgagaaatctcacttaattgttcaacttcactcgatattgatttagtagatgaattaacttccactattctttgatttatattacttactattttatctagtttttcacttgattctgttaataaccttgaatatgaatgtatatctccaaccatatctctgtttacattaatagccccatttaagctttctataacatctccaatttctctatcataattcccttcaatcttagcagttaaatctccttcttttaacgaatgtgaaagtttacttaaatcctttaggggcttaagtattcctctcattattcctatggatagaattatagttactacaacgccaatgatagatattatacctgctatattcgtaaatttatttattgagttttgcatttctacaatcgatgccctcatattttgtttagttacagtttgtaccgctgcattatttattatattttgtgttactcctagttcatttataatatttttcatttgatataagcatatagttgcaatagaaaacataaaacttaaaactataacataacttaacaataccttactcttaagactatgcatattacgtctctttaataatatacctttttcctccatcgtaacctctcctttactaaagtaattttaactaaaaccaatatcttatgtcttgtaaattactattgcattgagttaaacgttaacaaagatatcaattattgtttgtttctaatctacaataatattaccagtaattatgtaaataagaataaaagaattccccctaattgcaaacaataactgtttgttaaggaattcctttatctgaaatatatttctaatacttaataaaaatcaagaagtgttagtaaggtttcacctagcatcaattaccttcaatcatatgaacatattctaaatttaaatttcatattttgttacttaaatgattctctttttactagcttagtatctataatatagtgatttatcgatgtataatcattttctaaaaaatctattaaaatttttgtagcatgataccctaattcttcagaattaatatcaactgatgataatggtggtatttggagctccgctaatggactattattaaatcctaccacatctatatttttaatttttctctcattaagtaccttaagtatcccaaatgctaatacatcatcttctgctataattgctgtaggagtaatgttttctagcaatttaattgttccgtttattccttcttgttcattaaaatcatccataattacgaaatttttatcctgtattgaaatgccattaatttcgcatgcaactttgaatcctttaaatctatcttttgtaacattccattctttctttgcccctagaaaagaaatgcatttatgtcccttttttacaagctcatttactaaattgtaagtcgcctgaaaattgtcattgtcaacccacagtaaattttctgattcttctggccttcctattactacgaatggaaattgtgtttctttaagatatttaatacttctatcatcagttcttgcacgtaataagcatattccatcaactaagttacttgttatgaaattatttatatattctaattcagctttttcatcctcgctaaatgcatatgtaatataataccttttattttgagcatatttgctcattcccttcatagcttgaataaaaaacgtgttagttatcaaatcttgagcttcattaggtaaaaccacacctaatattctacttttcctatttgcaagactcctagctattgcatttggcttgtatttcaatctttttatcgcatctctaactctttccttagtctcttcacttatctgcgaactatctgatataactctcgatacagttgatggagatacattcgcttcttttgctacttcctttattgtaactttcataacttactcctattctcaataataaatcactcataaagtttattaacataaaaacatctaagtcacattctaatatactatctttttaggaataatcacttaatgacagtaaaaacttatctatgtcatgctttataactattttcctctaataattttaatattaacatacttaaaatgatgttacaattaccatatatatggttttattaaacaacaatcaaataatctctctttctattactatgaagtataaactgaggcacacctctaattagcaaatagatatgtagctaatctccaccataattaatgagtatatattattgcagagattatttttcatataaattatcactatcctttacttttactatagtacctgctaattatcacaccttccataagttctagtaatctgatgaattttttctgccaactgatctgtcaatacacctttttttactctccagcgccaattcttccccaatgttgaaggtaaattaattctagcttcattgcctagattcaagaaatcttgcatttgtgctatagaaatattcgcaatactactccaagctcccctaataaatccccagttatacccctcttctttatttagacctaaatactctatcgctctttgaacttcccctttaggtgctgttgtttcaatccatcctcttacagtatcattatcatgggtaccagtataaactataaaattcttttcgtaattatgaggtaaaaaaggatttgagctatctgtatcaaacccaaatgtcaatattttcattcctgggaacccagtatcatttctaagctttattgtttcttcagttagtgtacctagatcttctgcaattatattaacatcgccaagctcatctttaattgcattgaaaacttttattccagggcctttaacccattcaccattttctgctgttagatctccataaggaattgaccaatatgattcaaatcctttaaaatgatctattctaagtacatcatataagttcaaactttgtcttatacgatcaacccaccatttataattcgttttctccatatagctccaatcatagattggatttccccatagctgtcctgtatcagcaaatatatccggaggacacccagcaatttttaatggtttcagtgtttttttattaagtaagaatgcttcgggatttccccatacatcagcactgtcctctgctacatatataggcatgtctcctattatttcaattcccaaattattaacataggcttttagatttctccattgtttatggaactcatactgcaaaaacttccaaagccctatttcatcttctaataagcttttatacctatctattgcttctgtttctcttaacctaatgtcctcatcccattcgtgccagctctttaaatcaaaatgtttttttactgacatatataatgcataatcatcaagccaataggattcagcctcttgaaatttaattaaatcttcatcttgatttaatttaaatttttcatatgctattcttaatactcttaatttttctttaaaaatcaaaccataatctatatcctctgaattttctccaaagttcactgaataataatcacttgcatctaaaagtccatcctgtcttaaaatatcaaaatctataaaatatggattcccagcaaatgccgagaaagattgatatggtgaatctccaaaacttgtaggcccaaccggtaatatctgccaatatttctgaccagccttttttagaaaatctccaaacttatatgcttctttaccaaatgtccctattccatactttcctggcagagaagcaatgtgcattattataccactacttctattcatatcttcctcctaatttccaccttttgtttaaaatttatttttataaccaatctctattcttcttatgccttaagcaaccgcttgcatgagaaatcatattaaattgaactaataaaatatagtagctaaagactaaaaggttatctcaaaagcattttaattttttaggtttcctaattaaaatttaaattatattgtcttactttcagtaaatactttaactagcaaaagttgaactttgattaaaaaaccttacctaagatacctctatacctttaagttattctcaactctttattaataactattttatagatccttgaacaatacctgcaataatatgcttttgaacaaagaaatagaatatgattattggaattattgctaaaattaacgctgccattgctaattcccattgctttgagaatgctccgaagaaattgttcatggctaatggtatagtatttattcttccatttatagttaaaaacggaagtaagaagtcattccatatccatatactatttaaaactgcgactgtaacagtaattggcttcaataatggtaatataattttcacatatgtttgccatttgctgcatccatctatggttgcggcttcttcaacttcttttggaactcctttaataaagccatgatataaaaatatgctcatactaacgccaaaccctatgtacatgaatatgagtccatagtgtgttcctagcatttgaaatggtccgaattgaatttttgccatccattttacaagtggtatcattactgcttgaaatggaacgatcatccctgaagtaaatatataaaatattatcttactctttcttgactgatcccttactaacatccatgaagccattgatgaaaaaagaattattagtaccacacttcctatagttattatcatagaatttgtaaatgaacttattacactcatttttttcatagcatctaaataattctgaaaattccatgtgtcaggaagaccagttgtgtttgaaaagatctctcttcttgtcttaaatgaatttataagcatcaagtaaaatggtgtcatatatgctatcaatagtaaccatgaaaatacttctaatagttttaatctaccagtataactatctagtgtcttcagctttttatttgctttaactttttctatattattaacaactttacttggctccattatacctctacctcctttttcttattaaagtaaacttgagttaaagaaatagtagttactagtacaaagaatataatagcttttgcttgtcctattcccatattgttcacaataaaagcttcattgtaaatatttaatgctaacatttcagtagttttcattggtgtaagtgaaaaatttaaatcaaataacttaaatgaatttgctaaagttaagaataagcaaattgtgactgcttgtctaaccataggtattgttatatttttaaatgtatgccacccattagctccatcaatatgcgctgcttctattaagtcagttggaacattttcaagggctgccacataaataaccattatatatccagcatattgccatgtcgaaactatcaacattgctagcattgccgtagttggagcttgtaaaagtgatgttgaaagtgttgcacttcccaatgctttaccaactcctgtaaatactgaattaaacataaattgccatataaaacctaaaattaatcctcctattaagtttggcataaagaatccggttcttaagaaactactagtttttaattttctagttactatatatgctagtccaaaccctattatatttatagttattacactcgcaattgtatataatactgttatctttagagaatatataaattgtacatctttaaagattcctgtataattttttattccaacaaaatcataatgaggattagcaccattccaatttgtaaatgtataatatatacctattataaacggaattattacaaccattgtcatagcaaataatgctggtccgacaaaaatccaaaaatctttaatatctcgtgatttcttgctcatacacttactcctttcctaataatatttagcgctatcttataatttaaaatatttatacaaaattcatgaggaggtattaatcccctcatgaataaatcttatctaatattatttagcttttgtagcatcctgaattccttgtaacatatctttctttgcttgtggccccatatcagtattaataaatttagagaataaaggcgctaagctattcttgttaaatccatctggtagattagtgaatgcccaagggagagtctttccttctttgttatattcagaaattgatttatttaattcattatcactttcaactgtgaagtttgtaaatgctggaatcatattcatatccttaactaatgcctcttgacctgtttgacttgtaaccatccaatctaagaattctttagcttctttattaattttagaatctttatttactacccaatacattggaacacctactggaatagacccgctcattttgggatcattattaattgcaagtggtgcaaatcccatatggaacttcttatttggatcttctagcttttgtaaatctccagcaacccagttaccttgatgtaaaaatgcagtttttccaagtgcaaagttaccaacttgagtactataatctatagtatctagactttttcctccaccatatttacaaagtaattcaactaagttcatccaatcattaaattgtttattattaactatatccgctttacctgcaagataatcctttgtaaattgagctggattatcttgagttgctaacggtatattaaatgtatgattaccggtaacccaaaattcttttgttgtataagaaacaacattatcaagacctaattctgcctttttactatctagtgtttcaaacgctgcttttaatttgtcaaaagaatctagagacttgggatcgataccagccttgtccaaaatatctttattgtataataatccataaccttctgttgctgctggcattccatacacttttccatcaatagtcaccgtatctaatgtacctttaacagcattcttaacccaaccttgatcgcttaaatcatcaattttatgtttccaagtttcataatctccagcaccttgaatcataaatatgtctggctcagtacctttttgaaattctgcctttaatgatgcaccgtaatcagcacctccaccaactgaagtaacttcaacttttacgcctttttccttttcatattttttagcaagttcttgaagtgcatcattaatttcaacctttagttgatatactttaattgtttttccgcttccagaatcacttgaactttgcgaacttgctcccgatgagcttccgcatccaaccatagtcccagccaataatgtagaagctaaaattgttgataatatttgttttgttttcatttaaatacccctccattaaaattttgtttagcatcctgaataactttcaaaaatactaagcatttatttatataacacatatctagaagtcaatttagatatataatgttaatcaattgccatcttcgcaatcgtttgcgaaatctttaaaaaaatttagtctttttagcgtattaagctatccagactccatttgttaaccttttctgaagtaaatctacttcttaatgatataagtatatcaaccaaagaaaacttttacaacctatattttcctttgttttcgattaaatttaataacttttctatgttttattaagatttactcaattataggccattttataaaaacggttgcatgatttttttattttatttatatttacttttaccattataaatactgattaatattagcttatcttttcttgttagtttttttatctggtactctcttttcattgcatcttttttattttcaaatacttcatgatatactaatttaacaggtcccctacccttcgtatattttgctccacatccttttgaatgcatttgaattcttttgtctaagttatttgtccaccctgtataaagtgttctatctgaacattctacaatatatacataattcatatattacctcaactcttgatctataatttaacatgttaataaaattcaaaatcttcgctaataaaattatatcaaaaaagaagacgatcatctacgaatctcgtcttctaaaaactttaaatattaatctacctttgctgtatcaatccagctcatcatacctcttagttccttaccaaccttttcgattggatgctctgcttccattcttcttcttgcattaaatcctggtctattagttgcattttctaacaaccagttcttagcaaatgttccatcttgaatttcagtaagaactttcttcatttccttcttagtctcatcagttattattcttttaccaatttggtaatccccgtattcagcagtatctgaaattgagtatctcatcatgcttaatccaccttgatataataaatcaacaattaatttcatttcatgcatacattcaaagtaagcattttctggagcatatcctgcttctactaaagtttcaaatccagctttgataagttctgaaacaccaccacaaagtactgcttgctctccgaaaagatctgtttctgtttcatctttaaaagtagtttcaagaacaccagctcttgctccaccaattccatttgcatatgctaaagcatattgttttgctttttcagatgcatcttgatgtattgctattaagcaaggtactccagcaccttctgtatatgttcttcttactaaatgccccggacctttaggtgcaaccatgaatacatcaacaaatgatggtggtttaatttgtccaaagtgtatgttgaatccatgagcaaatactaatgcgtttccttcttctaaattaggagctatttcttcattatatatttttgcttgtttttcatctggtaataaaatcattattaaatctgctgcttttgctgcatctgcaacagttgcaacttgtaatcctgctgcttctgctttagcccaagatttacttccgttatacaatccaacaacaacatctactccactttcatgaagatttaacgcatgtgcatgcccttggctaccatatcctattatagcaactttctttcctcttaataaatttaaatctgtgtctttttcataatacatttttggcattttaatgacctcctagttaatattaatatcttcttcacttattatttggttaattggcgcaccaggtgcaaccataggaaaaacttttttatcactgtttattagataatctataagaactggaccttctgaatccagagcttttctaagtatatcgtctatttcatctacttgagttattctaaatgctttagctccaaaagcttcagcaagcttaacataatctgtaggtctatctaaggttgtctcagaatatcttccttcgtagaagaaatcttgccattgccttaccattcctaaacaattattattcataataacttgaattaatggaagattgtttttaacagcagtaactaattcattgcagttcattccaaagcttccatctcctgcaatgttaaatactcttttatcaagtctgcctatctgagctccaattgctgctccaaggccatatcccatagttccaagcccacctgatgttataaatgttctttcacttttaaaattgaaatattgagcagtccacatttgatgttgcccaacttcagtagaaattataaaacttccgtcatttaatttattcaacctatcaaagaacaactccggagtcaaatcacagtatgtcactaatttattattctcttttaaattatttatggtattcaaccattcgtcatttttcttttcctcaattattggtattaattgattcagtgctacctttaaatctccaacgatacatgtatcaacttttatatttttatttatttctgctggatcaacatctatttgtaaaatctttgcattttttatatgattttgattgcttataactctatcactaaatctagctccaagagttattaataaatcacatttagttgcagcaatatttgatgcttttgttccatgcattccgatcataccagtatataattcatgatcatttggaaactctgccatacacataagagatgttgatacaggacaattgatcttttctgcaaattttgttaattcagatgttgctccagatatacctatacctccgcctgcatatataagaggtctcttgctttgatttattaactcaacagcttcctgtaatgatttttctgtaatatgctctgattttctaactatttctttaggaattattttattatattgagttttttcagcagtaatatcttttggaatatctattaataccgggcctggtctaccctccttagctatataaaaagcttcccttattatatcctgaagttcattaatatcccttacaatataattatgttttgttataggcattgtaattccagttatatcaacctcttgaaaactatcctttccaagtaatggctttgccacatttcccgtaatagcaaccattggaattgaatccatatatgcagtggcaatacctgttactaagttggtagctccaggtcctgaagttgcaagacaaactccaacttttccagtggcccttgcatatccatcagccgcatgtgatgctccctgctcatgacaagtaagaacatgacgaattttatccttatatttgtataactcatcatatatatttaataccgccccacctggatatccaaatatagtctctaccccttcatcaagcaatgactttattaatatttcagcccccgtcaataacattttattcactcctttgcttataaaatgatctctgtttgataactagcaatgtataaattgatttagattctattttgttgcctctaatttctcgcgaactagatttcccatttcaattgttccaactttcttcttaccttcagtcattatatctccagttctatatccatcttcaagaactgctaaaactgcattttcaatagattttgcttcttcctccaatgaaaaactatacctaagcatcattgctgctgaaagaatagttgctaacggattagcaattccttgtcctgcgatatcaggagcacttccatgaattggttcatacattccaagagttccttccccaagcgatgctgaaggtaacatacctattgaacctgtaaccatacttgcttcatctgataatatgtctccaaatatatttgaagttacaattacatcaaattgatttggatcttttactaactgcatagcagtattatcaacatacaaatgatttacttcaacttctgggtaatccttagccatctcgttaactacacttctccaaagtctagaactttctaatatgttagctttatctacacttgtaagtttcttatttcttttcattgctgtttcaaatcctattttagcaattctagttatttcatttacattatatctttcagtgtcataagcactctttactccatctacttcttccaatcctctttctccaaagtaaattccacctgttaattctctaactatgcagatatctatcccatctttaacaatgctatctttaagtggtgattcattttttagtggagcatatagtactgctggtcttaaattacaataaagatttaatgcaccccttaatcctagtagtgcttgctctggtcttattttagcagtaggatcatcccacttagggcctccaacagctccgagtagaactgcatcactttttttacatgcttctaaagttgcttctggaagcggagttccttctttatcaatagcgcatccacctgctaatacatattcatattcaaatctatgcccaaatttatctccaataacttttaaaacctttattgtttcatctatcacttctgggccaattccatcccctggtattacagctatattacatttcattatgataatccccctcttataattgcctatttcttattgctttttaatcaaaatttaattattaattctagttattagtatccttctcttaagaaaatatattagtttaatttgattcttcttttaataatcagtttctctatctatttcttatatatccaatcaatccatcattatcgatgattttttgcataaattcagggaatgcttccccttgatactcttggctcttagttaaatttttaataagacctgttgagaaatcaacttctaattcatctcctgcatcaatattttttacagcttcatcacattctaaaattggtaacccaatattgattgcatttctataaaatattcttgcgaaagttgatgcaataacgcagctaacccctgctgttttaattgctaaaggtgcatgttctcttgaagaaccacatccaaaatttttatttgcaacaattatatctccactctttacatttttaacgaaatccacatctatatcttccatacaatgtgcagcaagttctttagcatccgaagtgtttaaatatcttgctggaattattacgtctgtatctacattatcaccatatttgaatactttaccttttacgctcattactaaatacctcctacactaattcaggatcagttatttttccagttaaagcagacgctgctgccactgctggacttgctagatatacttctgactcaacatgccccattcttcctacaaaatttctatttgttgtcgatacacatctttcacctttagctaaaattcccatatgtccacctaaacatggtccacaagtcggtgttgaaaatgcagctccagcctctaccaagtcagtaactattccttcttttattgcttgtaaataaattttttgagttccagggataactatacatctgataccctttttaactttctttccttttaagatatctctagctattcttaaatctgaaatcctaccatttgtgcatgatccaattacaacctgatcaataactacatctccagtattatcaattgttcttgtattgtctggtaaatgaggaaatgaaactgttggtcttaattcacttaaatcaatttcaaatactttatcatattctgcatcttcgtcagcttcataaaccttccattccctagaagcatgatcttttaaatattcttctgttttatcatcaactgggaaaattccattctttccaccagcctctattgccatatttgccattgtaaatctatcatccattgaaagatattgtaagccatcacctacaaattccattgatttatatagagcaccgtcaacaccaatcattccgattatgtgtaagattatatccttaccacttatccattttgctggtttattcttaagtacgaattttaaagcagatggaaccttaaaccaacactttcctgtagccataccagctgccatatcagttgatcctattcctgttgaaaaagccccaagtgctccataagtacatgtgtgtgaatcagctcctataacaacatctccagcaactactagacctttttcaggaagtaagcaatgttcaattcccatttctcctacttcaaagaaattttctatctccatattttgagcaaattctctaatatatttaacttgttctgctgcctttatgtctttgttaggagtaaagtgatctggtactatagcaatttggcttttactaaatactttatctgttccaaacttcttaaattcatttacagcaactggtgttgtaatatcatttcctaatactaaatcaagatttgcttcaattaattgtccagcttttacagcttccaatcccgcatgagctgctaagattttttgagtcattgtcattcccatgttttaatcccccttaaaaatatgcttttacttttctttcaatatcttttattaatttatattctattgaatctactagagctatccaactagcttgaattacatcccgagataccccaacagtactccaactttcaatcccatctgttgattcaattaatactcttacctttgcctcagttgcactttctgaatccaaaactctaactttataatccactaatcttgcctgttttaattctggataaaaaacttctagtgctttcctaatagccttatctaaagcattcactggtccttcgccttctgctgctgtcatctcattttgtccatcaactgtaatgtttattactgctgttgatgagaactcctctgatccatagggttgttcaccaatgatcttaaaatgattcaatttaaagaacggtttgtactttccaataatttttcttataactaattcaactgttccttctgctccttcaaactgatacccatcatattctagttctttcaatctatctgtaatcttttgaactgatttatcatccttagatatattaggaaatatcttttgtatttcctgtaaaattgtacttttgccacttacctcagatactaaaaagcgcctcttattccctaccaattctggctctatatgttcatatgactttggtgatttagttactgcatctatatgcattccgcctttatgagcaaacgctgaatttcctacaaatggatcttcatctgataaagtgatattacaaatttcagcaatatacctagatgtttttgttagatttactagctcgttatcatttaaaactttatatccaagctttagttttaatgtaggtattattgtgcttaaattagcattcccgcatctttctcctattccaataaaagttccttgaatctgactcgctcctgcctccactgccatgatcgaatttgcaactgccatccccatatcgtcatgactatgaattccaagctcaaccttcactgtttcttttatggttttagttatactatatatctcttgaggtaaagcccctccgttagtgtcacatagtacaactacttttgcccctgcttcttctgctgcctttaaagttgccatcgcatactctttgttggctttatatccatcataaaaatgttctgcatcaaatattacttctttccccttaacacacaaatactcaattgtgtcttttatcatatttacattctcacttaaagaagtttttataatatctgttacttgaaagtcccatgacttcccaaatacgacaattgtgtctgcccctgatgacagtaagtcttttagatttttgtcatcttctacgttaattttaggtcttcgtgtagatccaaatgctacgacctttgcgttcttaagttccacatccttaagccttttaaagaattccatatcttttggatttgatcctggattaccagcttcaatgtaatcaactttcatctcatccaaaacttttactattttaattttatcttctaatgaaaatgaaattccttgaccttgggctccatctcttagagtcgaatcaaatattttcacctgattctgagccatatatgattatcccccttttcattttattgccttattgcttttagattatctttatttaatgtacattaataagattcaatggaatttcttatagttttttcccctctttgtagtgctgtcacacctgttctaaccaattcttctattccatactcctccatcaggtttattaatgctgatattttattttcatccccagttaattctatcgttaaagtgtctgtagacaggtcaattatcttgcttctaaaaatatttacagtttcatttattgcggctctgttttctgcacttgcctttaccttaattagcaccaattccctataaacagagtcatcagctttaaagtttataacccttataacatcttctaatttatttagctgcttcttaacctgttctaatacattctcgtctcccataagtgtaattgtcattctcgaaattgaaggatcttcagttctaccaacagttaaactatcgatattgtatcctcttcttgaaaacaatccactgactctactcaaaacaccagatgaattctttactaagacagataatacatgcttctccattgccttccccccttaaaaatggttaaaaaaatccacccttaatgatataaatcataagaagtgggataatattccgccttacataatatcactaggttctaacaaacccttgcatataacggatgcacaccggatatcttttactcaaggaacgttattcctctttctggattctgctcaggagtgataattatagagctaaagtatcgattctcaccagccatcgactctctgcaacttatctactaaataattttctccatctcagcattttatagcttaaggacctatttgattttcctgttagactaaattgtactctcggtttttattgttgtcaacattttaattatatatttttcattatcatttttttatatatttacaatatatgaaaattaactatttatcatttttttatatgtttttttaactatttgtcaatacacaaaggcttaatttaattgtattaatttttatagtagcttaaattaacaatttaaataaggtcacttttattgtttttttaatttagagtactacatcctgctaatctttgttccataatcatccatatattcaacttcttgaatgtttgctaaaactgcatctaaactataatcatatatgttaaaatttatttttgcttcacataactttgaaattatctcttccttctcatcttcaaaaactaactctttattaatttcttcaatgaatgacactgttttatatatttcgcattttgctccctcttcggcacctaactgcgtaaatacgttgtacctatattcatctccacctatttcagtagcatcattataaccatccttatgaaaaacatcatcaagacgcaattcataatacatattaatatatgcttttactccttctatatcattaaatcccttgcaattaccggttggcatcactactagatattcattataaggttctttgtccatataaatgcctcctttatcaacgtattattattttatgtattaatctatttatccccttattgttcatttgttattcataaaaaattatatgtaaaaagacaaattttcaagcaactttataaacttatagtaatttaaaattagttttatttattttgggtaaataaataaaaaggaactcatttaatagagttcctcttaacaaaattatatatactttatttaattaattatatttcttctcgattaagtttgctaaattatgagccatttcatctatctcagcttgattttctccttcaagcattactcttactagcggttcagttccagagggtcttataagtactcttccaacaccatttaaagctgcttctatttttcttatttcgttttgtatttcatcatctgtcaaatataaatcttttttatcgtttggtattgttgcattagctaaaacttgtggtaattccttcattattgaacataattcagataatgctttttcctttttcttaactatccctgcaatttgaagcgctgttactaatccatctccagtcgaattataatctaagaatataacatgacctgattgttctccacctaagacatatttgtttttaaccatttcttctaaaacatatctatctccaacagcagtcttaacaatgtttattttttcatttttgcatgcaatatctaatccaagattactcattacagttacaactaatgtatcatcttttaacttaccaagttcttttaaatattttgcacataacattaatataaaatcaccatttattaaattacctttttcatcaacagctaaacatctatctgcatctccatcaaaagcaaaacccaaatcgcatttctttttaattacatattccattaattcttctggatgtgtagatccacaattttcatttatgtttgttccgtctggattgtcattaattacaaatacatcagcgcctagttctctaaacgcttttactgatgatttatatgcagctccattggcacaatctaatgctatctttaatcccttcaagctataaggtatagtgtttttagcaaattctatataatcatctaatgctgacacttcaattgtctctctacccaaatctgtgcctgttggacttggaactccttcaaaatcactttcaatgactctttgaatctcatcttccaattcatccgaaagcttgtatcctttatcgttaaagaacttaatcccattatattctactggattatgtgatgcagaaatcataacacccgcatctgctccatatttccttgttaagtatgcaacagctggtgtaggtactactccaagcactattgcttcagctccaactgataatattcctgctattaatgctgattctaacatatctcctgatattcttgtatcttttgccactaatattttaggcttatgagctccttctgttaatacatatgctcctgctcttccaagatcatacgcaattcttgctgttaattctgtatttgcaactcctctaactccatcagttccaaacattctacccataattttacctcacttttttattctgttatagtcactcaattactataatatacttaatcacttacaatggataatattatttgtaatttcttcagtgcctaccttaaatagtataatatttttaacacgtatttacaatcttctctttctgttataatattactattttacaatcaattacacataagaataatatttttagaatcagcgtctatttagtctatattttcatcttttaatctttctaaaactaaattatatccatcactgccatagttcaaacatctattaactctactaatcgttgcagtgctcgctccagttatttcagctatttctgagtaagtctttttacatttaagcagctttgctacatgtaatctttgtgctaatgatttaacttcatttattgtcgctacatcttcaaagaatttatagcattcatctatatttttaagttctaaaattgatttaaaaaataaatctaattctttactttttagctttgactctaaagaactcactttatcacctcttgtaatacttattttctctttaattataaccatctaaagcttactttacaactttaatatatcaaagcatatattaatatggattatataaaatccgtaaaacaaaaaaagaagcttattacaaaataaaatttataatacacttcttctttaattaaatttataataatatattgatatattctaattatagatcttcaacattactttctgcgtttataccacttatcgcgtccaatcctttaatatttaaatccttgtatatgctttttgtaggtactagccaaacttctccggtgcctctatatacattaaccataccttctccactaactgcagttcctataattgatttagatgatttctccactgagaattcaatgtttcccgtccttaatatagcaaagtttccatccacctttaaagtatcgttaattaatatacatttaaatatttcactttctggaactgggaccttaagaacaactattccgctaccttctatcctagtttgatacagcccctcattccctagaaaagctgatgatacatttttttgtattgttgcatcaatttctataccttcttcacatgcataaaacatattatctcccacaactatttcatcatcctctaattctattaatgcaaaatgaccaaaagaaggctctaaaaatatttccccagtcccactataagtaggcctaaatatactttcccctattagtttacttgatattatctttttgccaagtcccaacaacccacctgatttatttgttatttgaatcttccctttcatatagctcaaagaacctggctcaagtgttaccgaactatcttctagcaatattctcacttgttttaattttatcccactctttttcattatgttaagtcccaaagcagtttgaacatcagtcgctccatctaaattctcgtattctaggatttggaaccttgattcacattccatttcagataacatatttaatttgttagtaaactttagtgaacttctcataaaattacccctaccttataataagctgtttaatgtttttaatttccccttttctctaactcctctaaaagagtgaatactctcttattgagcacaggatgcataagatatggtgctatttcacttaatggttttaatacaaactctctctcatgcattcttgggtgtgggagaatcaccttttcatttgaagaaaccactgaatcatatataataatatccagatcaatagttctaggtccccattttatagtcctctttctatctagatctgtttcaatgccaagtaatacatccataagttcctctgcttctaatatagtttctatttcaacaacaccatttaaaaaatcttcctgttctaagtatccccatggttttgttttaataaacgatgactttcttattatttcaatatttttttctgcagatattttatttattgcgtcctctaaatactgttctttattcccaatattagatcctaaacttatatatgctttgtgccttcttctttcaatcattatttctacagtatctaaatgtttttttataggtgcccaaggcttttttaaaaacaccttaacaccttctattatcttatattcgttaagaataaagtcagctaaatttaaagttgctgtttctataagctcatagttctttcttttaaattcatcttcaattttttcacacaattcaccataatgaactgttttagttaaatctccagtttttcctgctaatttcaaatctatgtctagctcaaaagataaaatgaacttttgacctaatcttttttcctcttcgaaaactccatgaaatccaaataactctagctctcttatatacatcttatccaaaactcatccatcctatcttcttacgattgcatcagtcatctttgctgctcttgaattttcaagcacatcatgaactcttacaaaatcgcaagcatctttcattattccaataactgttgttgcaactgtcccctctattctttcctctacaggtaaattaagagctaaccctatcatagactttctggaagtgccaagtaatatcggatatcccaagtccttgattctttctaagttattcatagtttctaaattttgttcataggtctttccgaaacctatacctggatctaatattatattttcatcttttactccagcatccttagcaatattaatacattctttcagatcatttaatatatcttccactaaatttttataatctgtattatctctattatgcattagacaacaaggtacattatattttgccgcaacttttgccatatctttatcttttttaaatccccatatatcattaataaggtcagcaccagcttgtattgcctgctctgcaactttagctttatatgtatctattgatactgatatatcaaaattttcttttatagcttttattataggtacaactcttgaaatttcttcttcttcacttactaacttatatcccggccttgtagattcccctcctacatctattatgtcagctccatcatctatcatttctttcacatgttttacagcaacatcgatgtcattaaattttcctccatctgagaaagaatctggagtaaaatttaatattcccataatatatgttttttcccctatattaaattccttacttcctattttcattaacttatagctccttctaataatatattttaaaatttttcttttcatctccccaattacattcatcaatagacttacagctaatacatagccgtgagagtttatctgctctatacatgagctgtgcaaagttttcactttttttatctctatggcctagtattccttgtcttataatttcaatttcttcctcattatatctgtaattatgtaaaatttcttttgaaatctcccatgatgctatttcatgaggtgttccagtttcatactgaagcgactttcctatatcatggagaattgcagtcgtatatatgatttctttgttaaatcctaaactttcttcaatatttattaattgtgctattcgtgctacatctaaaaagtgctttaaattatgcttgcagaactttctatctttttcaaactttttatttctttttagataatatatatattctgtgtcattcaaaatacaattaaatctatccatatcataccccaattaaacttattctttactaaatatcattacgattattttattatatcatttggtcacagtttagcgatatacatatgcgaattttatgtaaaaaaatacacctagaaaatatctctaggtgcatctttacgtctagtaaaccttagcttgttcttctccatcaagtactcttatagcaccttgagctagagcaagtaattcatcttctccaggataaactgtaactggggctatccattcaacttttgctttaaggtctggaacaagtgttggtgagtatgcaattcctccggtaaaaataatttgatcaactttaccttctaatacaactgacatttctccgattgcttttgaaatttgataaacaaatgctttgtatattgattcacattctttatctccttcttccatcttatcaataacaccttttacatcatttgtatttagataaccaacaaatccaccttttcctacaaccttgccatatacttctgcttcactatattttccactaaaacacattttaactaaatcaccaattggaactgatccagctctttctggtgagaatgggccatctccatctaatgcattatttacatcgacaactttcccatgattgtgagcaccaaccgaaacgcctccacccatatgtacaactacaagatttaggttttcatatccttgtccactttcttttccatatcttttagctactgctttttgatttaaagcatggaatttactttttcttggtaattctggtactccagatagtcttgctacatccgctaactcatctgtaacaactggatctactataaatgatggaatatttaattcatctccaattgacttagcaattattccgccaaggttagaagcgtgaggtccttgaactccaacttttaaatcttcaaccattgcatcatttactgcatatgttcccccttcaactggtctaagcattccacctctaccaacaatagcacttaaagtctttatatcaaaattcttttctttaagaacatttaatataacttcttttctaaattcgaattgatcatatattgtatcatatctctttatttcttcatttgtgtgtcttaaagtttcttcaaatagttccttttctccttcgtaaacaccaatctttgttgatgttgaacctggattgattattaatagcttatatgacattctgaatcccccttaaatttaatgcattctatacagtcataatgcataattttcggaagaaattattatagaatctaaaagtgcattgcaaattccatataaatctctccattaattatgcattaattattatggattgatttattacttatttcttgctgcaactaatgctgcaagagcaattgaattaactttagtttcgaacgaatctgctcttgaagttaaaattactggtgctgatgtacctactaaaagtccaccatttcttgatttcgagaaatatgttaatgtcttatacattacatttgctgcttctatatttggtaataataatatatcagctttacctgctactgatcctgtaacacctttatgatgagctgcttcttctgatattgcattatctaaggcaaaaggtccatcaattacgcatcctttaatttgccccctgtcactcattttagctaacaatgctgcatcaactgttgattgcatacttgtatttacaacttcaactgggcatataggtgctactcttggaacatctattccacatgcatgagcaactacaactgcattatttatcattccaactttatccttaaattctggatatgtattaaatgctgcatcagttaaaaataatagtctatcccaaccttccacatcaaacacagctacatgggacattaattttcctgttctaagaccaacctctttgtttaatacgcttcttaggaatgttgcagtatcaactagacctttcattaacatatctgcatgaccactagaaactaattttactgcttctaacgttgctttctttggatctttaatatccattatttcataatcagataagtccaagtttattttctttgcgatttcatggatttgttgtttatcaccaaccaatattgcttgtgcgatgttattttctgtagcttcttttatagcctctaatactggttcatcttgtgctacggctacagccactttttttgttggaacttcctttaatcttgataataactcatcaaagtttttactcattttttgcacctctactttaataatttttaacttttatatataattaatttagttgtttgttaaatttatatcaatcaatgccatgaatatttctttataccttattgtaacaaaaaaatattggaaatgttgaattttcagaatattatttttattatattattaattttatatattcatttttataagatttcacaacatgaacgtaatataatatatcttcctcatcttctgaaaagattatactaattccattcatgttacttataatcttattttggtaaatcgaatttttcaattatatgttcggcaacccttatcccatcgacagccgctgatattataccacctgcaaatcctgctccttctccagttggataaagtccgcatacatttatactttcaagtgaagcatttctattcaatctaactggtgctgatgttcttgtctctattccagttaaaattgcatcttctcttgcatacccttttatctttttatcaaaatttatgattccttctttaagagcctctacaacataatcaggtagacattcttttaatttcctaaattcataccctgcagtataactcgggatgaccgcacccaacttagttgacactctatctttcatgaaatctcctactaattgaacaggtgctttatactttccaccacctagcttaaatgctaaactttcataatgcctttggaattccattcctttaagaggtgaacttccttcaaagtcttctggagagacagtcaccactagtgctgaattcgcattatctaaatcccttgcgtgataactcataccattagacacaagtcttccttcttctgatgctgccgcaaccactactccaccagggcacatgcaaaatgaatatacacctctttttagcttttcactttgatatgtaagtctataatctgccgcatgtaatttaggatgattatgattgttgccatattggttaacatttattaattcttgtggatgttcaatccttacccctattgcaaatgcctttgcatccattgatacattttctctatataacatttcatatgtatctcttgaactatgtcctatagctagcactaaagcctcacatgtaatattctttccattgacaactatgttctctaactttccatctttatatgttattttctctaacttagaattaaagttaacctctcctccaagtctctttatttcttctctgatattcttaaccacaccttttaaaagatctgttccaacatgagctttgctctcatatttaatttctgtcggtgctcctgcctttattagttcatcaagaacgaatgagcatctgtgatctttaattcttgtagttaattttccatcagaaaatgcacctgctcctccttctccaaattgaacatttgattctaaattaagacgtccatccttccaaaacttttccacagtttcagttcttttatctacatcttccccacgttcatacacaattggtttatatccataccttgctaatgttaatgctgcaaaaattcctgctggcccaaatcctacaactactggtctcgctttaatttcttcggtaccactttttattgactcaatttctctaatttcttcaaaacttatatccttatcatgtattcttgatagtaacattttctcttttttacaaaataaattaacgctaaagcttacctttatatcattcttttttcttgcatctatacttctcttgattatatctaacctactaatatcttcttttgatatattaagctttttacatatttttttctctaaaacatttaaatcatcgtctaaactcagatttatattatttattcttatagccacagacttatcaccatatcctttcaacaagcaatctataattatatatctattcaatcaaacttcatattttatttattatttcccatcctaccttactccaaactaattcaaagaaattatatcataaaaaatcacagtattaacaaattaattaatactgtgattttattattatccctttttctttattgttacactaacatttccaacatctgatactgttacattattagcattaacaagtgttgcctgaggtgtgtaatcaaaagtcccttcttcttttacattagctaaatctagtatgacacttagattttgtgaacttatcttatctaatgcttcttgtgtacctgataattttacattggatactaaactttgatttgtaaccaaaaatgtatcacttaaattcttgtactgaacattacattctatatttttagttgtattctcttccttctttaatttaaatttagccttaattgatccatctccatcacctatcgaaataccttctggtaagttaagtttgacatcgacttcactatcaggctgcaatgacgacatgtccacggcctctgtatctattgattccaacttatttaaaacctgactatcacctaatacagttacattatttttacttaattcatacccatctaaaacaaatccttgaggtacatttcctttagtctttaaattaactggtacggtctttccattcgtaaccgtaattgatagctttgcggtttttatattagattcaatattgctaactgcatttccaaatgagtctataaattgtatattataatcaccttgcttatttttatctacatccttttcttcgccagtcaaaatagcttcagtaaccttatctacggaacttttaccccctgttattgttacggtctttggatttatattttgctctttttcataaatgttttctttataagttacttttacttttgaacttatagtaagttccttttgggtcaattcctctaagttaacttttatacctaacatcccattattctttatagttatattttcaggataactcattatttgaactggtatagtattttcccctactttaagtgcataagccgacatatcagctacaatcttaaaatcttctttcttcacctttaatatttcacttgatggcccctctaattttagatccaccgtaaatggctgtttatttacaattgcgaattttgaatctactagggagtcctcattagttaattctactggtattccttttaattcatatgttctgagcgggttctcaacattcgagatatatagccacagaaccactgataacagtaaacaaataattttaacaattaacgttccgttttcacttttatccatgacctcaccttctctcccgccgttttaactcttttctggtttctattttctactactttagtaagtataagttttaatctatctttatcataacctcgtgtaatttttccattgatcgctagcgatactacaccagtttcttcagatacgattataactagcgcatcagatacttctgataaacctatcgctgccctatgccttgttcctaatttcttatttatagaattattactagtaagcggtaaaacgcatccagatgctaaaattctattatttcttattattgttgctccatcatgtagaggagtattaacaacaaatatattttccaaaagattcgaggtgattttggcatctaatactgttcctgcgccaattaattcattcaacccggtactttgctccattacgattaaagctcctgttttgctctctgctaagttttgtacagcaattgtaatttcattaatcatagtattaaaatcttctctattattaagataatgatcatcgaaagcacttcttcccaaatgttctaaagcccttctaatctctggttgaaaaattataactacagataataccccgatggttaatgtcttatttaatataaaatataacatatctagctttaataaataactgattggaataagtgctataattaatactattccctttaatagctgttctgccctggtttcctttattagcatatatcctttataaaatatataggacactactagtatatctaatatggaccatatcgatatattagaaaagctttttattaacattgttaaaagttcttgcaaatttctcacctctttttctctcacaataaaattatacaacaaatactatgatattagatataaagagaattattattttcttactttttaattatttttatagtaattttttattactattaattaattatagtttatatcgttataaaatcctataaatgattatacgaataaatagtgtatataattactttctttggcaataatattatttgttgcattataccgaaggaggttttttatgaaaaagacatatagtatttttgtaactgcgttaatactatatctttccgttattaatatgaatccagcattcgcgtctaatttggctggatctcatggtgaaattaagactacttatgaaaatccaaaaatgaaagtaaactacttaagtgctaatataaacaattctcagtctgatgagaaaaacaacgaagttttagaagttttcaaacatgatactcaacaattatatataacgggtgaagatatagatctaatggcaaaacttgtatctgctgaaagtggtggtgaaccatatgctggaaaggttgctgtagcttctgtagtattaaatcgtactattgatcctcattttccaaatactattagagaagttatattccaaaaaaatgccttttcatgcgttaagaatggtaaaataactgctaatccagatcaagattgctataatgcagtatacgatgcgattaggggcgctgatccaacaaatgatgccttatttttctataatccggctaccgcaacatgtcattggatgaaagaaacacaaaaagtgaacgaaaaaattatagggcatcacacttttttcaaagtaaaagtgtagcctctatatattgatttaaaaataggggctgttgcaaaactaacatagttagttttgtagcggctcatttttttagatataaaaaatgtgaattccgaagaactcacattcattgtataatttacttatgctaaaaaccaaattacacaa

SEQ ID NO: 73 - DNA, 31082 bp, Clostridium beijerinckii
attctatttagtttcgtcaacttaattataatggataatttatgtattgaggagatgcttttgcatctcctttattatttatatagtattctttattatctttgcctactaaaattatactctaacatatatattcataaaaataactacctaaaatattaaattttctaggtagttgctaaaactattttataattcaaaagtgctgttatcgatccatttatactgtggtcttatgacttttatatcttttactaatttatacagtgcctcatctttctgcttgcattctagcattatatcaaaatccctatctagaatcttggctttttctaagaattcaacaagatcctctgcatttatataatcagcatgttttctatctttatcgtggtcttttggtgttgaaaaatgtattttaggtgggaaaaattcattatcccatgtattaaaaatctcctcaagtaagtcctctatattttcaccattattattgcaattgtgatggtgaacatctaagaccattggaagatttaaagtcctgcatatatctagaacttcccttgccgtatatattttatcatcattttcaagaattaatttagatcctatttcttctggaattagagaaaaattatcaatgaatctgcttattcctaactcttttccaccagttgctcctccaacatgcaaaaccatttttccatgtaaatacccaagatcctcaaaccattctacttgacgcattaaattgctgatagaatttttaacgatctcattacttgcactatttaaaacattaaactgatctggatgtgtatccactctcatgttattttgcctaattattcttccaataaattcaaaatcctttttaaaaatctctctatgtccccaataaccaacatcaggatgagtaactagaggaattaacgcagatgttattctataaaagtgtatttgattctccacattataattaagtattttctctagatcatttaagttagatagtgttatactctttagtttatctaatttgttcttttcagaaataattttattataatttgtaaacgtaactgtgctagaactagaaatctttttacccaacctcattgaaattgctacatagccaaaccttattctcataattcttctcctatgtacttaatatttcttgaacataataaaagaactccaaagtggagtccaattatatgtaaagagattaatgagtattagaggttgtattaaaagttagattaatatttaataatttaaacttttaaacactctattacttattataatctcatcagttattattgtaaacattttcttttaaattataactatttttttaatatctttgcaaatttcttataattatacaaaaagaagttatctaaaaataataaaaattaatgttaatcatccattattattttcctattcttagataacttcttttaactattttagtcagaaattctatgcttaagccagttatttcctctaagcctaaagcagtacataagtccacgtacaatccaatcaatatacatagcaatccaaattcctaaaacaccaattcctagaacaatacctaaaatataacctgcaaatattctaaatatccacatacctataaatgcagttagcatagtatatctggtatcaccagctcctttaaggcctgatgaaagtatgaaagatatcccccaagcaattaatgctatactgttgcttctagttaatgttgctgatatatttattacctctggaacatttgtataaagagatgctaaccattttgatataggtataaaaatcaatcccaaagatactaagcaaatagtaccaaacttagtcaagtatattaatgtactctttgcacctttaatatcatttctccctacatactgtcccacaaaagttgttgctgctaaacaaagtgaatttcccggaacatttatcattatagcaattgatgatgaaattgcattggcagcaatagatgctgttcccattgtaactataaacatctgaactattaattttcctgcattaaatatcacttgttccatgcccgctggaattcctatattaaatatatttttctgtatttccatatcaaatttaaatggaaatatcttttttaattttataattttacttcctctaaataaaactaacattataattaaagtaccaataagtctagcaattgcaattgctactgccgcaccagctatcccaaatgatggtatgttcaatgcattaattccaaatatcaatgtatatcctaaagcaatatttataagattcataaatattgttatttgcataggagtttttgtatctccacatcctctgagtataccattagcaatttgttctattgctataaatggatacgtaagcaaagtaaactccaaatatagttttgcatcgattttaactaattcttctgctgaaccataaagtacattaattaatttaatcctgaaaatccacaaaagcaatgttataattaatgatactaaaatacctgatacaatagcttgtttagctgtttcatttgctttcttaggtttatttcttcctatctgctgcgcaaccactaccgttgcaccaactgataaagctgcaaaaaatgatatgaacatattgtttatagaatcaaccattcctattgctgatacagcttgttcaccaatatgtcctgccatcattgtattacatgtacctaataacataacaaatgtttgctctatcattataggtattgctaactttaaaacatcttttcttattaacacacaatatccttcttccttctagtaaaacacccaagttactagttttttctgttaacgttaaacaaaaattaaagctatatatttatagctattacccttgtccattttcaattcacattatatatcttcatattcgtctttatatcactcctcgctgctccaacaatttaatgctcatatattcaataataaattccatcttccataatgtattctaatacacgctatcccaaaatcaataatttataatacattttttataaaaacacgcaaatagaatgacatatcgttaatatttcataaacatatatcattctttctttgatataaaatttttataactatttataatcttatcacttattactaaaaatcaccaccttactctacatactttatcactaaaataaggtatttagattattcttcttttgactaacacttgtttttattaatattctgtgcaatatgaattaattcataaaatttcttacatttctttcgaggctttttaatatatattctttaactaaatttctacatttaaattgcgtatgagtatttcacttactaaaactttaaatataaatttattacatcaatatatacgtattaattattatgttattttattaaatctatttatataatctcttatcacttttagcacataagtttctctaaaaatccagtttggaattggttctactcctgatgatattattttttcattattattaatagcatcttctatttgtatccactctggcctaaattttaatttagcctcatatggatccaatttttgagctttccttacatttgatacttctgctaagtaatagtaagagatcatcttaaaaactctattattaacatatttatctttgcttctttctgttataattccaagttgatcaccaattttactgcaaacatatccagtttcttcttccacttctcttttcagagcatctatatgcccctcatcctttttcattcctcctcctggaaacttataatccttattcttggaatgtaccattagaatctttttatcctttattattattcctcttactgcttccctaaaattgattttttcgattgaatcacttactttgtctatttcaaaaagtttgttgaacataatattcattttctcacatccttattcttcaaaattccctataccataaataatttatctactaaatctttgatttcgcccagatattgttaaaataataattaatttagttagccattaatgatgttttttatattttttactattttacagaaaaatatccttaaataaattatactttaattatctattattgtaaaaatttattaaaattttaaacccacaaagtttttgcaaaccttgtgggccatatttgaattttatgaaatgtatctacttttttatattaaatagaaattgttcgtttgtactatttatgaagatatttataatggtgtgtggacattaacaaatatcttttaatcataatacttagtggtgtgtggtcactaaatattaaacttttggtggttaattactcacattcatggtagtgtgcgttaccaagaatattttattttgtattcaaaattttgataaaacttttttaattatattaatcaattctaataatctaaattatctatttgctaaatacaatttttataatcaaatgtataaagcatttttataaaaggagttttttatgcttaaagcgaggtcacgcgataaacttccctcaagcatattatttattgtatattctttaactgtgtcatatgcgttaaaaatcatctttgctttcttactatcgttatataccttccagtatccacatagtaaacattttttagtagtacattccataaaatctttaacatcttcaaatggtattcctaggaataatccaagctcatgagggcagtgatatttattatatctaaattttaatgtatcaatatatctatctatttttatttgggaaggataccctatgtttgctaaaaaatctatatgtgattttttatttaactctttttctaatatattttcatcataaatcattattatcatacaatcattattttctcttaactctatgaattttagatttatattctttataaatttttttccgaagtcattccagccaatatacatcttttcattactttttttcaaatttatagttacagccggtttaactcctgcgataactaatgatgaattatataccaagaaattttctatatattccttctcatccatcaaatctaatcttttgtaaaaatctagatatttcatatcatatcaccaccaaatttaattatatattagcaatcttcttaccaaagtctatgcaatcttgttcagcttcatctggctcattttgaactattaatggtgtttctactacaacacaaccatatccattcattctttcttcaaaatctctcatccattttccatcgccccaaccataagaaccgaaaagcgcaactttcttacctgataccttagttgaaatttcctctataaatggctcaaactctgactcttctaatacttcatctcccattgctgaacaacctagaataagtatatcctcatttagtaattcgtctatatttacatctgagacatttatagtattaacatctttcccactttctatgattccttttgcaattaattctgccattttttctgtgtttcctgttcctgaccaatatactattttcattacttataccactccctattaatttaaataatcttgaaaatcattctcaattagataatattatatataaccacttttgtcaagttttattaataaattttgtatttttttccttaactaatattttttatattatttataatcaatctttattgtatacaaacatatataaggatgcactgaagatgataatatatcccacaagacttaagtaatcaggaagaattccaaataaacataaacttattattgctgaaaaaattatatttgtataatcaaatattgatatttcttttgccggtgcatatttatacgctaaagttattccaaattgtccaagacttgcaaaaataccagctaaaaacaaataaataagttgcattatattcatattttcatagtatattatcattaatggaaaagtaattatactagaaatgaaagaaaaatagaacacaatagtttctggatgttcttttccacttaaagatctaacacatgtataagctgctgctgctgtgacaccacctaaaattccagctattgcaggcattatttctaaatttaatgaaggctttattatgaataaagttcctataaatgctataattattgctataatctgttttatattcactttctcttttaaaaatatccccgaaaaaataattacgaagaaagggcttaatttatttagcatattagcatctgatagaactaatttatctatagagtagaaattaaataaaattcctaaagttccaaatattgatctaagcaataatgtcttttgattatttttttgtccaaaaaagtttcctctgtgttttgatattagtgcaaatgccaccattagtgatactatatttctaaaaaaagttttttgaaatgatggcaaatcaccagaaatcttaacaaatgccgacatcattgcaaatccaaatgcagatgcagttataaatattattcctttctttctgttgcttaaatttgttaatttcatttgtcctcctattagtatctatttttaatataaaagcgcataagctactataaataagtgctcacacgcttatattttattcaatcaattctaaaactggcctataccctacagtttcatattttaagtccttaactgactgcttagaatatgtcgttgaataatatcctcttattatgcagaatttttcacttcttaagccttcgctttgagtgaaagatgagaaattataccaatgccataaagcgttattatttccattaatcttctcatcatcaaatttctttatattattatctacatcataatcttcacttggtggaagtccatcaattttattaggatttactatatacttatcccattcattattcttataatttttcttttcactatatccagttaagagccttaagatgtatttttccccttctactatcactactttaccaaaaactaaattttgatcattaagttcattccatgaaatatttttcaaaatatttctatcacaaatcaataatttctttccagcatcatttatctctatccaagacaatttataatcatcatctttatcagtatctttaatttctattttttggcctgcaaatgaagtaatgtctttgaactgcaagaaatctcctggcaccttttgcttttcatcatttaaatataaagtaccaaagctccttattacacctgttgaatatgtcttaatatcaatgattttttttatttttctatttctaaatctcttccccattgctatggcaccacttaatgctgccatggatccaacaataactcctgttccaattaacttattttttttacttttatccataagttccaccccttttaccattgattttatatttacataaatttaattatatgactttttttatattttattcttttaaaacttatatgaattattatatcttattatgatagatcattaaatataaaaatttcttatatttttgcattattaaaatcatgattatttagcaaagtaattttattaagcatattattgcttaatcgaaattctgttttctccaatctcgtactttgttaacttatttccatttatagaaataatccctttagaataagattgcaaaagatctccttcatacttaattgtcttcttactaataagctctaaaacactttcagcagatttatcattaatataaacctttcctgaataatctacaattatatcttccttacttactggctttggcaaaatcagcatattccattttattttcccttcgtttaatgctgaataatatattttagtaatatttccgctaacttcttcaccaaaatatacattgtcattaatatcattgcctagtatttttataacttttgcatttggtatttctatgttattgggactatttaatatggttgctccattccccatttccattaccgcatttgtacttgtagtaggaaccactatatttccaatttctttatttgatctgactttctctaattgattcattacattagcataatatagatcactttttccattcgctttatcaatttttatgtaaagactatgtgttgcagtagaaaatactacattacctactttatcgcttgtattccttgtatctattttcaactcatttaaattaaaatctgcaagttgtcgtgtttctcctttctttgcatcaaaagagactggctcaaagtaagctcctccttttttttgcactttttgtataactattatattgttttcatttgttaaccatttatagaacactacatctccgccatcatcacattgaaattctttttcactattatcattgctatctaataccttaagtttactattttctatataagcaacaaatctgccatctgaggatactgatgctttagaaaccccatctttaatgttaatttcattttgcttattatcttttggagtttccttttcttcaactttttcagcttgaatttttacatctgaagataaatatatattttctacatataaaaatataccttgttgaattactattgctataagtgtccacactactattcttatcaagtttttcattaactatcctctcctacaaagatacttcaaaatcacttctacttttgtgttatatgtaatatttattataataatttttattataatttattttactcaacgtaaaaagctgtggcaacagatctttcaccatcccaagcatttggagaatttatcacttctcccttatagtacattgtagaagaataaccaccatcaagagctcccgcattaattgcacctctatctaacattatttcttgaacatcatacaaacttgctccaggcgctgtgatttttcgcccatcaataactaaaaatataactgtaccatcttctttttgccccactgcagttctagggttaagcccatcagaggtcttatctttaacttgaggcttaccatttataataatattaggccttctaaaacacattgcttcttgtactcctagcttttgaagctcatcaagagtatgatctcccacaataagctgaccacctttagtaaaggctataacattttcaacattagtcctatttacattgctcttaggatatacaacttttccacctgatataacaaatcctcctggctctgccccagttcctgcataaagcgttccatcagaagatttatctacaaaagatccaccattaatagctgcaatagcattattctcttctgccatttcgctggttttctgtcccatttttcctaaatattttgtcattgcaactttaactcctaatggattttttatttcaagtatatatccattatacctgtccgtatgtatatcatatctagttatttcatttccactagtatatttaacttttactttatttaaatctgtttctgtattttgggtactgtcatctttcgtttcttctgtatttttgttaactcctaagattttatttatttcttcctgagacataaaatcagttaatagatatgcatgtcttgttccaagtaatgttgaaacaaatacttttcttgtattttcatacggtccaaaaaataacactagaggtgtacttatacacagaaagagaattatgtatattatccccaaaaagaatactaacggtttaaattttttatttttaatttcctctttttcttgatgattactttgcgtatccatcgattacctcctaataaattgcacattactttaatagcctataaaactgtacaataaccattatataaactaaaactaacataaaacaataattgtaataaaaacaattacatgtaaattccttcaaaagctttaatgcataatgtacgttaattataaattatgtacattatgcattataaatacatgattatgctaactaaaacattaaatttaacacaatttaattaaatattgtcttcaagtgttaaacctgcctcattatgaaattgctgctccacaatactttcattttgttttttatgatatttaagttcatcacctaaatttttaaaggcaactgacaacattagcttaattctatttaactggtttacatttgaggcaccaggatcataatctattgccactatatttgattttggatatctttcttttagtgcttttatcataccttttccagtaacatgattaggcaaacatgcaaaaggttgaagacacactatattacttgtaccagactcaataagttctatcatttctgctgttaaaaaccaaccttctccagtttggtttccaagagaaagtataggtgatgccatacctgctaattcttttatgtgctttggcttagaaaatctaacgcttttttctagttgttttttcatagtttttctgtatgtttcaatatacgaaatagccatattacataaattttttgaaagcttacttcctgccaaatattttgctttaaagtctgcgtcaaatgctgagtagaaaaagaaatctaaaagatctggcacaactgcttctgctccttcattttctaaaatccctacaatatcattgtttgctgttggatggaacttaaccaatatttctccaacaacaccaaccttaggctttttaacatttagtagtggtaattcatcaaactcttgaatgatttcttttatgttgttattaaactctctcttgcttccattgactaaatttaattttaccttttcattccacttcttataaatatcattggcagatcctttaactttttcataaggccttgtcctatacaatactctcatgaataagtctccatatactaatgccataatagctttatgaagcaattttggagtaatcttaaaacctggttgtttttcaagccctactgcatttaacgatataacaggtatttgttcaaatccagcatgctttaaagccatctttaaaaatccaatataatttgttgctctacaaccaccgccagtttgagatattataactgaagtattattcaaatcatattttccagattttaaagcttcaattatttgaccgattactataattgatggataacaagcatcattattaacatatttcaatccttcatcaacagctttcatgtccattgatggtaaaacttctaaattatagcctgatgcattcactgctgtctcaattaagtcaaaatgaataggagacatttgagggcataaaatcgtatgtttttttctcatctctggtgtgaatactggattttggtatactatttgttcttcaactggtttataattttttcgttctctttcgcccattgcagcttttaatgatctaattctaatcttagcagctcctaaattatttccttcatctatttttaaaactgtatatatctttccttttgaagatataatttcagaaacttgatctgtagtaactgcatctaatccacaaccaaaggaatttagctgaatcatatctacacaaggctcatcagcaacaaaagcagccgctctgtataatcttgagtgatacatccactgatctacaactctaagtttatcttttaatatacctaaatgagacacactatcttctgttaacacagccatatcgaaagaatttattatatcaggtattccatgatttatttcaggatctacatggtaaggtcttccacttaatactattccttttttattattctctcttaagtatgaaataacttcctcaccttttttttgaatatcctttttgaaactctctctttctttacttgcttcttccactgctattttagcttcttgcatgcttacatcaaatgccttgaattcatccactattctttttataagttccttttcgttatccaaagataaaaatggttccatgaaattaatgttgctttcctttaattcatccatattattttttatcgcttctggataagaagttaccataggacaattgtaatgattttgagcatccataaactcttttttctcatatgatatacaaggataaaatatatttttaattcctctatttattaaattcattatatgaccatgcgccaattttgctggataacaagctgactctgatggaattgtttcaattccaagttcatatatcttcttgcttgaaggtgctgataatttaacgctaaagcccaagttagttaaaagtgtaaaccaaaacggataattttcatacatgttaagaactcttggaattcctataactccacgtttagcttcttcttcttttaaaggcttataggcaaatgttctcttatatttataatcgaataaatttggtagtttgttttccttagacttttctattccaagccctctttcgcacctatttcctgaaataaactcctcatctgtagagaatttatttacagtaagcaaacaattattcccacactttccgcatcttctaaatgatgctgtcatttcaaattgatctattccatctctaggtaataaagttgacttttctccttcaatatatcgttcctttgcaataagcgcacaaccaaatgctcccattagtcctgagatatctggtcttactgcttctcggcctgatataagttcaaaactcctaagtacagcttcattataaaatgttccaccttgtactataacttttccacctatgtctttttcatctcttaactttattactttaaacaaagcattctttataaccgaatatgaaaggccagctgatatatctgaaatttcagctccttctttttgagactgtttaactctagagttcataaatactgtgcacctagaacctaaatccactggagctttagattttaaggcttcatttgcgaaatcctctaccttcatatcaagagacttagcaaaactctcaataaaagatccacatcctgatgaacaagcttcatttaaaagtattccatcaattgcatcattttttatctttatgcacttcatatcttgtccgcctatgtccaagataaaatctacacctggtaagaaatggtctgcagccttataatgtgcaattgtttcaatttctcctatatctatatgaagtgctgctttaataagagcttctccataacctgtaacagaagagtttacaatctctattgtttcaggaagtttttcatataaatctttcatgatttctacaactttatttaacggatttccttcattgcttccatagtaagaatataaaagctcggaattctcacctataagtgctactttagtagttgtagaaccagcatctattcctaaaaatgcttgtcctttatattcccttaactctcccctttttacaacatttttatcatgtctctctttaaacttgttgtaatcttctttatctttaaataacggttcaagtcttggttcagtatcatcctttatattagaaatatcagaaattttatctactatattttttaaagatgttgatttttcctttgttgacaatagagccgctcccatcgcaacaaaaagttgagaattttctggtgcaataatttggtcatcctttaaattcaatgtttcaataaatctttcccttaattctgaaaggaaaaataaaggacctcctaaaaatgcaacattgcctcttataggcttaccacatgcaagtcctcctatagtttggttaactacagcttgaaatatcgatgcggctatatcgctttttttagcgccttcatttatcaatggctgaacatctgttttcgcaaagacaccacatcttgatgctataggatatattactttatattctttagcatactcgtttaaccccattgcatcagtattcaataatatggccatttgatcaatgaaagctccagtaccgccggcacaacttccattcattcgttgctctattccacctctaaaatatgtaatttttgcatcttccccgcctaattctattacaacgtcagtctcaggaataattgtttcaactgtttttgaacatgcaattacttcctgtacaaaaccaagattaagccattttgatactgacaatcctcctgatcctgttatattaattttgcaattaacattccctaattcatcatagcattcctttattaagtcaattattgtacttcttatatctgaaaaatgtcttttatatttactatatattaaaatgttctcattattaagaaccactaattttactgttgttgatcctatatctaaaccaattttataatttatcatatttatttcacctactctgttttttcaatgtacatattggttatataattttaaagcttaagcacatgaaagaaaataatccctcatgcatactggtctgttatttttttgattatgccttaataaatacttccatatgtatactaatataaagtattgtctataattataaagaatttaagttaatatttacaattttgctattggaggtcacaaatgaattattttactgaaggaaacaaattttacaatatgaaggattacgaaaaagccatggatttttataaaaagtccgcatcagaaaatttaaacacggcttgttcatactataattgtggagtttgtttaattaaactcaaaaaatttgatgatgcaataattatgcttaacaaagcaatttctcttaagcatgaaagtaaatacttttttaatcttggatattgctatgtcatgaaagaaagctttaatacagctttacgtttctttaatttagcatggtcaatagatcctaatgacaaagattgtgaaaaggccatagatcttattatttcaaaatttaaaaaagcaaactaatttaccattcaccagcaatttcttctacatcatgcttattaaataaattggaatcaaaataatttcctccatcatagaaggttgtatctacattgatccatttattttcatccgctaaataaacttggttccatgcatggccaacatattgttctccatcataggcttggcctcctaaaagcctaactttaagattagcagctctagacatcgctacataaagacatgccttatcaaaacaaatacccgttctactactgaacgctggaattgcaccgctttctggcattttttcagtgtcgcctccacttaaaacttcttgagccttttcattatcgtactttatattacttccaatccaactatataatatttttgctcgttccctatcagttttagcgccctgagttaattttagcgctttattatcaatttcttcatttgatttaataccgtcttctatagtaactccattataaataataatttcttttgatgatgcatttttaattgactgtatgttcttaaataatttactatttacaatcttgctattttcacttggtgaatattcttgtttaagaacattttctgtaaatgattgaactgacgtggaattaaatattatactaggaaagactaatagtgcaattatgatacttacttggatacatcctgagatgattccattaactactaacatagttttattttcattcataatttttcctccacaaataatattttcaccctattataatgtatattctaattatatcaaaaatgagaacataagcatattaaaaatacatctaaaatatgtgctttgaatttcaacgagcgaaatataaaaacactattaaaaatcattcacgtctacagccataacttttttgattacctgactagtaacctctgtattatatccctttgaaattaaatacctatataattttcctgaaattttataagtatcggtctctttattctttattaaattatattttttttgtgctatatcaaatgcaacatctttttcattttctttatctagatttaataattcctcatcaatgatttctttgcaaattcctttgcgaagcaatgtatattttattttctgacttcccattgatcgtaatttatcttttataaaaatttttgtataattgccatcatttataaaattatattctttaagaaattcaatagctttgtcaatagatgattcgtcatactctttaagctttagcttatctctaacctctttttcggttttatatgttttttctattattctcaaagcagattccttacacctcataaagttttcactttctgctagtgtcctcaatttctcaggatttatttcactatttactttaagactttctttataaaccaattctgctgaaatagaaaatgcatactcaccatctaagaataaattaactctttctttgtttctcttttgaatttctattttcgttattttcgccatagttaaaactttcaccttttttattatttaatttactagttagactttagtatgtgtatcgttgggctttttaaaacttttttcccaacttcattaatctttaatatatccaccatatttaatctatccatatctttaacaaattcaaatatgtcctcgccctctaatgcctgatgaagcatgtaattgcataactcagatgaatcctctaatgttgatattacagctgtcttatggactttcttcattatatttaaatctctatctcctatttgaatctttccatcaactacgctttttattgtttcctcaatggccgctttagcttcatcaacgttttcctcactaactgctgtgtatatatagagagtttttatattattggttatttctaaatgagtataaatatcgtaagctaatcccctattctctctaatttctctaaaaagaagtgaattcgaactttccccaagtctatgattcaaaattcttagtggaagttcatttgatttttctaaatcattgaaggtatataaatagactatagtgctttgctctatatccttcttataacttattcctgttatttctttatttttttctattatgatatttataggttccggcttttgcccttcccattgactgaaatagtttttcactaagtttatagcttcatcatgctctaaaggcgataccatagttatgagagaattttttggtgtatagtaccttttataaaaagacatcaatttctttctggtgaatccagaaacattctcttcaagtccagtaacttcatatttcaaagcacttttattaaatgcaagtttatttacatttttaaaactaaaatcctctatatcatctttgctcatccttatttctgataaaattacacctcgttctttttctatttcatttttatcaaatgttggatttacaatcatatcggccaaaagctctgttgcttttttaaattcttcaatcaagcagctaatcgtataaaccgtaacatcataatctgtataagcattatattctccacctaaagcctctaattcatcatttaactcttcaccagttctattgatggttcctttaaacaaagtatgttcaataaagtgacttatacctttttctttcatattctcatatagagcaccgaccttaactcctatattaatagatgcaatttgagtatccttcttaatagttattacttccaagccattttcaagtgtatgtctcttcacatcaaaatttaattttatcattcactattctcctaattacatatcaaatatcctgatactttgcgatcttttcatttaaaataacactagtaatgctaatcacgttttaaagtataaatatgccattcataatcatatcacaaaacaaaagtaaatttctataatcaaaaataatctatacacctatataataacacaaatatatgttccaattcaaaattagtattattatccacacaagatgtctgacgtatattcttaaaaatctttttatttcttctaaattcatgataatcattataaatttattatttatagataattattatccaatataatatatgagagtatttacattattatactataatgaatttaatatataccttgtaattgagcttgcagattttagtactgcttagatcttgttttattgcaatcttaaatgtagatttactattataacatacatattgatctttatatgctaaacttaatataatatgtatgttgcaattcacaatacacatttcacaattcacaattacaaccaaaattcttgtaatatttttagaattttgataaaggattatttttgcaatattatattgcgcttaggacataaaaaattgtacaatgtgatatataattgtaatagaattgccttatttgtaaggtattatgttattataaccattgtatgaatttacacgttcacatataaggagatgaaatgttatgagaaagtctattttaattgttgaagatgaactaagaattagatttttacttagagattatttaataaaggaagattttaatgtttttgaagcctcaaatggcgaagaaggattatttgtatttagtacacaaaaaattgatttggtacttttagatattatgatgcctgttatggatggattaactatgttggaaaaattgagagaagtctctaccgttcctgtagttttactcactgcaaaaggtgaagaagaggataaacttcaaggttatgattacggagctgatgattatataacaaaaccctttagccctaaagttttaattgctaaagttaaggctcttctaaaaagaaccagagaagacttagattcgagctttcaagattttaatggtttaactataaacaaactttcgcatgaagtaaaaattgatggtaaagaaataatattatctccaaaagagtacgaacttttaatgtacttagttactaatgaaggaattgctttaagtagagataatatattggataatgtttgggggattgactactacggagatatacgtacagttgacactaacgttaaaagacttcgtgaaaagctgttagataaatctaattatataattacagttcgtggcagcggctataaatttgaggttaaataaatgaggcgtagtttatctaaaaggctatttagcataacattaggccttgttcttgcattaatgttcataacttactttgcacaagcttttttctttgaaagtttttattcttacaaaaaaacaatttcattagttaaagaagttaataagtttcatgatttatattcacttcatatagacaatgatgctgacttgtataaggccttgcaaaaatttgagaatgataataatgctaaaatcatcattacatcaacaaatggagatataaaatatttttctaacaatatttatagtgataaggagagttttgataccttaacttcttttggtaaagaattaataaataatagcgatttgattaatgatgttattactcattctcaaaccaagtatacaacttttaccaatgagagcagcggcttaagtaaaattggtgtaattagccctatgtctataaccacaaaaaatgatagtcttattttttgcgttgcttcaattcagccaataaaggaagcctctgaagttatgagtgaattttttgtatatttgttttttggattgattgttatatcagtaatactttcttcaatttactctaaccttatatctaagcctcttgtaaacttaaccaatacagcaaacaaaatatctcatatggatttctcagcaaaagtttgtgaaactgatagagatgatgaaataggaagccttgccaaatcgctaaattttttatctaaaaatctacaagctgctttagtagatttacagcaaaaaaacaagaaattaaaagatgatattgaaaaagaaagacaattagaagatatgagaaaagatttcatatctaacgttagtcatgaactaaaaaccccaataggaattatagaaggatatgcagaaggtattaaagatggtattgtgtctggcgaagacgccaatttatatttagaaactataattgatgagtcgaaaaagatgactgtattagtcactaacatgctagaactttcaaaacttgaatctgggattataaaaccaaattttgaatcttttaatattaatagattaattaataaaatattaaagaagcataagctagactttgaagaaaataagttcaatgtaaactttaattcatcaataccttatagctatgtttatgcagatccatttcaaatggagcaggttttaactaatctcataacaaatgcaattaaatatactcctcctggcaatgacataaacgtaaatattgaagaaggtctagacaagtttaaaatatctgttcaaaatattggcgtagttattcctgaggctgaaataagcaaactttttgataaattctatagaatagataaatctagagaaagaactcaaaagaacagtactggaattggcttatcaatagttaaaaatatactacgtcttcataacagtgagtttaatttacaaaacatcaataatggtgtagaattttatttttacttggagaaaatagtatcacctgaaggtgaagaagagtaagcggatatacattaaatatatccaccatctgctcttattatttgccctgttatatacgatgactcttcactagataaaaatacagcaattttaccaatctcacttggaagtccaaatcttcctagaggaatttcttcctctagggattttttttcatctccttctaaaaatgagttcatttttgtatctattactcctggagctatacaattgactcttacattagaaggcgccacttcttttgcaagtgcttttgtgaatgaattcaatccaccttttgtagctgaatacaacacttcacaagaggctccaacttctccccacatagaagaaatatttatgacagttccactttttctggaaatcatattatttaggacatgctttgttaaataaattgctcctaaaagatttgtattcaatatcctgcttatttcttcttctgttgaatccataaataaacctatatgacttatgcctgcattgtttactagaatatcaatcttccccattacttttaaaacttcttcaactatcatttggcaattatcaaaagctgatatatctccttttactataactccatagccgtttatactctttatctcttccaaagtttcctttgcaccttcgtcatcagtagagtaatttattataacgcttgccccttcttttgcgagctctactgctatagctcttcctatgcctcttgatgcacctgtaattaatgcaactttaccccttaatttattcataacaaaccttagtcagatattatataactgaatatctgacaaattcaccaccttttaaattttcattgtattctattatataatttctaaataacatattcactcttcataaaattatttagtttgtattgactgataatttaagataatattttataaattaaaattttttataacacatgcatttcaagaatttggtcgtaattttcaattgcatcatatatatgaatttttattatttaaagttttcttcaaaaacccttaggacatttttataaaatattttttctatctctgattccttaaaatgattttgtttaagtgccaaatataatttattaaattctgaagcgttttctatttccacctcattgtgtattccatcaaaatcgcttccaagggcaagtacatcaattcctccaatgttcctaatatgttttatatgacaaatcatttcttctattaacgatacactttcatttcctaaaaaatcagaacaaaagtttatccccattactccacccttttcagctaataattttatcatattatcatctaaatttctaggatgctctgtgatcgcacgtgcattagaatgtgaagctataaatggttttttgcaaattctaatcaaatcataaaatccagcatctgataaatgagatgcatcaggaattatgcctaaggtttcacattcttcaataacttcaactccttttctagttaatcctttatttctataagtataacctgcgttaggataccctaatgagttttgataattccaagtaattgttatgattctaatccccatatcatatacagttcttagcttttgtatatctcctttgatgacttctccttcttctatggataaaaaagctccaatcttacctgatttttcagcattttttagctcagctgtatttcttacaatttctatctctcttttgtttttacttatttcttgagtaaagctattatataattttataaattcatcatatggatcttcaattgattctttctctatgaaaaatgcaaaaacctgacctaaattttcgcctctttttaaattttcaatattaactttgcacttcttatgattaagatttaacttttcataaaaaattctacttgcagtatcacaatgtaaatcaataaacttcatatataatctccttttcaaacgttcttctactctaaaactgttttgcataataaaagtacttttctaaattttcaggacctccaattatagttttattaatgtataaaacatctttactatcaacttctatagcccacttaattaatgatattttaccacctgttaattcaatacaagttactgctgatggaaacacacagcagccatcattgaaataaatcccctcatctgcttcaggaaatatatcgttgtgagtatgcccgcagattataacttttttctccttacgagctaaatgtccaagtatatgatctatttttgttcctttatcataattacttgctggactagttggaggtttaaaccctgcaactccctccataaatctccatacatgtcttactagaaacctgctagttttccacatctcacaattaataaaatctacttgatgcccatgaaatgcaattatatcctcttttgatggcatatatctaagtataactccttcataaaaagttatattagaatataagtttatcatctcacgtccaaagccatttccggcatttgcaaaaagtctttcttgccgttttatgaattctgggttagcttttactatatcatgatttccgtataccaaacacaacctattatcatcataaaagtcattaagcattgaaaaaacatctttataattataggcgatatctaaacaatctttatttttccataattcatcaccatcacctaattctattaaagtatatccattttcataataaaatccaagagcagctttataaatatttctgttttgtcttaaagaatcagcatacccaccgtcgcccctatgaacatcacttataaatactattttagatttttcatcaaattcaattaatttaccatttttatataacctcttaaaaaagtcattgctttctgtgcattgttctttcatataaaaagccctataacattatattgatttcatttattatatgaatacgaagttttatttgatgactaaaatatttcttaatatccaaatttaaaactgtatttacgtgataacttaccgaaatcataaatattttgattccgaaaagctatgaaaatatcgctgaaggttctaagcagcaggttgtatccactttagcatgctcccacttttctactgaagctcgactcattacattcgctgaggaagttcgagaacccaaaataaaattttggactctcacttcacaagctaaaatggaacaactgttagcggaaactcgactcacgttcgttcactgagtaagcgattctcaccaaatcaaagatttgggttctctgcttaagaacctttaacagctcattttcaaatgttttctacacaaatatatttatgatttctaatgaagatatgaacttaaaatcttagccccctataagccagcactttgggtgcaaatttatagtcttagaattacccatcaaaataacctagaaactggaacaaaagtatattattcatttcggtgagttatacgcataagtatagattatagttgggttatctataaataaaaaggtaaagatagtatttttataaactatctttaccttaagtataactttttcaattagtatgagatctatgaaacattttatagcaaactacatttagttaaaatttttataatatttgaattaatactctgcaaatattctttttatttcagagtagtctttagtcttagtaagtgccagtgtaagtaatatcctagattttggaggtgataatgtataacttggaatgcaatttgagtatttatctatagttgaatctgttaatattataccgtttcctattcttgaagatctcacaactggaatcccctttgtttcaagattcctgatttcttccaaccaatttgagctgaaagtaccacttcccgcacccgctattacaattccttccgagttttgagcaaagtagtcaataatcgaaggatcagcgtcaatatggaaatatgcgatagaaaccttaggcagctcagttaatcctgtaacatcaaattgtgaataaattgtatgtggttttattgacttattaaaaaagaatggtatattgtctctcatgtaaccaaggcatccaaattcaattgagttaaaggcatttgttttaaaggtgttgattttttggacatttcttccactataaattccatctgaaaaaacaaccattgctccatgccctcttgataaatcgctagcagctaatgctactgactgatataaatttaaaggtccatctgcacttgttgcagttgaaggtctcattgctcctgttagtacgactggtttatctgttttaactgttaaatctaaaaagtatgctgtctcttctaatgtatcagtaccatgggttattacaaagccatcgacatcgtcttgctttgaaagttcatttattctattggcaagagttaaccaatgattcatagttatatcattactatcaacattagcaatctgctcaccatatatattagctattttatcaagatttctgacactactaactagcacttctatatctatgttacctgctgtataattagtagtcttcccctcttctcccgtaccagctatagttcccccagtagctagaattattatattttttaattcagaatttttcggattaatttgtatcatttttatcctccccaatttctatgtgctatattttctaaaacaataaatcgaaaatataatgtacttctttatatattttaacgagttagtgtatagatttattattctacttataatacctaataaatataaattatagcatattaataaataaatcaagtaaaaaaccatgaaaaatatataaaaagaacattgtttctcaatgtcattaaatattgaaattgaaacaatgctctttatttctcatataataaattttaattgttaattactttatctaagaactctttacatctatcgctagtaggtgcagtgaatatttcttctggaggaccttcttcaactatatatccttgatccataaatataactctatcagatacatctctagcaaaattcatttcatgagttactacaaccattgtcattccttcttgagctaaatctttcataaccttaagtacttcaccaaccatttcaggatctagtgcagaagttggttcatcaaataacattatcttaggattcatttcaagggctctggcaattgcaaccctttgtttttgtcccccagataaagtatctggataaacatcttttttatcttttaatccaactttgtccaataatgaaagagctttttcagttgcttcagctttgttcatcttcttcaattctaaaggtgctaataacatattttgaagaactgttaggtgtgggaataaattaaaagattgaaacaccattccgatttcttctcttaatttatttatgtccttattatttacaagctcttggcctagtattgtaatactacctgcttgaatttcttctaaaccattaagacatcttaagaaagtactctttcctgatcctgaaggacctataatgcaaagaacttcaccttctgtaacatttactgatatatctttaagaacttctaattgtccataacgttttttaagattcttagcgcttattaccatagctgattttcctttctatataacttgatattaaagtcaatactgttattactataaaatacatacaagctacaattgcatacatctgaagtgccttaaagtttctcgcaataataatttgtcctgacgatgtaagttctcttatactaataactgtcaatattgatgtatccttcaatgtaacaataaattgatttaatatagatggaatcataatcttaacagcttgaggtaaaattacctttctcatagcctttgagtaattaagtcccaaacttcttgcagcttccatttgaccattatctacagcttgtattcctcctctaaatatctcagccatataagctgttgcatttactgtaagagttattacacctgcaactatagggtcaaatcttataccaaatgcctgtccaacaccaaaatataagaataaagcttgaaccataagtggtgttccacggacaatgtagatatatattgtagatataccttttaaaatttttgaagtacttatgctaaatattcctaaaattatcccgaatataactgctaatattaatgatattactgcaacttcaattgttactgaaagcccacttaataaactaggcagactatcttttagtaattgaaaaatctccatttttaattctccttactattttcctatatattgaccaacgatttggtcatactttccactatcttttaatttctttaatccttcattaaatttctttaataaatcttgattttcaccttttttaactgcaaatccataatttacagcatctaatttatctccaacaatttttaactttgctccattatctactttaatcttgtatgcaataactggataatcttccattaggaaatcagtatttccattttccacagcttggaacattgatggagaatcttcaaaatagcttaaattcaatccatattttgattcgttatcttcagcaaattttgctcctgcagttcctttttttattgaaacactttttccatttaaatcattaacaccattaattgacgtgttatccttattcgtaactattgataatcctgatacaaaatatccatctgaaaaatctaatgtttgttttctttcatctgttatagtaatagctgctatagctccatccaattgattagctgtaagccctggaattattccgttaaaatccattggttttaattcatattcaaaattttcttcttttgagattgcatctaaaagttctacatctattcctttatattttccactgtcttcgaaagagaatggtgcaaattttgcatcacatgcaatcacatattttttatttccttcacctgatcctgtatcactctttgatgcaccacatccagtcattagccctatagacattactgatgctaataaaatacttaataatgatcttttgttcatttttccttgcccctttgcaatatttatttaattttaattaaaaaatctaatttattgcactctggaaaaactattccacacaataaatttcaaatgatttttttacttcattatgaaacttattatatagtttaattcaaaaactgtcaatgcattaagtatatgtataaatataacaagacatataacaaaatagttatacctaatatatatgcgcatttataggcaatatttactgtttgaaaacaaagattttacaaaagctatgtttttctaattatgaatcaagcgatacattctccttcatttttgatatttaatacttattttatgaattaagtttttatttcagtttcaaattcaattttaataggaaaaagctataaattagaaacatcgtttcctaagttcatagctttttattttaaaataaactcatagcttattttaatcattagtagttcatattttatctactatttatttagcaatatattgatcaacgatcttatcatattgcccattttcttttaattttttcaaaccttcattgaatttctttaataagtctgcattctcaccttttttaactgcgaatccatagtcaacatttgttagcttatctcctgcaatttttaattttgaatcaggatctaccttaattttatatgcaataacaggatagtcttctaataagaaatcacaattcttattttcaacagcttggaacattgatggagaatcatcaaaatagcttagatttaatccatattttttttcattatcttcagcaaattttgctcctgctgtaccttttttaagtgatgcatttttaccttttatatcatctgcaccttttatatcagtgttatctttattaacaactaatgatagccctgaaacaaaatatccatctgagaaatctaaagattgttttctttcatctgtaatactcatacctgcaatagcaccatctaattgattagatgtaagtccaggaattattccgttaaagtccattggctttaaatcatattcaaatttctcttcctttgcaattgcatctaaaagttctacatctatccctttatattttccatcttcctcaaaagagaatggtgcatatttagcatcacatgcaattacatatttcttgtttccatcaccactttttgctgaatcattttttgatgacccacaacctgccattatacctactgtcataactgatgctagtaaaattcctactaacgattttttgttcattttttttcccccttaattaattaaaaaagtattttattaataattcttattttataataagttaaaatttttatacattctttgtaaatatagaagttcttatcatacttttacattcaaaaagcaaaactcttcttctaactaaaagcttaccctaaactttacttcttatactataatgctttcattagtatttactcttgattctaaatgtagaagatgctctgttataagtttttctgcatttttactatctctgtgaatcagtgctcttgctatatttatatgttcttctttttcattcacaaactctaaatgtttgctgtctgtcattagtatccgtgataaattttccataactccttcacacatttcaatcagaagagaattgtgagttgcttttataatcgacatatgaaacatatcattcaactcattaaacagtgcaatctcattttcctgcgagacttctggaaatttcgcagctaattgcattatattttgcaattccgaatcactagccagttttactgctaaacttacagctactttttcaaaaataaatctcatttgaaaagattctcttatatttttctgtgttataggttttactaaataaccttttctaggtaaagatttaagatatccttgaatctctaacgctcctagcgcatctcttacaggtgttttactcacattgtacttatcagctagttctgataatgtaagaaaatcgccatcctttattctttggttcaaaatatctaacttaatttgcttatatatttctttagcatacgacttttcagcttgacacagatttatctctcctttcactgaaattcattgaaatcccactgatatatcagcaataataaataaaaaaaagcaataaaacacctatataaaataaatgctccattgctttatctatgtcttattatattttatagcactaccatttgtcaatattttattgatatttttttatatttatcacaaaacttattaatatattgagaatttaacaattaataacaaacaaatctagattctcccccttatgcactttctaaaaaacacataaaataaagactgaaagccataaatattatgctttcagcctatatctttatataaacagaattaattacatgctaagaacttatctctatagataaaccactataatctatacttatgcgtatacctcaccgaaatcataaatattttgattccgaaaagctatgaaaatatcgctgaaggttcaaagcagcagattgcatccactttagcatgctccaactttcctagagaagctcgactcattgcattcgctgaggaagttcaagaacccaaaataaaattttggactttcacttcacaagctaaagtggaacaatcgttagcggaaactcgactcacgtttgttcgctgagtaagcgattctcaccaaatcacagatttggattctctgcttaagaacctttaacagctcatttccaaatgttttctccacaaatatatttatgatttctagtgactatatgaacttaaggttttagtaactttgtaaatatatttatctaataagtcggattcttaaattggatagatttacgctatgaaatatatcctgactagaaataagaattatgcttttgtgaaatgtttcattaggaatttgatggctctgattcttagattaaaagttgttccaagtatgctagttcaaagctcgcctttgaggctagcatcttgggtgcaacttgtgatcttagaatcatccatcataatttccttagaaactggaacaacagcataatccttatttcggcgagctatatgcatatgttcagatcttaagtatagtaaattttaaactatgcaaatggattttcagttttgtaaagcataccttttggttgattgaatccaacttctttaacacctaaatatctaaataagttgtaagctgcttttccaaagtgtccaaatgcaactgctccatgatgaggatatctgccttctactaatacgtgacgatagaatcttcccatttcaggaattgcaaatactcctatagctccaaatgaacgagttg

SEQ ID NO: 74 - DNA, 30170 bp, Clostridium beijerinckii
ctatatttctctttactctcaccaaaattccctttgctctgtatttctaagataaataatactttgtccaattttaatgcttataagattctaaacataatttattatttcaatatataaatataatgactattccttaatcaaattcttattttacaagttagtcaaacaattaaggagcaacttaatagttcccccttaatctttattattatttctctattacactcattatgcttttttcttcattttctatgtttggtacatagctctttaatactgtaaaattaccaactaattcgtaatctccaagagttgctgggatgaagatactatctcccataagcattttttcttctccaccactatatttaattacaccattaccttcaacacatgtaaataaataaaatcttccctcatcactcgtttcttttacagatgtagtaattttatatttttgtattgtaaaatattcatctaaacaaagatatgatttatcatatccatctctttcaattagaatcccttttgaattctcccctttaagagaaaaatctattacatctaatgccttttctacatgaatttcacgacctctattataatcgtaaactctatatgtagtatcactattttgttgaatttcagcaattaataccccttcacatatagcatgaactaatccactttgcacaaagaaaaagtcgccctttttaactggaatcttatttaagtacttatctaattccccttcttctattgctttcttaaatttttccttatcgcaatcttttgttcccactattaatgaagcattctcttctgcatcaactacataccaagcttctgtttttccagaatctttttcaaccttatttgcatactcatcatcaggatggacttggaccgaaagtttatcttctgctgttattagtttaattaaaagtggaaattctttagtacttatttcagtacctaaaagtttttctccatatagatttattatttcatcaaacgttttaccttttaattctccattttctactttaccagtcccatttttatgacaagctatatcccaactttctcctattacaccttctggaacattatttctaaatttctctaggtgctttccaccccatattctctcgtaatataggttttcaaacttaattggatacatactactctccccctatcaaatgactattttatacttgtttccaagtttatattatataaataattatcttaataaaataattttaaatctggtatttttaatgttgccccgtttcttttattatatgcatcagataaattccttactctattataattttcgcttattgtatctttatcctcttcacttgttttatcatttatgccatcatatgctgccttaaaattaactagccctctgcttaaatctccttctatagctacataataacatccagcattatttagcgttagtatatcatttttatcaatagcatatgccgctcttatttccttaagagcatcctcacctttttctttatttaaatacacagttcctagcgctctatgatatttaatttcttttgaatttattgctatactctttttcaataaatctatagcttcgtcttgtctttgatttgctactttaattaatgccatattataatatacttctgcatcattaggattcattttagatgctaaggtataataatataatcctctagaactatccttaactgtatttccataatactctgctaatttaattaatatattataattaaaaggttccttatataaagcagttctaaaatacggctctgcattttcactcttatcttgtttttccattatctctggcatcaagaatccatagttatctgcatagtctttgtttagagatatactcttttcgcaattcttaagtgcatcatcataattttcatcactataatcttccaatgacattgcgtgatatcctataaatgagtttggatcactctttatcatttcatttataacatctcttgctttttctgattcacccaaattctgatatgtgttagatttaataagtgccaaatttatacttccaacatctttaccttctaactcactaattaaattattagccttttcagcagaatctttatctttagagtaaatctctgcctgccacatcttatatgcaagttcacctgaatcttttttctcaagtgctgaaatcttatttaaaatgtcagtcttattatattctgcaatttgcgttattacatcaaaaactttgacttcatttttatctttatgccatgcatcttttaataataacagcccttgatctaaattattcatcatcatattcattctagctaaatctgccagatccgatgcatttccatcatctcttggataattatcaattatttctttcattttatctttcttgtcatttgccatataaatagtaaacattgtttttaacaaattcttatctgttggataatccatcaaaaacaattcaccatattgcaaagccttatcataatctccgttcataaaagacgtaaacactatataatttgtaagttctctatctttagactcaaaattatctatatttttttgcttcttaccatcaactattttatttctagctaaataaacttttgtaagaagttcattcgaatctgcaaaatctccttttacagaataaatttctgcaatttttaaattccatattggccattcatctttttcttgttcttgatacttattatattcttcaattgcagcatcatacttatcattataaaaatcctcttcagcactattagctgcaatagtaagcttatcttttgatgactcaattctagatttagagattacattcgttatcataaccgcgctcaggcaaattactataattacaggcggagtaaaatatctgtctttcttgaagtcgcttatgtatttaaaatacttactttttttcaaatcatttatgtacgtaaaatatttgctatttttaaaatcgcttatatactctataactgatttcttcacgaataaatcacaccttacttttataatcaattcatacttgtcctctattttaacaaactttgatataaaaatctactttttgactaacattcattaaattgtaactatatattcataaatatattaaaacttttacattttaaatcagtaaatttctagattaaacttctcaatataaatagaattaaattttctgcctttaaatattcccatatccttattttgaatattaaacaattttaattcaaattctatctagtttaagcccttcgtaccttaaaatccttcttataaaaaagcacattagtggcatttagatgcactcatactacttaaagcactgaaacaattgtatttgcagcccaaatctttttatactttccttattgctaaaaaagagcaagatcttaatcctgctcttttttagcactgtaaacattattttttagataattatacattaaatctaaaattaacaacatctccatcttgcattatatagtcttttccttctagtctaaacttacctttttccttagctgcagcttctgaaccacattcaactaaatcattataagaaaccacttctgctcttatgaatcctctttcgatatcagagtgaatcttacctgccgctgctggtgctttagttcctcttttgattgtccaagctcttacttcttgtactccggctgttaagaaactcataaggccaagtaatttgtagctagcttcaattaatttatctaatcctgattcatccaaaccatattcacctaacatttcagctttttcttcatcatcaagacctgataattcttcttcaattttagcacttacaaccataacttccgaattttcactaactgcatattccttaactcttttaacataatcattatcaaaattaccttccataacatcatcctcagagatgttacaagcatatagaactggctttgaagtaattaagaataagctctttataaaagcttcttcttcatcagtaacttctaaagttctaactggtttgtttgcttctaaatgttctttaattctttccattactccatattcaaatttagcagtcttatcaccagatcttgcaagctttatagatttttccattcttctctctaaaacttctaagtctgaaaaaattaattctaaatttatagtttctatatctcttataggatcaacagaaccttcaacatgaacaacatttccatcatcaaaacatcttacaacatgaacaattgctgcaacttctctgatatgagataaaaacttatttcctaaaccttcaccctttgaagctcctttaactaatcctgctatatcataaaattctattgctgtatatacctttttctttgtattatacattttttctaaaacatctaatcttttatccggaacacttactacaccaacatttggctcaattgtacagaatggataattagctgattcagctccagcttttgttatcgcattaaacaacgtacttttacctacgttcggtaaacctaccatacctaatttcatctatgtacattcctttcttatatcgaacttttacttaaagatattcaaaatataccttaacttttaatatacctttaaaaattatactctagaaccttttttatttcaactttatattatcacaaaaggcatattcaggcatctgtaataatcaattactattgaaaaattatatactaagatactgcacttaatagtaattcaaaaaaactaattagatctatattataaatgtttaatccctcataaacttaagtttaaataattatatgatttacctaataagcgacatatgtgcaagtattcctttgggactaaaattatatataatttaccacggttattcctacccaatattcaaatactatacttggttaagcatttattcaatgtcttcaattgaattttatcttatctatagctactgtaatatcaccatttcttcaagtggaagataacgatagcatgactctagataaagttcaactaatattcactttatatttttcttggataaatctgaattaaatatgtaaatttttaagattgaaggtgagaaaatgaataagtctataaaatctttaattgctctttctttagcaatgaatctaattactcttgttcctcaaaaacctgcacttgctgcaagtgataatgataccgattcaaatgaatgttttcaagaagatggtgtctttggagatattttagatgttgataacataagagatattttttcttcttttagtgatgaagatgaacttaactggtattacgttggtaaaggaaaagatcaaattgcagaaggtccaaaggaatccgttagcttcttaaaagaaaattctgcttattacctaggtgatacatcaaaaaaagttctatatcttacttttgatgaaggatatgaaaatggtaataccggaaagattttagatatattaaaagaatgccaagtacctgcagccttttttgttgtcaaaccatacatagacactcagccagaactaataaaacgtatggttgatgaaggacatgtagttggtaatcacacagttcatcatccttctatagctcaaatacgtgataaagaaaaatttgaagcagaatttactggagtagagaatgcttttaaagaacttactggtcaggatatgcctaagttttttagaccacctatgggtaagtattcaaaaaaatcattagcaatgacaaaggatttagggtataaaactatattctggagtttcgcttataaagattggttagtaaataatcagccttcagaaagttatgctgtagagaagatatgcaagggtgcccatccaggttccataatgcttctgcatgctgtctcaaacacaaatacaaaggtattatcatcagttattaaaacacttcaaaaggaaggttacgaattcaaatcacttaatgatttacctacggaatagtaaatccagccatagagtatattaacaattccagtactatatacaatggttagattcacttaaatactttcaaaacaagaataactatagatattcaattataaaagttatatcattttagtgtgttttaaatttatcttagttacatactaaaatgttttaacttttatttttttaatctatagtcatctacttatcattactagttagagaacttttaaaaagtatctcctaaaccagtattttatataattattattttataaatttacttacatcttcgcttactttaacagaagaattttttgatacaataatattttttattattttaaaatcctctgcactatacgacataggattaattaagtacgtgtcctctgcagaatttttattcttcttcttatcatttttataaaagctaattataaaaaaatcttttctcttatttttaggctcatttcctttacctataagaatagcttttatattactatacttaatcgattttattaaatcattatttctatagaactctattgcatcctctttaattaatatgtcttgactatactccacaaaaactgaaagtgcggtaactattcctgcaaaaaaaagcacccacataggagcactttttaatcctccttgtaaagctccaaagattattcctataattatctctattattgcaactcctatcattacaccattttttttctttaaaacaataggaaattttgcgttttccaatgctaattcctccttaaaattactataatatatagacagactaagtgaaacctgaacttatgcatattttttatattcaaaatatatatcttatgttaataaatattatacagtacatatgcaatctttttcaatacttgttaatattattccttagtcatttattaatccattaatcaccaaaaaattaaacgtatcaaaacctcatatgagcacaaaatataaaaaaggaggtgtatcatatgccacgtaaagatggaccacacaaaccaggatcaagcaatccaatgcaaaaaggtgtaagaagaagaagacttcatgctaaccaagataatgtgggcgatccaaaaaataggcccgaatacgaaaattttgatggagaaccagtagaataaaagtacataagagatacttactttaattgaattcttagtaagtatctcttattataattaatcatttttgcattgctacatcttgggataaattattttatttactgtttctgtaatcaattctttttctttagctgatttttctatgatactatctaattcactatcaagtttctcaaaaaattcttcatttctaagcccatttaaatttactttaacatttattatggaactttctatagcacaatgtagtaaaattgctgaaattgctaaatctgatagcaacatcttatttccatacttcgccataacattaaggttcttataaaattccaagctttctctagctaaaattaaaggcgcttccatagactttatagtattctcttttatagccaattttctcttttctttttctttttcagtatctttaggcaacttataagaatccattaacttcaaaaagttctctctatcttcttccataagttctaaactccttacagtgaactctttagattccttttgaaattttattatactttctttttcatcctcttgaagactcatatatgcttttttgtctactgtcagagaataaaccatagaattcaatgcaccagataatgctgcaataagacccgccacacttccgccacctggagctggcaaatctgattctaattcacctaaaaattgttttatagtttcgtcacaaaatttcatataatattattcccctatctatagtcgtatttttttatattacttattgctgatacctaatctatatttttattatctagaatcgatactagataccctaagtatatccaaaatatcattgaaataaaacttattgtatatactaatacactttcaaataagtttactgcaagaatacccgctataattgatgttattactgtcatctggtttttttctcttctgtttaacttatctagatgttgtattataaacaccaagatcattgctatgaacataagaaatagtagtaacgaaataagtccatttaccgcggctatttgcacatatatattatgcatccctccaagttcaattccaggtaaataacttcctattcttgcatttctaaccgcttctataagattactatttcctacaccagtcaaaggatttttttctattactacagatgctgaagtccaaataatattcctctctgttgtaaaagcctccaaatgacttttaaccatttcaaaaaatactccgcaaaaaagtattggtactaaaacaagtgccactctaatatatttatttttactgtatataaatatagatagatatattacagctattatcaccaaatatgcacttcttccatgtgaaccaatcatagttactgcctgtaatattatatttcccatccacaacatcttaagcttgtgacttcttgatatataattgagatatacacacataactatagataatgaagttgctatagaaagagcattttcattttcaaagactccctttgtgcttccaaataccacttgtccgatttctatatttattcccgaatatctcattgccagtgatataatagaagcaaccatcataaagattacataagaataggtaattatgttcatctctttaataagcttcttttttgctctaaatacatcaactgtaaatattaccacaaatataatcaaattaacaatccaatctttaatgttattaacacttctatagataaaaatgttaaatattaaagtcactatcataaataatgccaatggaatatcaaatttataaatttttcttctcttatatccttcgataaccatgaataaaattaaaagcatcccccaagctattgttatattgcttagaatttttattcctggcacatctttgagcatagttacaaatgttaggcttacaaataagtacaataacttaaaataaaatttattatctaagaaatcatatatatttttaattgcttctctcatatacttttttatacactccttttagcttttcaactaatactttttctgaatagctaaaaattgtttgttctctaattttatatttatcatacattttatgattttcttttatttttcttaacgcttcggctaaatcctccacatcattctttttagctattattccattatcttcttttataatatcttctgcgccaccattatcagctccaattaccggcttcccacatgcaagcgcttcaatgtatacaactccaaatgtctcatgttcagatggtaatgcaaatgcatcacattccttcatttccttcgaaacttcttccctcgataaagctcctagaagtattacctgcttttcaatattcaattctttaataagtgattccaatgatggtttaagggttccgtctccaccaattcttaatcctacattttcatttttgaaaactctagaaaaagctttaattaaacattcaattccctttccttcttcaagaaaagcacatgaaaaaaatttaaaatcttcatccatattggtactctttttaatattttcatccacagaaaatagattcaaatctaccatgttgtgaataacttcgataggtttatttacatattcttgaatttctctttttaatccagacccaactgcaatcaaataatccgaattttcataagcattgtaaatatattttttataactttctctagtatactttgcatacttaagagatgaatgttctgttaatactaatggaacattatatttcttacttatatatgaagcagctattcccccccaaaaagctgaatgagcatggataatatcaacctttccttcatttttaacaatttcttgatacatcttatccattcttttattgaaactcttaaacattaatggacttttaggtaaataattataatctttatatctataagttctaaggttatcttctacattaaagtttatgcctctcttttcatgaatttttccaaacatagtaataggccaaatttcattgtatgcgacagtaatcttctctccactatttgaaagagctttaaattgttccttaaaaaaacttccatgaactttgtttcttggagatgaataccaagatggaataaccattatgtgcatttattcacttccttctaatatattgttcaacctttccacaattgaattccattcgtaattgatatctggctcacaatatatcttattatttttatgcatttctattaatttatagatatgattttttatttctttactattattctcagttacaacacattttctatgattttctaccactcttttaattggatcatctttatccccataaataacaaatatcctaccttgtgccccaaaatagtcataaattttagctggtatttgctttgaatttttattaccaaataaaagcaaaacctctccatttaacatgtatttaagcgcctcatcgaatggtattctaggggatacattcgctatttctaaattttgcagtttcttcctagcctctatatcatctatatttccaaaaaacaacacatttaactgattatatatttctaagttctctgtttttatttcttcaagcgcttttacaaaaggtcctatatctctaagcttagaaaatatttctcctgtatatattatgttaagtttatctttctttataagcttaggcgctttctcatgtaataatttatcgtataatttcgcatcaaaacctctatttaatataaaagtcttactattatctaaaatattataatcttttaaatattcatctctattggcatcagtcacaaatataaatttatctgccagattaacaatatctctttccatattcttttctaaaaccttttttacaataaaagatttttctcttgttgaatctttaagccatggatcactccagtaagtaatccatggtacgcttggatactgcttttttatataataagcacataaatgtgaagatggcggctcatgcatagaaaatataacatcaaatttttctttctccattaactctattccatattttcctgcttttcttgcccatgaataatacatatctggtattgctaatgcattttttattttccgtaatacttttcttctattagtatttcctatttttgaaggcgaattattgtagctttcactatttcttggcataaactttttaaagataagtccaccatcaataatatgcgttttgattttatcattcatcatagagcgtaatacttcatcataatatattgaatctttaggaaaattaacagttagaagatgcacttcattatcattaatctcacttaacttatttagatattgtaaagtttcaatagctgctgaattatttatcaatggtgaatagcaggcaataaataatatcttcatataccatcctcctatctttttatcttttttaaaattaattcttttatttccactagttcttcaaccttgaataaataacataaaccaagatatatagctgctccaatactcactccaagtaataggattgtaattgaattaaatttattttcgaagtaaattaataacgttaaaagtaccgctcccatgattattgaattcattattattatacttactttttttaatatctctgttatgttaaagtttttttctaatttaattatatttataaataagagtaccgatgttactatcatagctataactgaagctaatgctattcccataatacctatatacttagataaagttatgctaaatattatgttaatcacaacaccaattataccatttattgctgtcacttttgtctttccactggagaataaagttgaattcaaaatatctcttactcctgtaaaaaatattcccgctccgtatcctaacaatgcaagtgttgtaatatttatcgcataaccagtaaactcgcccctagcatatacaattgttattatgtctctactaaatatcataactccaacactaattggaattaataatatagataaatatataattgatttttttaaaatctctaaaaacccagacacatctcctctatttctcatattagccataagaggatatgctacgctggtaactgatgttgttataattgcatttataaaaacaattaacttctgcgcataatttaaagctgagactgaaccatctggcagcttcaacgcaatatactgatcaacagccatatttaacgagttcgctcctgctcctataattactggaagaatcaataccataattgcctttaatctatcatctttaaagtttataaaaagtttatatttatactcatgtgtaatcaacgatggtacctgaactgctactctaaaaaaattccctattacattggcaatggtcaatcctaaaatatcataattcctaaacaacaataaatataatatcataggcaaattaaaaaacaatcctaaaattgacggaattacaaaatcttcatttacttgtaataatgcggtaaaacatgcattaaccgataaaaataatatattcacaagtgtaatccttaataactttattgcaattagtcctgtttcctcagctggccccagtatatggactatttctttcgaaaaaaggcttgttataacaaaaagaaagaatgatataataaaaagtatgtttattatattgtttgcaaaatcattcatctctttttgtcccttttcagctcgaactttgctgagcattggcaaaaatgcagttgaaattgcaagtccaactaaagtaaatattgtttctggtatagacactgcaatattataagcatcagtatatattccagcaccaaaatttttagcaataagcatgtctctggcaaaacctaaaaatctactaatcaatgatactatcattattacaaatgtagattttattaagctacttttttgtttcatttaatcacctatttatttctgtgttataatgttcagcttttctattaaacactaatctgcttattcctatattttaatactaacaataaaaacttaggaatagccattaatctctttattctaaaaggttctttcgcaactctgtataaccattctaagcctagagatatcatccatttgggtgcccttttgagctcacctgcaaatatatcaaaaacaccaccaacccccataaagatatgcacatttgaatttccaataattttttcaataaatatctcttgccttggggaacccattgcaacaaaaacagcccatggattcccactttttacatcttcaattatatcactacaattatttaaatcaaaaaaaccattatgaaaaccagatatctttagtttaggaaactcattctttatattttcaacacattttttaatagtttcctctttcgagcccaataaatatatagatctttcttctaaatttgctttaattaatatctctctaaatatatcaattcctgctatcttttctttaacaggttttcttaatatctttgaggcaataacagttccaactccatctggtataataattgaactctcgcttttaaaattctttttaagctcaagattatttaatccattaaagagaacttctggatttccagatattatatttaccttttcaaaattttcaatatagttcattaacgcatttttatccctattaaaaatattaaaatcaagtatttttgtaaacatatttatctcctaaatcttaggcaatatatcgtatagaatttacaattattaattaaagtctgataacaaataaaaaactatgttaaccaaaattcaaaattgaaaaatatacattgccatgtttattttatagttctatttaacatttgatctatctctattacgatatcatcttccggagctattttttttgcaagttccaaatgaatttttgcttgctctttgtctcctaagtttatatagcacattactatattagtacagatttcaacttccttagaagcttcaaaggcttttctaaaatattttatagcttcttcatattcaccaatacatgcataattcattccaagttcattaactgtttcaagacttcctgattctatagtaagacttttattcaagtaatgaatagctttattatagttttcaattcttctatacccaacacctagatagtaataaactaaaggattttcattaaattcttcacttagtggtaataacaattctattgctttcttaggttcatcttttaaatattcaaccgctttctcaaagtgacttatattagtaatatcccctattatcttatcaatttcatccgtttttttaccacccttatttatatactcatttatttccacttctgcacctttataatcaccatcatctttaagtattaatgcattatacagatgtggttctggcgatttttcaaacttttccttaaattcttcaatatcttctaataaaatttccgaaaatccagaatctttttctcttattgtctctcctatcgctagaagtttagttaaaatttcttcttctcttgtatacctataaagaccttttagcagaagataagcatcttctaatctatctttttttattctatctgcaataagactcttcacacattcttctgcatctggtatataagatagaattgttccataatcatcattatatttaacatttttatctgctccaaaagtaataaatataccctccacaaagtaatatataggcaggttacttaacttaacttcatcatttacatttgatacaacataatccgagcttataggcaaatacagatcatcattcttaaagttaacgccttctggtatattaagacttcttttgaacccttctttattcatttctaaaaataataatttacttaatttatctttatacattgtcttgtaattactcattttacacctcttgtttaaatctcactttatagatatccaactctagaactaaatttatatggtaacttaccgaaatcataaatattttgattccgaaaagctatgaaaatattgctgaagatctagtaaatatgtttatctaataagtcaaatatttaattatcattatcaatacttaaccaatttataattctaaaatttagaatgcacaattattgagcagatttcccaggaaatttgtaataatacaattctataaatttcttaaaagaatttatttcttaattgtgcagtgtacattaaatttatcaattgtttaagtattcattaataataattggtggacattcactttttgatttcataattaaagaaattgctatcaccaaaagatgatagcaatttataaggaaactcgactcacattcgttcgctgagtactcacagagtaagcgaccatcatcaaatcacagatttggctgtctgcttaactgattcacacaaaatctcagattttagctctctacttatggaaacttagcttaattgtgaattaattatttccattactttttctttaaatgtagcaatatctttctcagcattgtctaagctgttgctcttaactgctaaataaactttcatctttggctctgttcctgatggtcttactacaaaatatgaaccatcctctaaaatgtactttaatacatttgacttaggtaagtcaataggagccttagtgttatttacagtgttttcctcaacacttaatttgtaatctaatcttgtaacgattttcacaccattaacttcacttgctggattatttcttagtgcttcaatgcagtttgctatcttctcttgaccttcttttccttttagttctaatgatacaagagtttctttaaaatatccatacttttcatataaatctattaatgcatcataaagactcttgccttgttctttataatataagcacatttcacatactaacattgctgcaataacagcatctttatctcgtacaaagtttccagcaagatatccatagctttcttcaaatccgaaaatataatttctatctcctgcatcttcaaattctcttattttttctccaatgtatttaaatcctgttaatacatccataagctcaatatcaaaatcttcagcaatacttctagcaccttctgttgttactattgttttaattacaacaccattttgtggcaatttattagtttctttcattgaacttaatatataattagttaataataatcctgtttggttaccagttaataccttgtattctccagtgctatctttaactacaagacctattctatcgcaatctggatcagttccaaaaattatatctggattttctgttttagccatctttaatgctaattcaaatacatccggattttctggattaggatacgatgctgttgggaaatttccatctggagcttcttgttccttaacaactttaacattactatagcctaattcttttaatacggttcttactggaacattaccagaaccatgaattggagtatatattacatttaaattactagctttttccttaactaaatctgtccttatagttaatcccttaactttttcatagtagaccttatctacatcttctccaatatattttaatagccctttctctaaggcaacattttcatctatgctttcaatctttgagaaatcatctaccgctttaacagagttaattatcatttttgctttttcatctgttacttggccgccaaattcatcataaactttatatccattataaattttcggattatgtgatgcagtaattactataccaccattacattttaattctctaactgtaaaagacaatacaggagttggtcttaaactttcatataaatatacttttatattatttgcacataagttaagtgcagctgcttttgcaaattccttagacatatttcttgaatcatatgcaattgcaactgaaggatctttaaaattatcatttaagtaattagcaaatccctgagtagattgagcaacagtatatatattcattctattgcttcctgcacctattacccctcttaatccaccagtcccaaaatctaaatcttggtaaaatctatcttcaatctccttttcgtcagatatgctctttaattcattcttagtttcctcattaataaagtcagagttaatccacacgttatacttttccttataattcattttctgatcccctctctgtgttttttctcctatacattatacaatatttatccataatataaaaacacttttatatattttgcatcatatataaaaacttggatgcattgccaagcattttacccttctaatctataatattaactctaataattaaaattatcctaaaatatatctttgaaacactgtcatttttcataacaatcataaattcactatacatactctaaaaaacaaaaaatcaaccatctaatgctcaattaaaatggttgattataatatttaaaatttaactctgtttatctgtaattctattctgtttcttcttccttagccttttcttcttcacttattgatcctataaccgttgataaatcatctaaaacttcaattccttcagcaaattttagatttttaaaagtataaactgtcccagcttgtccattagaaacatctaattcaacatcctttggtaaatcttttgctttacaagatacctttactaaatctctttgagtttgtaatattaatcctttgctttctaaaatgcctttaccaacaatcttaattaagacttcagtatgcattgtatcatttgctgctacttcttcaaaatcaacatgaattgctttatttcccaaagcatttctttgaatttccttaattacagcgtttcctttccttccatcaagattaaattttactattccatgctctccactagctgaggtttcttttagtaatgctgattcatctacagtaaatatttcatttcctatttcttttccataaattacacctggaatcttgccttctcttcttacctttctagcaccatgactagctgtttttattcttttagttaaatttaattcctccattataagtacctcctaaaaatttatttttcattttcttgcaatgtatttaattcacattttaggaatgtacattcacgttggaataaaataaataggcctattacatttacaaggtctaatagtttttctaatattaattttatctgaagaattatgaaaagataaaatcaagttagacttacaattaaacatttaaaatcgcctctaatatctattaaatttttattttcgtaatttaattacaatgtatattatagcacttaattaccagtttacacaaaaaataacaagtaatatattaatataaaacttgttatttttataaatttagtttctttcaattctaactttgcttccacccatacctgattctgctggagtaatcataagttttactggtactctattctttattgcttcaacatggcttattataccaaccttcaatttttcattatgaatcctttctaatgaattcataacaacttcaagtagatcatcatctaaagtaccaaatccttcatcaaggaaaaataattctaatggtgcagttcctttaagctgaatctgtgctgataatgccaaagctaatgataaagatgctaaaaatgtttctcctcctgataaagtagtagaatctcttttggctccaccatttttataatctctaattataaatctgctattgtcatcaacctctagtccataatttccatgagttatttctttcaatctcttagatgcttcaactgaaacatacttaagcttacttactgctacaaactcaacaaatttctttcccttaaataacttttccaaatcaccaagaagagccaatttatgttctagtttcatcttcttatctaagagatctttctgctcttccaacttattttttatgttttttaattcttcatctaccttaattttgtcttcattaatttcattaaactctttttctttaatatcttttaagagttttatttctgtatattctttttcacttaactctttaccatctattttattaagtaaactttcaattgctccatttacttttgatacttcacttttataactttctacttttaatttataatcattaatttcttcttttccaattatattttttttgacatcgtcaagggaattaaaaccttcactgtctattgcaacttctaactgagcttcttcatctttttttcgtttacttaattctttatatttactgattgcagaaattaatcgctcattgttttcattaaattctttctctattttatttttattgttttcactttccttaaactcactattaatattttcaatattttcctgaattttatgtagtagtgaaaccagatcatctgtattatcgactttgttctttatcgcttgtattttttcttctttacttttttcataattacttaattctgtattatacctagttaaattttcttttgctaaaataacttcactagttaaattttctttattcttttctaacttttctattagctccctgttaactttaataacctctgataatctttctctctctttttcaacagctttaatttcttcgctttttttattaaaatcagttactaatgtctttgcccttagcgaatccaatctattttttaaaatattcaattcttctgtattttctgtaatactcttttccaaatcttcaagctgtctttggttagttctaactactgctcgtaattcatttatttctccggttttaatattaatttcattcctcagcttattaacacttttttcaagttcttctttagctttagaataactttctaaagctttttctaaatttataaattcctgttttaactcttccaaaggtttttcattaaacgcagttccgagcttttcaatttcttcaagattaactttaattttttcgttaaaactatttaccttagtttcaccttgagttattttgctactaataatctttattgaattttcttttagttttattttttcctctacattcttcacatcttgaacttcaaaaatcctgatattttctttcatatgatgagttgatccacatacaggacatgtatctccatctttaagttcctgtctaagagtatgtgctaaattttctctcataatctccctttgagtattttttatttcctctagttctttttcaagttgcttttcttcttctcttctacttaatatatctatttgtaagttttttatctcttctctagagaaatctatttctttgttcagctttacataactgctccatttttgctcattttccactatcaactgttttaaattaactaaatctttttgttcacctggcgaatttttaagtaaaaactcatattgtttatctttatcttccaaactctttttttctttatctaaaacttcccttaaagcttttcctttaagtatagtttcactattttctttttcaataactgctttcttttgcttatccttaactagaattccatttattttttctaacttttcttctacaattattccttcttgaactgcttcctttaaactttcttcaattttcaaattatcatatgttttttcgtcttcttttattaatttatttttattacttatttcttcttctattttaatgagctcactctgtatattattatttttagcatcacattctttaatttgtgcctttaataaatctattttattttctatctcacgtatcaaattcttttcttcaatagcatctttaactttttgttcctgcatcattaattgaggaagtttattctcttttttatcttttgccatgcaccaaagttgttctatcttttctttttcttcttttatcttacctatctttgattttaattcttctaactcaatctcatttttatcaaaggcttttctagtgctttcaaatgcatttaaataaggtagtacctttgctcctgcctcgcctagctttatcttttctatatatgaatttatgttttcctctttttcctttaatgtttgctctttatttttataatatagtaaatcaagctgtagcttccatatttcttcattttctttatgcttcttttctattatatctaattcctttttcaaagcttccagattattttttaattcctcaagagcgttttccttttcttttaatttttcttgactaacatcgctgtatccacttaattgtcccgctaaaatattgctatcagttcgctctttgcttatctttgcactaagttttctggataaattgtctccaaattgttgaaggttaaacaacctttcaagcatatcacgtctgtccttaccttcaagctttaagaattcactaaacttcccttgaggtaaaacaacagttcttgagaaatcttctaaattaagacctactatctcctcaactttcttatttatagttttaactccatctgctaaaatttcttcttctgaacttgttacttcaacgattttacactttccagagcttattccaccatctttttttcttttaaactccctgtcaatgatatattttcttatttcactacctgatatttgaaactcaaaatttacatttaatctgtcacaattagtatttataaaattggagctttttcttgatacatttccatataatgctagagttattccatctaatatggttgatttcccacttccagttggtccaaagattccaaaaaatcctctatctgttaatttatcaaaatctataatttgttcatccatgaagctatttaagcccttaatcctcaatttgattggtctcatctgttccaccctcttcgtttataattgataaaagcaattccataacttcaccttctggaggagtgcccctttctttaagataaaactccttaaatatttcctcaaacgatttttcacttaagtttaattcactctcttcttccaatcctttaaccttaggcattatttctaatatatctgcttttaattctttcatttgttttatttcatcttctcttatgtatctatctgtacttatttctaaatacacccagcaatctttatctttattttcagcacatcgtaatattgcatcttcaatacttgagcatttccaaatttctattggtttatatacccttaagtttatttcttgtatgtcacattcttcattagcttttgcctcaactatataacatttcttttcaaagctaacctcttttttgttatagtgaattggtgacccacaataccttgctcttttatccgttcccggaactatttgtggtttatgcacatgccctaatgctatatactgtgcttccttaggaaaacaacttccatctactatataagcacctcctaattgaatgcttctttcagagccaccttcctcacttcccattgcaaatagatgcgatattataagattaattgtatcttctctaaaatgattttttaatgaattgaataaagaaaatatcttatcactataggatttagctttttcatcttcagcttccatatagttatagataacttcattcagtcttttctcgctcggataaggcacagttaagataactgctttttcactattaatttcaacttccacatacccttctcctgatgacaaaactttatgtttcccatactcaccacaaggaactatagtttttggtgtcccaaccataatgattccatgatcacgagcaagtggacctgccgcaaccaatctctctggattatcatgatttcctgatataaccaaagtaagtctctccccatttttcgatagtctctttaaagtatcataaaacattttttctgcccttgccggagggtttggattatcataaacgtctcccgcaatcatgattaaatctatattattatcttctacaatcttaacaaaatcatttaaaaactcttcttgctcatccatccggctttgtccctctaaattcttacctaaatgccaatcagctgtatgcaatattctcaaattatatctcctcccattaggcccaatttatatttacattatagcctacttaaatagattttttccaatactattttgtggatatatatttgatttaattatcccaatcaaatgtatgtgtacccatacatttgataaattgtacatatattaatataataattttattatttgtattgagttttattatataaagcatgctagatataataaacaaagactataaaaacctgtattcatatacagcaagtaatttataaaaaaggtaggtaatatttatggaaagaagtaaatctttaaatactagtgaactagtattaatggggctaatgattgctttaacctatatagcaggaagcataattaaaattccatcagttggaggctttgtccaaataggggactgcatggtattcttatcagtaatagttctaggtaagaaaaaaggagcaatttcaagtgctcttggtatgtttcttgttgatgcattaggtggatattatttttgggcaccctttacgctaattattaaatggggaatggcttatattgcaggatccatattagaaaaaatgtcagaaaacaaagttactgtaaggtatacaattgcatttgtatccagtggtatatttatggtgattgcatatttttttgctggaataataatatcaggctttttaacagagaaaattgggctaatacaaggaatggcatattcagctaaagatatagttggaaatataattcaagtatctactggtataataatagcattaccattaagtgcagttgtatcaaaagcaaaacaagctgtatttgctcattagatttagcttctaaaaatcattcaaatttttataacagaaatttttaaaattttctatcgctaaaagtctcaggtgattccgtatcctgagatttttttatctgcattttcaaattcaactaagaaatatctaggggatgaatatattttcctttttgttctcttttaaaatgtccccttctgaattagctttattaataatttatgcttcagagtagcctagatgtcacctatttcactccaattcaaactcttatataataaaaaagtgactacatcataataattaaaaaacttaatatgatacagtcacagtaattaataaattttcaacctctattttatgctctgttctcctctgtcttagaactttccattattttaggcattatcattgatgaaagtaacgatataacagctattcctataagtattataaataaaaagtgtaatgaactgtttaatgagagtcttatctgttcatcagttaccgctgaattatacaaattactcggatcaactccatttattcccaactgagtaaaatacttaattatatatatattaaatatactaccaaatatacttactcctatagtttgacctattgttttaagcaatgaattagccgcagtcgcagcacctctcttgttatattctactgactcttgaattattattgttaaagttgtaaatgctccaccaaatccaaatcccattatgaaagcatatattattactaataatatagaagattctgcattcaatgtaggcaataacgctgtactaattagtaagataacattagatataagtattactattttcccaccaaactttactatacactttcctaaaattactgcagctataagccaagcaaatgacatgggagctagtgacaagcctgatatcttagcactgtatccaagtacattttgtatgtatattgggagataaacattcgaacccattaatatagctgaagccaagaagcttattaaattcacaattgaagttgtctttgtaaatatatcaaaaggaataattggctctttcgcttttctttcaattatacagaatgcaactagtaatataacagttgcaataacggataataaaataaatatgttattgctagaactcatatcttcatttgataagaagatattcaaaaatataaccatcgccagtgataaagttataattccagcaaaatctatactatgttttttcttttcgaaaacttcatccaaatttctttgaataagcacaactgatattattccaaagggaaggtttataaaaaatatccaatgccaagataataaatctattaaaattcctcccaaaaatggccctactaaacttgcaattccccacacagaacttattattccttggatctttggtctttcctctaatgtaaatacatctccaataattgtatatgtaactgtaaatattgctccagcccctattccttgtatagctctagctcctatcagcatgtacatagtttgcgataatccacataaaaagcttccaattaaaaatattactattccaattgaaagcatattcttccttccatatagatctgatagtttcccatatataggagtagtaatagcggaagttagtaaatatactgaaaaaactgaactaataatttcaaatccttgtaaatccttcactattgttggtatcgctgtcgttacaacagttccttccactgctcctaaaaacattgctaccattaatgctgctgcaatgcttctttttcttgaattcatctttaaatcacttccttataaatttcctttgtttattttaaggtcaactttataattatattttaacttagctatttatacaacattataattatattttaacttgatgtgctactgatttatgatatagtatataataaaatattcaataatttaagaggggtaattatatgacaaaatcgacaatgtcaatgtcttcattttttcgcaatagatttgttcgagtaattatagcttcttctatttttctacaaataggaatatgggttcgtaattttgccatattgttatttgtaatggagaagactaataacaatccaattgctgtttctttaatttcagttgcagaatttgctccaatatttatattctcatttattggtggaacctttgcagatagatggcgaccgaagcgtactatggtttggtgtgatttactaagtgctatttctgtttttgccgttctgcttacaataatctttgcaacttgggaagctgtattttttgtaacatttatttcatctattttgtctcagttctctcagccctctgcaatgaaattatttaaagtccatgttcctgaagagtttatgcaaactggaatggctattttccaaactcttatgtctatttttatgattataggaccagcattaggtactattgtttttcaaaagtttggaatagatatttctatatcagtaatgggtgtagctttcttactatcagcttcagtattaaccctattacccgctgatgagataattgaaaagacagaaactacaaatcatttcttggaagaattaaaagaaggtttcgcctatgtttggcagcaaagagagttaactatacttggatctgtttttgctgtatcaggccttgctgttggtatcatacaaccacttggggttttcttaattgttgaaagacttggtcttcctaaagaaaatcttcaattattacttatggtaaatggatcagcaatgtttattggtggcggattagttatgacaatatcaaagaaagttatgcctcaaaagcttcttgcaataggacttatagttaacacaatttcaatggttggcatgggattatcttcaagctggattataattctattgttccaattccttaatggattttttatgccttgcattcaaattggtattaacacactaattcttcaattaacgaaatctgagtttgttggaagagtaaacggagtattaaatccaatgtttatgggattcatggttattactatgtcaattacagggtggcttaaaagccaattttcccttactattctctacatctcagcaggcatactttttctaataggtgcaatgcttacttcattaatatttaatacctcaattagtagtgaaatagattcagcagaatagaaaagtgaaaaagcaccactagatgttataaattatgatatctggtggtgctttatcattcttaaaacacttctatttatttcaagaatagaaaaatcattacttttctattggatacttaggacctgttagatctagttgataaaaaactaaatccaaccatttaccaaatttatagcctgctttagttactgtgccagagtatttaaacccgaatttctcatgaattttgatactaccgtcatttaaactatcaatgcaagcaaccatagttgcgtactcatctctattagcagcatcaattaattcctttaacaatatcttccctattcctaaatttctatagtttttatgaacatatacagaatgttctattgtgtacttaaaagctggataagttctaaatgatccgtatgtagcaaatcctacagctttgtcatctttttcaaacaccaatagtggacatccatcttttttcttttcatcaaaccactgttttctttcctcaagattatgcgcagtataatcataaatcgctgttgtatttaatatagcatcattgtagatctctaaaatatctgctaaatctttttccgttgcttctcttatcatttttcatatccctttcaaaataaactaatcttcctatattttaacacctatgtgcaatatgtaaaattatttttttaatagctccattttattaatttttatagtgataaaacaatcctgaattacaaataattaaataataataaattaaactaaataaaaaaacagcataaatgaacttatttgcctatagtccatgtatgctgaactttactaatatttttaattattcatctattatcataaccaatgaaagattggctccattttcttatatgtacaaaattctttatatcccagttccttaagttcattttttacataagaaatcttgcatcctacatcatcttccttatgcgaatcagatcctattgtaataatagttcctcctaattctctgtataactttaatatttctctagaaggtgtcaaatcatctaacccatatctaaaacaagatgtattaatttcaattccttttccatgagaaattacgtgaactaagatttcttttacaatatctcttaccttttcaaaaggatattttcccatcttatcatatctattaatcatatctaaatgacctaaaacactataatcattatatttttttattacttttaatatttcctcataatatttctcattatattccttttgtgtctttcctgtttgaaaatcctgtgtccaaaatgccttattatctacctgatgacaagatagtataacaaaatcaaagtcatattcattaaaatccttttgaaattcatgaatagtatgttcttgcatcccaaattcgattccaagtttcatagtaattttatctatatatttttctctgcatctattaaattcatttatataagctatataattgcaatttatatctactttcactccataatcaacatgctctgtaaagcatatttcatcaattcctaaagatattgcctttttgatctcatcttccataggataagtggaatcatcgctaaaacttgtatgcatatgataatcagctaacataattaaatttcctcctaaaatattattacaactattattactatttcttcaatataaacttctcaattaattcagcgacaacaccttcgttattatcagcttctgttgtataatcacaagctctttttacatcttcaactgcatttcccgacgctactgatagacctgctacttttaacatagacatatcgttgtagttatcacctacagcaattgtgtctttaatatctatatctaaaatttttgctaaattaattagaccactacctttatctacccctaatgaattaaattccatatatcgatttgacgaataacttacagcacaatgcccctctgtaatacttctcatatctggctcaatacccatcaaatatggaacatttatattttgatatataatctttgcaattggttcctcttcaagcaaatccactgtattttctttcataatagtacactctaatttttgatttttaattctttctttttcactttgtgataaattataaatatataatttatcttttgtataaacatgtatacaaacatccttatttaatccatactcaaaaatttctttcatcttatcgaatcttaatcctttaaattgcagtagcttgttatccttattttctgttaaagcgccaccattaaaagaaataatatattccccagcctgatcatataagtctaaaattttcaagtcattctgaatagaagaataacctcttcctgtagctggtacaaattttactccatactctttctttgctctttttattaaatcaatatttctttgacaaattatatgattatcatttaataatgtctcatccatatcacaagctattagtttatatgccataattttgcctcctcctatattgcgcatttttatatatacttttttaaaatatttaaaacaaaatctgcttctaagactgtatatttctactactttaaaaagtcactttcagatttgattttattgtagctctccaaagaattaaataatgtatgaatcttgtgctgtgaatatatactctacttaataattttcttcataaaaaaataaactgcttgtactctttaaaagtcatctttataatagatgctcaaatccagttataatt

SEQ ID NO: 75 - DNA, 29991 bp, Clostridium beijerinckii
tttctgaggtatatggtagttttgtttttaggcaattcaattttaccataaatcagtgaggagttattttattttgctaaaaaaatatcccgcatttctgcgggttgcggcgtttcgcaaacgcctaatagaataacatatttgaaaggatgtaatttaaatgaaaaataaaagtattaagagtaaagttatgacaggagttattttagcgagtatggtgatatctgcaagtacaggagtatttgcggcagattcattaaatgtttcaaacaataagtcagcagttcaacatcaaggtagagagaatggtttccaaacaaaattagattctttagtagcagcaggatcgataacttcagatcaagaaactgctataaaagaagcattaatgccacaaggcggatttaaaaatggagaacataaggatttctttaaaactaaattatcagatttagtgacagccggaacaataacagcagatgaacagacagcaatagaaacagcacttgaaaatactaaaggaaactttaaaacagttttagataatctagtaacaaatgggacattaacttcagacaaagaaacagcaatagaaaatgcattaaagccagaagctaaaaatggaggacataaagatttctttaagactaaactatcagatttagtgacagctggaacaataacagcagatgaacagacagcaatagaaacagcacttgaaaatactaaaggaaactttaaaacagttttagataatctagtaacaaatgggacattaactttagacaaagaaacagtaatagagaatgcattaaagccagaagctaaaaatggaggacataaagatttctttaagactaaactatcagatttagtgacagctggaacaataacagcagatgatcagacagcaatagaaacagcatttaaagatgcaaaagggaatttcaaaacagttttagataatttggtaacagctggaacattgacctcagataaagaaacagcaatagagaatgtgttaaaaccacaagaaaagcaattaggagaaaaagataaatctaaaggaattgaaaaatataaagagatgataaagactaaattagatggattagtaacagcaggaacagtaacaactgatcaagaaacaactataatagaagctcttacaccttctaaataaagttgaattaatattaatatgttataatatttaacagatatcgtatacggttataaaaaataataattaaaaaagggagtatcgcaaaatggttatattttgatcataaacgatgctccttttcgttcacgacttggtttgttggaattctaaatgaaaaagtattatttaaatattgaatataaataaatagtattaaaacattgaataataatgctatttattgtataattattcatataataaataatatatggattaaataaaaaattattacgtaaatttaagttatatatagatgtccaactttaaaactagacttatgtgataaacttaccgaaatcataaatattttgattccgaaaagctatgaaaatatcgctgaaggttctaagcagcaggttgtatccactttagcgtgctccaactttcagtttgacaagccaaaatggaacaacctacagctaagaacctttaacagctcattttcaaatgttttctacacaaatatatttatgatttctagtgaagatatgagcttaaagttttagcaactttgtaaatacgtttatctgataagtctaattcttaaattgtttatctatattatagatttcccaaacaagaacttgacatatacagcaagctaaatcaaataaatttaagaattaatccaatgtataagtaaaattcttgaattgcttatctatgtagataagccaattataagttagatttatactatgaaatatatcccaactagaaatgggtaatatatttttgtggaatgttccattggtaattttgatggatgtgattctttggctataagttgttccaaatgtgctagttcaaagcttgttctttgaggctagcactttgggtgcaactttatcgccttagaatcacccatcataattacctagaaactggaacaaaagtatgctattcatttcggcgagttatatgcataagttcaggtcttagttgggttatctatatgtataaacttatttacagtatatatactaaataaaatagattttttatttataaaaatattataaatagaaggagaatgagcatggcagtaaatttaaggggaagaagttttttaaagttattagattttaaaccagaagagattagatatctgttagatttgtctaaggaattaaaaacattaaaaagaactgggattttacatgataagctgaaaggtaagaacatagtgttattatttgaaaagacatctacaagaacaagatgttcatttgaagtggctggaagagatttagggatgggggttacatacctagattcagcaggatctcaaatgggaaaaaaagaaagtatagcagatacagcaagggttcttgggagaatgtatgacggaatagagtatagaggttttagtcaggaaatagttgaagaattggctaagtatgcaggagttccagtatggaatggattaactgatgaatttcatccaactcaaatgattgcagaccttctaacaatagaagagaaacttggaagactaaaaggtgttaattttgtctatatgggagatgcaagaaataatatgggaaactctctcatggtagcttgtgcaaagatgggcttaaatttcactgcttgtgcacctaaagaattatttccatcagaagagttagtggaaaaatgtaaggagatagctcaggaagctggaggtacgataactttaacagaagatgttaataaaggaactaaaaatgcagatgtgatctatactgatgtatgggtatcaatgggtgaaccagatgaagtttgggaaagtcgactaaaattgttgagcccatatcaagtaaacaaggatgttatgaataatgcaaatgaaaacgcaatatttatgcattgtttaccggcttaccatgatttaaaaactaaagtgggaaaagatgtaggagaaaaatttggcatgactgcattggaagttacggatgaagtattcgaaggaaaacaatctgtagtatttgacgaagcagaaaatagaatgcattctataaaagcgataatgttagcaacaattggtgcataaattatccagaattaatcttaattatacaaaaattattcactaaattagagagagttttctatagtaaatctctctaattaattttaatctatttttaaataagcaagtatactcatgaaatggtaaaattttatttgaaccaaacatcttcatattctttatgtgaaacaaattcctcttctgcaaaccaacattgtggtattatctttttgttatgttgtctagcaaaatccacgacccttttaaccagttgctgaccgatattttttcctctaagttctggtgatacaaaagtatgatcaagtataatgttattttctccactatccatatatgttactacagcttttatattatcttcgtcatctccaatataaaatttatgattaccttccttaatctcaaccaaaatgattctcctttctatttccaagtaaagttcaaatttatttattaaaactattatactttaatagtttatccaaaagataaaaataatccacaaaatttaaaatattaaagatttcatcaaggaatctatatgccgactcaattaattaatagagaaactcataatatatattttaaattaaataatgagttttattatttagtaaaaaatttattaaatgtaaaactatgttaaaaaaatatcaattatataaccaaaattcaataaagagattaaagttaaatgtgtattttttacacagtaaagatagtcaattgctaattaatgtttaaatagtaacttatttaaacattaattagcaatttgaatgttaaagaattaacgtcttaaaaatgttaatttaaaaactattctttaaattaaaaatataaaggtttataataaaacaaataccagataattcattaattaataaggtattacattttatgtattatattgaatgttatgaaaacgtatatttgtgaggtgatctatttatgctatattttttaactggatgaaagttaatagaaacgtattcgtgtaataagttataagcaattttaaggagtttgataacgatgaaaacagaacaaggcctagtaattgaggtggttggaaattcggcgagaattaaagttggcagacatagtgattgcaaaaactgtggtgcttgcccgggaagcgaaagcctaatcttagaagcgaataataaaataggagcaaagccagggcaaagagtaattcttgaaataaaagaaaacaatgttctgagagcagcttttattgtatttattctgccgttaattgctttatttattggtgtgatgttaggaggttttataggtcaatatataggagttaataaatttatgttccaagtgattggtggggtagttatatttgctttatctattgttattgtaaaacatttcgataaggcaagtgctgcaaatgaaaagtccaagccagtaattattcgtattttatgatagatttatttctcgatatttaaataaaaaattgatgaactattatttattcaagtatatattactcatattgtaaatattatttacttgtattataaatattatcttacgaattattgtagttatgtaaatttaattgtaaataatttattcttaagaggtttgtgaggcgattattaatgttaaaaagttttctcggaggaattcatccgaaagacagtaaaaagtatacttctgataaagccattgagttaccaccattacctgaaacagtaactattcctatgagccaacatattggagcaccatgtacacctatagttaaagttggggatatagtaaaaaaaggacaggtcatagcaactagtgaagcatttatgcatagtccaatacattcatcaatatcaggaaaagttacaagtattgcagaaatgccacatacatcgttagtaaaatgcttatcagttgttattaaaagtgatgggttagacgaatgggtcgatggaataccattagaacgagattgggaaaatcttgagaagaaagaagttcttgatatcataaaaaatgctggaatagttggaatgggtggtgctacatttcctacacacgttaaactttctccaaacaaggaagttgatacatttatcgtaaatgctgctgaatgtgagccatacttgacagcagactatagaatgatgattgaatatgctgaccgtatagtaactggagtcaagatagttatgaaaacactaggagttagcaaaggaattataggaatagaagataataaaccagaagcagtaaaagttatgaaagaagcatttaagggtacatcagttgacattgtagctctacctacaaagtatcctcaaggtgcagaaaagatgcttataaaagtgcttacaagtcgagaagttccatcgggtggattgcctatggatgttggagttgttgtacaaaatgttggtacagttatagctatttatgatgcagtagtaaatggcattccaataattcaaagagttactactgtttcaggagatgcaattaaggaacctaaaaatctattactaagaataggaacaagttttaaagaagccataagttattgtggtggatttagcaaaacgccagaaaagctaattatgggagggcctatgatgggaatggctcaattttcattagatgttcctgtaattaaaggtgtatctggaattctagcattaagtaaagatgccataaattctggtgaggagtccccttgtataagatgtggaagatgtgttgaggcgtgtcctatgggtctaatcccaagtatgctaagcatattaggtgaacgtcataaatttaaagaggccaaagaggaatataatttgctaaattgtattgaatgtggaagttgtgtttatacatgtcctgcaaaacgtaacatagttcagtatataaaatattcaaaatcacaaaatttagcaatggcacaaaaaaagtaaaggaagaaggggtaaaatgagttccgaaattggagtacaagaaagtaaagtgcaaggaattaaagcaaaagaagctgatacacaggaaaatagttttactgtatcagcatctccacatattcgttgtgatgaatcaatctcaaagataatgtggaatgtaaacatagcattagcaccagctgctattttttctatatattattttggtatccctgcattaattaacttagttgttggtgcagcttcagcagttgcttttgaatatttggttcaaaaattccgtaaaaagaagatcacagcatttgacggaagtgcatttttaactggcttattgctagctatgtgtgtgtccccaacgttacctgtttatatgataatagcgggttcgtttgtagccatagtaatagctaagcattctatgggtgggcttggatataatatttttaatccagctcatatcggaagagcagcattaatggtatcttggccagttgcaatgacaacatggacaaagatgacaacttcagtagatgttgttagctctgctacaccattgaacatattaaaacaacaaggatattctaaattgattgaaacttttggtggcaatatagaattgtataaagctatgtttattggcacaagaaatggaagcgcaggagaaacttcgacaatacttcttataattggaggcgcgtatcttatatataagggatatataaaatggcaagttcctgtatgcatgataggaacagtaggaataataacctggattttcggaccttcaggtttatttagtggtgatcctattttccatatgatggctggaggattaattataggtgcattttttatggcaacagatatggttacagcacctataactttaaaagggcaaataatttttgcagtgggagctggactaataacatcattaattagattaataggtggttatccagaaggcgtttgctattcgcttttacttatgaatgctgtaacaccactaatagatcgttttgtaaagccaaaacaatttggagcaagggggtagtaaaatgtccaatgaacatgctattaataaggagtattctatttttcagatagcgataaatttaataataacttgcttggcatctggtttaataataggactagtatattatgttacggcaccaattgcatctgaaaagagagaaatatcaaaacaagaatctatgagagcattagttagtgatgccgataatttcaaggctgttccagataagactgattggtttacagccgaaaaaggcggtaaagtaattgcatatgtagttccaggagaaagcagaggatatggtggagaaattaaaatgcttgtagctattacaccagcaggagaagtaatagattataagatactagcacataatgaaactccaggtctaggagataatgcttcaaaagaaccttttagaagtcaatttaaaggaaaaaaagaagcaaatttaacagttacaaaagatgcttctgataaagatgatattcaagctatgacaggcgcaactatttcatctagagctgtaacattagctgtcaaaaatgctgtgcatgaagtaacagagtttgcaggaggtaaataatatgaaggaaaagtggaaaatttttagcaagggtttgtacgatgaaaatccaatatttatgttatgcttaagtctttgtcctgcattagctgttacatcatcagtgataaatggttttactatgggcttatgtgtaactttcgttattacaagcaataacgtagttgtatcgcttacaagaaaatttgtaaacccaaaggttagagtaccagtttatattacatttatagctactatagttaccgttgtagaacttgcattgcaggcaatatcacctgaattatatagtgctcttggtatttatttagacttagtagttgtttttgctataatacttgcaagagcagaggtattcgcatcaaaaaataaagtgtttccatcattcttagatggatttggaatgggatgtggttttacattagctatgctttcaatatctgtaataagagagcttttaggaagtggatcaattcttggggttaaaatactaggctcatggtacaacgcgcctttaattatgatactaccagctggtgcatttatactaataggttacatgataggagcaataaagctccacaatgcacataaagaagctaaaaaaatagaaggaagtgaagcataatgagagagtattttacattgtttataggtgcgttacttgtaaataattttgttttaacaaaatttgttggactttgtatattttttggagtttctaaaagtttagatgcatcaataggcatgggaatggcagttacctctgttataactctaagttcaatgttagcatgggttgtatatagttttgtacttttgccatatcatttgacattcttaacaactattgttttcgtaatacttatagcaagttttgtgcaattattagaattaattataaagaaacaagcacctacattatacagcatgtggggaatatatcttcttttaatagcaacaaactgtattgtattatcagttccattattaagtgttgagtcaaactactcgtttgtaaaaagtgtagtgttctcaattggatcaggaatgggatttgcactggccttagtacttatggcaagtttaagagaaaagctggtttatgcagatgtgccaaaaccactagaaggaacaggagttgcttttatattagcaggtatgttggcattggcattcttgggattttcaggaatgatataaaggagatgagtaaagattatgtttactgttataatggttttagtggttcttggaggaataggtgcggtttttggttttatcttagcatttgcaaatagaaaatttgctatggaggtgaatccactaattcatgaagtagaagatattcttcctaaaggacaatgtggtgcatgcggctatgcgggatgtgcagcatatgcagaagcagtagttatgaaagatgatgttcctcctaatttatgcgttccaggaaaggatgctgtagcaaaacttgtagcagaaattacaggtaaaaaagcagaagaagtggaaccaagaatagctcatgttagatgcaaaggaacaagtgaaaaagcagcattaagttataaatacaaaggagttcatgattgtaaggcagcaagcctaatacaaggaggaccaaaaggatgtaagcatggatgtattggatttgggacttgcgtaagcagttgtccttttggagccatgacaatgggagaaaatggacttccagttgttaatagaaaaaaatgtactggttgtggtaagtgtgaagaatcatgtcctaaaaatgtgattcaaatgatctcaataaatgctagagtaaaagttgattgtaattcaaaagataagggagctattgctagaaagttatgtagtgctgcttgtataggctgtggactttgtgcaaagaattgcagctatggagctattcaagttcaaaataatctcgcagtggtggatcagaaaatatgtgctgaaaaatgcagtgaagcaacatgtttggcaaaatgtccaacaggagcaataaaagttgcgaatgaattaattgctaataaaaattcagacacagtaaaagttacaatttaaaatttacagtattttatattaaattatggtttaatataaaatatttattaaatgtatagccagtagagatgaaaaaatgtgcatttctactggctatacattttgtaattagtggggcattgtagtaaacgtatgagagaatttttattattaatagtgataaaactcattgactaatatttaaatcattaaagaaaggaagcttggacatatgtttgactataaaattggaagttataccaataaaaatacctgtaccaattccggctatagataaaattggtaaataaagtgtaactgcaatattttgaactataattgcggctacaattaattgtcctacgttgtggaaaaatgcaccagcagcacttacacctattatactaactttatctttccaaatattttttacgaaaagcattatataaaaactaagcaacgctccaacagcaccatacataagtgtagagagatttccaccaaacatagttgaaagaagaagccttaatattataattaaaaaaacatcttttttattattcaatatgtataatgctatgacagtaattaaattagttaacccaagttttgcaccaggtgcaataaatggaacaggaatcatactttcaattgtatacaaagccaaagcttgtgatactagaatacctataaatactatacgaaaagttttattcatttaaacacctcaaactgtttgccattatatcactgctttttatttcaatcataagtttatgtggaagacaaactataatttggcctggttctgatataaatccagatctaacgcatattttatccttgcaatcggcatctattactttaatagatttatctttgacgtctattatattatcaccgtatgaagttttaatatctatttggtcctcacctctatgctcagataggttgattttcttataaaatttaccgtctatagttatctcagcatatgttccattgtaatgtttgcccattattaccccaaaaacaagttcaggaataagtgatatacatagtagaataactattataattatatcccattttttaaacatattatttccttctttaatctataaatttattatacatttttgacaaaaattttaaaatatattatggttaatattgtatattaagttaatttttaaatcaagaaataattatataagttttaaacagtataacgtatcctagtattagaaatactcacaaagcttgtaatttactaattactgctataaaataataaacaagattgtgaacacgtgtgtaattattgagcgtaaaagaaattatttataacctctagctatatttgcgtactaaaaattaaatctttgctagagataaaagcgctttatttattaaaaatttggaggactaatatggctactacgattaaagatatagcgaaagcactaggaatatcacattcaactgtttcaagagtactgactggatctaaatctgtaaatgaaaagaccaaagaggctgtacttaatgcagttaaagagctaaactatattcctaatatgaatgcgaggagtttaaagatagataaagcttataatattggtgtatttttttcaactataagtaatggaacctcaccatttgtatttcaaactgttataaataatgtgtacaagaatatagacaaaaagtataatgtcattgttaaaggaatagatatgtatgaaaaaaatactataaatcctaaaaattatgatggaatactagtagtaagtcaaaaaatagatgatgatgattttattagagaaatattagagaaagagatacctattgtagtcataaatagaaaggtaaatcatgatgttataaatgtatatacagatgagagtgttggggtgtataagggagtagaggaattaataaaaaatggtcataaggatattgcaataatagaaggagcaatcaatttcgattcaactaaaatgaggcgagagggatacttaaaagctttcaataactataatattaaattggacaaaaatctggtgctaaatgggaactttactgtcaaaagtggatatgaaaaagctaatgaattaatagaaatgaatgaaaagttttcagccatatttgcttttaatgatgaaatggcaactggggcaataaaagctattacagagcatggattaagggttccagaagatatttcaatactaggatttgatgggaatgaaattggcagatttattactccaagtattacaacaattaaaaggcctataggagaaatagcaagaattgccactgacttgcttttaagattgctaaataatgaacaagatataacaactaagaaaatatatatagaatcagaattggaactaggcaattcaattaaagatttaaattagaataaattatataaagctatagtgaagcaaaagttttcctcactatagctttaaaatttaattcaaaatgagaacaaaaaactattgcaaatatttacataagcgtatatacttgtattaagaaaaagggaacacgtgtgcaaaggaaattacataatattaaggttaggaattttagtaaaaccttcttgataaaatgtatatataaactttgaatatttttttactcaattgggaacacgtgtgcctggaaattgtaaggagagattattatgcaaatggaaattagatactcaaatcatccagaagactctaagcactatgatacagaaactttaagaagacattatttagttgaaaaagtatttgtagatggagaagtaaatttagtttatagccataatgatagaatcatatttggtggagttacacctataaaagaaacattaaagcttggagcatctaaagaattaggaacagattactttttagaaagaagagaacttggagttattaatgtaggtggagaaggaacaattatagctgatggagtagaatataatctaaattatagagatggattatatgttggacaaggcactaaaaatatagaatttaaatcatctgatggaaaaaatccagctaagttttatataaattctgcaccagcgcttaaatcatatccaacagtaaaaatagatttagaaaaagctaataagataaaatgtggcgatgaaataaacatgaataaaagaacaataaaccaatatattcatcctgcagtatgtgaaagctgtcaattagtaatgggattaacaatacttgagccaggaagtggatggaatacaatgccatgtcatactcatgaaagacgtatggaagtatatttatatcttgatgtacctgaagatcaagcagtaattcattttatgggtgaaggacaagaaacaaggcatatagtaatgaagaatgagcaggcagtaatttcaccaagctggtcaattcattcgggcattggaactcagaattattcatttatatggggaatgtgtggcgagaatataacattcgatgatatggataacataagaatccaagacttaaaataatataattaatattgaaataaagaagttaagagcagtttaagtgaaatttctgcataaaagatgttaaataaatttattcaaaagctgtaggcatagatttggtctgcagcctttttattctttagaaatttatttccagtaaaatcagtggacgaggcactccttgagggtataacttaaaaaaggttgattggatagttttggcattttaaaaagaataaaaaaaaatcatattcacttagttaagacaaaatatagaaattcgatttcaacatatagatttcaattaagagaactataatttatcagcatgaagataggtagctaaagaattgaaattattaagtataaatggtaaaatatatattaatatcattatctagcattgatttttatattagtgaaaaaggtcctaaattagaaaatatacaaattaaataatcaaggagcattgctatgaagcttacttttagattaaaactattcttttattttgtaggaattatattgtctatatctattccaattgcactaataacttataattatatgtataaatcccttaaagagcatctattttcaagcgctaaagcccaaatggtgcaggttgataacaacttttctaacatgttagggcaaataaagtacaatgctaagtttcttgcaacttattcagatgcaaaaaaagcagaccaatctatttcagctctatttaatattcctgatattgcgataaataaaaaatattcaaaacaaatacctggaatagagagtactatatataatgtgcttgaggcttatggaacatctcatccagaaacaacttatgtgtacattggtactaaatggggagggtatattcaatggcctgatggattaagtactaatacatttgatccaaggacaagaccatggtattctttggcattatcaaatccagatgaagtggtaatttcagatccatacgtttcggcagttgataattccaaaaatgtaattataagtgcgtcaacaacagtaaaaaatgaagatggaagtattgttggagttatgggtatagatttaagtttggaaaagttatctgaaataataagaaatattaggattggagatacaggttatgtttttctttatttaaaagatggaactatgttagctcacccaaatatagatttaaactttaaaaatatcttacatttaaatcagttaggttatacatattctcaaacagatgaagcttcaaaattttcatttgataactatgataaatttatagatttggataatggaagttttgaaacttatataaatggagatcctgttttagttaatgtttatacatgtaaggatactggttggaagatggcttcagttataccaaaaagtgaattggaaagcaaagctagcaagatgggatatttaataattatgataacagtgggcgttttatttcttgctattttcgttacactcattgttactaagaaggtaacaaaaccgattacagaattagttcctttaatgcaagcggctggaaatggggatttatcagtaaaagctagtattaattcaaatgacgagtttggagagttaggaagatctttcaacctgatgattggtaagttacgttcaagctatgaggaattatcatcagtttatgaggaattgctggcgacagaagaagaattaagagtacaatataacgaattacaacaaaatgaggaagcacttagagtgagtgaagaaaaatacaaactcgcactagaatgtgcaaatgactcgatttgggaatggaatttagttacagatacattctttgcttctgataaattaattgatattactggatacaagttggatgagataaataatttgagaaactttgtgtatgagaatgttcattcagatgatcttgataaagtgaaaaaagatttcaaaaatcatattaatcagcttacagatgtttatagctctgaatttagaataagaactaagagcagttcgtacgtttggattctctcttgtggtaaagcgttaagagattctgaaggaaaagttataaaaataactggttctattagagatatttctgaaagaaagatttcagaggatagaataaaattcatggcattttatgattctttaacaaaacttcctaataggacattgtttatgaataggctaaatgaacaactacaattatctaattacgccaataaacaaggaattgtattttttatagatttagataattttaagaatataaatgatactatgggacacgagtatggagataaattgctaataagtttagcaaaacagtttgaaaatttaattgaagaaaaagatacaatatctagacttggtggagatgaatttatattacttcatcctgattcaaaagaagatgagatacaagcttatgcaaaaaggctattaggtttgttcgataaagtatttaaaattgacaacaagcatatgtatataactgccagtgttggaatagctttatatcctaaagatggaaaggatagtagtacaattttaagaaatgcagatgctgctatgtacagggcaaaggaattaggtaaaaatagattttctctttttgatccacaaatgtatataagccttgaacgaaagactagtatagaaagaatattaaggacagcagttgataataatgaactaatcattaactatcaacctcagtatgatttacaggcaaataaaatctttggttttgaagcattacttagattaaatagtagggaacttggttttatatctcctgcagagtttattccaatagcagaggaatctggatatatcacacaattaactttatgggtgcttaaggaatcttgcagacaaagtgctaagtggtttgaagcaggctataaatttaatagcataagcgttaacatctcatcagttgatttacaagagacaaatttcttagataatgttaaagaaattattgaaagttcatctgttaatccgaatatgattgaacttgagattactgaaactgttcttatgaaatcatttgattctagtattggaatattaaagaaattaatggacatgggaattagaattgcgcttgatgactttggcacgggatattcatcattaagctatcttagaagaattcctataaatacattaaagattgataaatcatttatagacaatatttctttaaataagaaagaagaagcgattataaaaaatattattcaaatggcacatagtatggaattaaaagttattgctgaaggagttgaggttgaagatcagcttttaatacttaaaagaatgaaatgtgattatattcaagggtattattttagcaaacctcttcttgctaatcaacttgaagagttactggaaaaatagaaagttgaataagtatgcttagatttaaggtgtgaagatataaggttcgcatataagaataagattactataaatgaattagtattattcctttgtcacataatattgatatgtatacagaaataaatatttcaaaagagaacagggaggaaacaaatgagtcaaaagtatgtaaaaaaatccaatgaagaattaaagatgagtctgacagatgaacaatatagaattacacaagaaaatggtacagaagctccattttctaatgaatatgataatcagtttgaaaaggggatttatgtagatataactacgggtgagccattgtttgtatcaaccgataaattcaactctgggtgtggctggcctgcattttccaagccaatagatagaaaggcaataaaagaaaaaatagataaaagtcatggcatggtaagaacggaggttcgaagcagtactggtgatgcacatctaggacatgtatttactgatggacccgaagatatgggaggtttaagatactgtataaactcagcagcacttaagtttatccccaaagacaagatgaaggaagaaggttatgaagaatatttagataagatactataatagtagtattatcatcatgatattaattataagtacctttaagagaataaataaagctaatattttttaacggcggtaatatatcgccgttaaaatttaatcaaaaattgaattatatttctatcttttctgaatcttctaatataatcaaatcttctgggtaaggattaaaataagtttgttccaaaaggtaatcaatattaaatctaactacatacgatttaactaaaagcataggagacattattgtaagttttttcatcttgtatttttctaaggaatccagtaataattgagtttcttcattagttatgtattttgaaaaatatcccatggcatgcattagaacatttatattatttgtatacttaggaagtttttcaaatgccaaattcaaattcttctcatattcagccataatactttttatatcattattttcaccatttgctgtaattctacctaagattttagtatacttttgactatttgccatgagtagtaatttatttctgcgttgaaaaagtattaattcattaagtgaattagatttcttgacttttctaaaatctgcattaataaaaattcttgtaagaaaattatctcgaattctataattatgtaatctgccttcatcttctattgctgcataaggaaatttctctttaatcttatttccaaatattccggcacctcttgtacttcctgtaaccttagctgtgccattataaatttttacatttttatgtccacaggagggtgaagcgctttttaagagaaaaccgtctatattatttaaatctttcaaatatgattctgaaaactcaaccatttcttttgtgaattcttttccttcttttggctcatataattttaattcattattttcagagacaactctaattgttggtcgtggaactttaagtcctatggaagtttctggacaaacatttataatattaacaaaaggtttcaatttttcaacaaatgcatcagttatcatttgtccattgtaacgacaggcttcgaaacctaaacatttactaaaaaagacatttggtttaaataaatcacccatgaaaacactccttttttcattttacttataatattatcattttataagtaagtaattcattaaaaatgtcaataatagagaaatcatcgatttatcattattgacagtattagattttaagggtaggataaaaatgaaatatttctggaaacgactttaaatatttccagaaggaataacttttaaatatataattaatatttacatagaaaggattttttatatgactaaaatagatattatttcagggtttcttggggcaggaaagactactttgattaaaaaattaatagaagaagcatttcagggtgaaaagctcatgataattgaaaatgaatttggcgagataggaattgatggaggatttttaaataattcaggaattgaaataacagaaatgaattcgggatgtatttgttgttctttagttggagattttggagttgcacttaaagaagcattagataaatattcgccagaacgtataataatagaaccatcgggagttggtaaattatcagatgtaattaaggcaatagaaaatataaaaagcgaagtagatattaaacttaatagttttacggcagttgttgatgctgtaaaatgcaaaatgtatatggataactttggagaattctttaataatcaaattgaaaatgcaaatactattgtcttaagccgaactcaaaagatttcagaagaaaaattagaagtatgtgtatcccaaataagagaacacaacagttttgcaacaataataacaacaaactgggatgagattaatggaaagcaaattctatctgcaatggaaagggaagagtcccttgaaaaagagcttttagtagaagtaaagaataataagtctgaaaatcatcaacacagcgaagagtgctgttgcaataatcataagaaccatactaaggaagaatgtgaatgtgataatcatgaacatcatatagattgtaattgtaatgatcataaccatgctcatcatactcatgatcatgagtgtggatgtggacacgatcatcattcacatgatcatcatcatgcagatgaagtatttacgagctggggaatggaaacaccaaaaaagttttcaaaagtagaaataaataatatattaaaaactttatcggaatcttctgattatggaattatattgcgtgctaaaggtataatcccttgctcagatggaggatggataaactttgatttagttccaggcgagtatgaagtacgtgaaggaatagcagattatacaggaaggttatgcgttataggtacaaatttaaataagaatgaaatagaagaattatttgatgtatagatacaagctaaatatttcgatttatataaaaattgttattaaggaagaggagtgaacattactgataatatagataaccaaacttagacctgaacttatgcatataactccccgaaatgaataacatacttttgttccagtttccaggtaattctgatgggtgattctaaggctataaagttgcacccaaagtgctagcctcaaagaacaagcgctcacagagaaagttcgaagaacgaaatataaaatttcgattctcactttttgaactagcacatttggaacaacttatagccaaagaatcacatccatcaaaattaccaatgaaacattccacaaaagtatattacccatttctagttgggatatatttcataatctaagtatagtttatgagtgtgttatctataataaaacttctctctttaatgaattcaaataattaaaattcatttgagtttatttagtgatattatcacatttttttgacctatatctgaagaaggactttcatctatttcgatttcagggatatttagagaatttttctcacctaaggccttgattatccataagattcttttttgatagtcctgtagtaatttcctattcatggacattacctcttttcatagaatttaatatgtagtaggttacactaatataaataaaatatacattaaatgaaattttaagataaagtatttataattatgaggaaggaaatttagaattagcaatagaaattcataagaaaaaacaatttaagttctgaaatattaaaaaacttaaattatgaatgtaaatttatagatagaattatgttacatttaattagaaaaataagtgaaagaaggaattgatttatgactgatgtaccagtttttcttattactggttttttagagagtggtaagactacttttataaaagaaatatttaatgatccagagttttatgatggggaaaaaattcttttaattgtttgcgagaatggtgtagaagaatatgaagttgaatttttgaaaaaacacaatgcaaatattgttagcatcagcaatatagaagaatttacagagttagctttaaaggaattcaatcagaaatacaaaccaaccaaggttgttttagaatacaatgggatgtggcaatttgacatttttgataatatgaagtttcctgatagatgggagattgctcaaattataacaactattgatgcatcaacatttgaaagttatatgagtaatatgaagtctttattaatagagcaatttaaaaattcagatttgattatatttaaccgttgcaacgataaaacaaataaattgaaatttagaaatagtgtaaaagctattaattcaagagctaatatgatgtttgaattagaaaatggcgagattgatgatagtcccttagaattaccatttgatatacataagaaagtaatagaatttaaagactacgattatggggtttggtacttagatgcaacagaatatccagaaaagtatgatggtaaaaatataaaggtaaaaggtcttgcttatagcaaccctaagtatcctaaaggtgtttttgcatttggcagaaatgcaatgacttgctgtgaagatgatatatcatttttaggtatcctgtgtcaaacgagtaaggcatttaattttaaagataaggaatggatcgagttagaaggtataattcataaaaaatatatacagcaagaacaaagggagattccatatatagtggttcaagattataaaaaaatagataagcttgaggaagaattagtttatttttaatagattagccatgtatataaacttaatatataaaagcaggtacattggagattttcttaatatacctgctttttctgtttgttaaatttataaatttgttgaaagtttttaattaatactggtgtctttttcgataaactttgcaactccatcatcatcgaagcttgagatgacacttgttgcaaccgcctttgcttcagaaactccgttttcaggaacatacgaacgatctgcagattgtaacatttcaatgtcattaaaattatccccaaaagcgattacttcatttgcgccaatcagttcctttaattcttttatagcaatggccttagatgctttagaactaaatatatctaaaaagtaattatctttatatacatttttgttaggaacacattttaatatagagttatctaaaatgcaattttcaacattttttatacgatcaaaagaaccatacaaaacaaaatataaaattgtatacccatcctttggaacttgttcaaaatcatcgtattgatgacaacgacctttgtataataaatgcctttctgcaaaatactcaagatcagatgggtcatcaagattgttgtatatgaagtggatatctccatctttcaatgcatacataaatccatagcttttatactcatcaaatatttttattagatgatttaactgagatattggaaattcattaatttttagatattgctctttatttaaatcataaaatcctataccgttatttaatatgataggaatgttaattggaatttcacttatcaatctttttgcagcctgaaggtttcgtgcagttgcaatactaaacaatgtacctttttctatttgtttctttaagatttttagtgatgtttctgaaacttctccattagaatttaataaggtaccatctaaatctgttacatataatattcttttattcatttattgcacccctttatataagatagaagatttctgtaaaataagtattaagagaatttatattacagtaatttatatattgtgagtttagcataagaaagctgtcaattcaaggaaaataaggatatataaatccattaaagttcatgagtgctgacattcatgaaaaaattgacaaatggctattttaaaatataatttattatagtatgtaattaaaaaatagttagaagcgaaaggacattttatgtatcaagaagaaagattatatgaaatattaaatatacttagagaaaaaactgtgttatctaataaagaaataatggaaacatttaatatatcaagggatactgctagaagagacattgttagattagtagaagaaggagttgctattcgaactcatggaggaattgcagtgccatctataagaactgaaattaaggattataagagccgtctatctataaattcagaagaaaaaataaaattgggtaaatatgcagctaaatatgtttcaacaaatcaagtatgtttctttgatgtgtctaccactattgaagcgttatgtcagtgtgttgaggatgatatctctatatatacgcattctttagacaatatggaaatacttgctgaaaaaaattgtgacgttcatttattgggtggaaaattgcaacgcaaaaatcgttttttatatggcagtggcacaataaatcaaatcgaagatatacattttgatatagcatttttgggggctgcagcaattagtgaagatggaatttatgtagttgattttgaggattcatatataaagagaaaggtagcagaaagaagtacttttgtatgtgttatagctgatagtgaaaagttcttcaattccagcacgtttaaagccatttcctttgatagaatagatttattaataactacaaaagagccgcctgagaatatagaaaaaagaatgaaagactcaggaactgttattgaaatagtgtgattttataaaaaatgagaataaattatttacgcaatttattctcatttaacttaattaaattttattttgctgctttattagtccttttctgtaagcattaagaagcatctttaagtcatctatttgctgcttgagagttacacctacatcagtatcttcaactcttttcctatttacaacttgctctagtaagagagttgtagataatatgtcagtttcttcttttatggctgcttcagtggattcaaatggctgatgagatactaactgaagcccaaaagagttatatattaacgtatatccagctagtccagttttgggctgatatgcttttgaaaaacctccatctataactagtagagttccgtttgcttttataggactttctccatttttttcttcaacgggcatgtggccatttattatatgagattctggtgaactaagcccaaattcctttagtatttttttgcagatatcctcattatctcttaagctaaaatagggatctttcttttcataatgagtttctttttcttcgataaaatattgttcaaatattgtcattctatccttaccaaataatggcgaagaagcaccacaccacaaataccacattatatcttctttattatcagaatcatccttgtctttagaaaaataggcctctcttgctagcatatccaatttgtctaaaagttctttaccgttatattctttatcagctattttgacgtttttaaagcttccatcttcatttaatggtatgaatccatgatatagtaaattggaattaaattttaaatataaacttccatttgaatataggaatcgaacatgcttattatacttatcgctattaataaaagaagtttttaacttatcgattaattctttctcatcataagtaagttcatatggatttttagggtctatagtaggaaaaaatgaatctttcaatttatgcgttttaccgtttaagttaatagttccttcagcataattaattttatttaataaaagcctatgattcatattaaattcaggatgccttaaaatcacctgaccttcaagtttaaataatattatagctatagctttgtgcatttgagctattaaattaatttcattaatgctgtattttttatcacaatccatcttaggtaagaagatattacagggatgatccttataaaaatccatagaaaaagttgctagagggagaaggttaattccgtatccattttctaaagtatccaagttagcatactttagagaattttttataacattagcaatgcatacgtctgaaccacaggcagcacccatccataagatatcatgatttccccattggatgtcaacagaatgatattcaactaaagtatccataataatatcggcacctgggcctctatcgaatatatcccctaaaatatgaagcctgtctataacaagtctttgtatcaatttagaaagagcaactataaattcctttgatctatctgtgtctataatagttctaataatttgttcataatattcatatttatctattcctttaggctgttcatgtaagagttcttctattatgtaagtaaaatcttttggaagagcctttcttacttttgaacgtgtatatttagaagagacatatctgcatatttcgattaatctatataaatttattttgtaccaatcatctatgttttcttcttgcttcaatactatctctaatttttgttcaggataatatataagggttgctaaactttttttctcactttgcatcaaactatttccaaaaagatcttcaatttttctttttattactcctgatgcgttttttaatacatgaataaaaggctcatattctccgtggatatcagttagaaaatgttcagttccttttggtaaatttaaaattgcctgcagatttattatttcagtagaagcttcgttgattgtcggatattgtttagaaagcaactctaaatatcgtaagttgtcagatatttcattagttgatagatcgtattttttcattattacatctcctttgttgctattaagataatatcttctataactaattaaattatagaagaaggtttgataataaacaataatattaataaaataagagcttaaagtgaatcaagctcttatcatcctataaattcatattttacttataccaacaagaatcataacagatctaggttctatttcaagtgtctctccaacttggagcatctcattaattgaatcgctaatgtcttctccagaaggcatggatgtatttacagcaattcgccattctaagtatatagggagttcgggtaatcttacatattgagtttcccaatgagcattgatacaaaggtacacaatgtcatcttctttttcttttttattccatcctgcaaacattatcccaacagttctagtactatctgacgaatctaaataccaaggttctataccgtgcttactaacaggaggtaagccacatcgggattcttcaattctgtccttaatagcaggatgacgttttcgaaaatttatcatatttttaaagaaagtaaataaatcatgattcttatataggagactccagttcagccatgaaatttcattatcctggcaatatggattgttatttccaaactgtgtatttccaaattcatctccagataaaagcattggagctccttgacttgaaagaagaacagcacaagcattttttattagctttcttctcaactttattatattttcatcgtcagtttcaccttcagcaccacaattccagctattattgttgttctcaccatctgtattattccaaccattttcttcattgtgtttatcattataagaatataagtcatataaagtaaatccatcatggcaagtaataaagtttactgaagcatttttgcctcttatatctggattatagagatcgtaagatccggttattctttcagcaacagtggcagctaatcctgaatcgccctttagaaatctgcgaatatcatctctatattttccattccattcacaccatcttttccaagatgggaaactgccgacttgatataatccacctgcatcccatgcttcagctatcaattttgtatttgcaagaataggatcaaaggctaggctttgcaatagtggaggattattcattggtgatccatcttcgtttcgaccaaggattgaagctaaatcaaatctgaatccgtcaacacgatattctgtaacccagtagcgaaggcaatctaaaatcattctatgaacaattgggtgattgcaatttaaagtatttccacatccgctgaaattataatatttcccatctggtgtaagcatgtaataaacattattatcaaaccccttaaaagatatatatggaccatactcattgccttcagcagtatggttaaaaacaacgtctaaaataacctctattccatcttcatgaaatttctttatcaatgattttagttcatcgccttctttatttcgttcaattccagcagtataactggtgtttggagcaaagaaacatacaggattatatccccaataatcacaaagcaaattacctctaacatatcgtgcatcaagcatttcatcaaattcaaaaattggcataagttctacagcattgattccaagctcttttaaataaggtatcttttcggctaatccagcaaatgttccaggataattaacttttgacgacggatgcttagtaaagcctcttacatgcaactcgtaaataatcaaatctttcataggaattaaaggtcttttactgtttccccaatcaaaatcattggagacaactcttgatttatattgatttccacatattgtttttgttccccatacgctttgtccagcaattgcttttgagtagggatcaagtaaatatttactactattaaaaactaatcctctttcaggtatatatggaccgtccacactatatgcatattcaaattcttcaatatctaatccaagtactatcatagagtatacattacctattcgataatattcaggaaaaggaatgacagcataaggttcgcacatagctggcttaaataagagtagtttacatgatgttgcgttctgagagtggatagtgaagttaacacctccaggtataactactgcaccattttctagataaaatccaggacgaattttaaatccctcaaattcgtcggtgggaattaaatttttctgaagcgtttttacaaattcatcgaaatttacagtattttttaaagtatttatatctagttctatattctcattatttgaaaatttagaagtatccacaatatattttcctccttaatattattaggaccctcttagttttattatattaggacgcatatgcttttaatcgataaatgaaataattatttaattatcacttaaattattgtatcaaaattctaatttatatgtttttaactaatgtaagttagaaatataggattaagatatttaagttgtggtataattttcatataagctattaattacacaaaattggctatataaaaaataatctccgatgaaggtaatatactatagataataaagaaaatatggaatgttttatataaaacaaatggagaagctatatacactataagatttgggaatgaggggaaatagatgactaaaaaaataatttacagtttacttattgtagcggcggtagtttctgtaataccaaaagaagtttcagcagaatggaagcataataatactggttggtggtatgaggaaggaaaatcttatagtactggctggaaacaaataaatggcttatggtactattttggtaatgatggttatatgaagacaggatggattttagataaggtttggtggtattatttacaggataatggtgctatggcatctggtaaaacatcaattaaaggtaaggagtatgagcttgataataatgggaaatggataaataatgctcttcctaatagaaatgttaatatgaatattagcaggcctccttcagaggaaaaaatgagtacaacctcagattttagcttgtttgaggaaaatggaaatacgtattttaaaattcaagatagctattatttaaaaggtgtatggaatatagatgggaatatatatatttttgatgaaaatggtgtgttgcaaaaagacgaatatacgtcggaaagtggtagaaaatatagattgggggatgatggcaaggttatagaatgtcttagtgacaaaaattataatttatgtccagaatatgcactgactactaaatcaactacagagaactaccaagttaaattagatgatagtaatatgcttactataactgatgtcaattcagatgaaccagaaaaggatggagtaagaattgaggatggagcaggttacaaattagacaatactaaaccaagggcaactattaatggaaatactttatattgtagaactaatcaagctatagatttaggaatgataaaagtaagtagcgtagatgataaaagttcatcatttcctaatttaatagcaatgtctaagagtgaagatgatagtgttgcggtttcaggaataaatttaagtttggaggatggattttttaaagacattcatccaacagttattgcatacaaagcaggaaaaactactattacaataaatgttaatggaattaagacttcgtttgatgtagtagtaacggaataattttttgcactaatatgagtaatgttaatatttttataattgttaagtttagtgtatatatgatattgaattaaaatataaactcaaatgaaagaattgaggaatttatataagcagcaatacaaacttaaatgaaaaagaatatagatatgctattttgactagttacataattgtagtaactagtcatttatggttttgaaaaggagattacttgtcaatcaaatttttttcgtattcctctatcatttttttgtcatcaatcctccaattggtccacctacacgaccatttaacattgatgatttatttcctttataattatcattaagttctatgccaagttcattttcaaattctatttttagcttatctagttttgctctagtttgggaactaaaggccttctgctcataatttaacacctccatatcagtattagttttataaatttatagtaaaatatatttgataaattattgaatttaaatgaatggaacttgtgaagaatttagataattgcgaaactcattgataaaaatgaataatgattgatttgaagttgcaaaaacattattaatggatttaatggttcctgctatacaaatataatagttgacttcttaaaaaagggcgcac

SEQ ID NO: 76 - DNA, 29943 bp, Clostridium beijerinckii
catagcataagctagtaagaccccttgaagactacaaggttgataggtcagaggtgtaagtatggtaacatatttagctgactgatactaataggtcgagggcttgaccaatatagtcaagttgtaatatacattaaatagagaggaagctcgactcactagcgttcgctgagtaagttcgagaaaccaaatatgaaatttggactctcacttatgtgcaattttgaaagaacaaagttttttcaaaaaggaataattacagtaatagattaatgtaaatgtggtataagcgtaaactaagagtcttttttcaaaggaaactcgactcacattcgttcgctgagtgctaatttacacgaaatcgaagatttctgtaaattatgcatctcgtgatgatggcatagaggtaacactccttcccattccgaacaggaaagttaaggtctatagcgccgatagtactgcatgggagactgtgtggcagagtaggacgttgcgaggtaagcaaaaaagatagttgtaataactatctttttttatttattatcatacaatattttaaataattaaattattgtatagaacattttaattgttctatatgtcctgtaactttaactttcctataaatctttgatataatcccattttcatctattacgaatgtacttctttcaatacctatggatttcttcccaaacatatttttttcctttaatacgccgtagagattacatacctcctctttttcatctgaaagaagaatgaagggcaattcatattttgcaataaatttatcatgagacgctagagaatctctgcttatacctaaaataacagcatttttcatttcaaaatcatccaaaccatttttaaaatcttgtgcttcttgtgagcagccaggagtattatctttagggtaaaagtacaagatgacttttttatttaaataatcacttaatttatgttcttttttatcagatcctactaatgtgaaatcaggagctttcattccttcttctaaagttaaactttccatctttattacctccatgtcgtttataataattattatctatcaagattaaatatttgtaaagtagaaaagaaacattgcgactgggtttatttagaatatatgactgtgaattctagataaaataactaattaataaaaaatacatacaaaatttaaaatactgttgacatatatagcaataaaatgtatactttatatcatagtaaacaactaagaataatataatataataatttttatcaagaaaggcggagggactggccctatgatgcctagcaacctgaattaaaaatctattttaatttaaggtgctaattcctgcagatactttatctgaaagataagaatgtacatatttttttgctactttcttatctagaaagtagctcttttattatctaaatgtctaattatttgtatatttctctagggtcgtgataaaaatcaaattcaaagctaaatataatatctagaaaattagggtaacgtacaaatcatagtaaatatattagaaataaaaattatataaaatgggggcaacaaattatgagtaatcaagaaagaaaattaaaatttgaaacacttcaacttcatgtagggcaagaacaacctgattcagcaacagattctagagcagtaccaatttaccaaacaacttcatatgtatttaaaaattctgcacatgcagcagcaagatttggattagctgatgctggaaatatatatggtcgtttaacaaattcaacacaagatgtttttgaaaaacgtgttgcagctttggaaggcggagtagcagctcttgcggtagcatctggagcagcagcaataacatatgcattgcaaaatataactaaagctggtgatcacatagttgcagaaaaaactatatatggaggatcttataatttgttagcacatacgtttcctacaaacggtgttacaacaacatttgtagatccatctgacctatcaaattttgaaaatgcaattcaagataatactaaagcaattttaattgaatcacttggaaatccgaactcaaatattttagatgttaaagcattagcagaaattgcacataagcataaaataccactaatagtggacaatacatttggaacaccatacttatttagaccgattgaacatggggcagatatagttgttcattcggcaactaaatttattggtggacatggtacatcactaggtggagttattgtggactcaggaaagtttgactggataggttcaggaaagttcccacaattatcagaagcagatccaagctatcatggaattaagttcgcagaagcagttggggctgccgcatatgtgacaagaattcgtgctattttattaagagatacgggtgcatgcataagtccatttaatgcatttatattattacaaggtttagaaactctttcacttagagttgaacgtcatgttgagaatgctttaaaagttgtagaatttttaaagaatcatccaaaggttgaaagtgttaatcatccatcgctaccagagagcgctgataatgctttatataaaaaatattttcctaagggagcaggttctatattcacattcgaaattaaaggtggagcaaaggaagcacaggaatttattgataaactacaaatattctcactacttgcaaatgtagctgatgttaaatcattagtaattcacccagcgagtacaacacattctcaaatgaatgaaactgaactagcagagtcaggaattaaaccaaatacaatccgtctttcaataggaacagaacatattgatgatataatttatgacttatctcaagcatttgaaagttaggagtcatttagttaataaagaaaataattattcagcttagttctaagaaaaagttttgatagattaaaagtttttggttagttacttaagaggcagaaggcaaacagtcaatatgagagtttgccttctatttttctttggagtgataaattcatgatagtaattaatatggtgtaaaacacaatattatgagaacaatatagaattattagttataatttaaatgttttattctatagtcgctaggatacacacctacattagatttaaatactctgctaaaatagaaggcatctttataaccaatcaattcaccaaccttttttatttccaagtcaggctgattaattaaaagctgtttggcttcattaatgcgaattctagtgatatattttatcggagttactccggtatatttcttaaaaatcttacttatatattcacttgtaaatccaaatttctcagaaatttcggttattgatgtcacagaggcatagttattaagcaagtaattttcaagtaactggcttaggctttcaggctttagactgtggtgatcaattgaaaatgaagagaattctttactttcggactcaagcataacaagaatgctttgtaaagcagtgctaagttcttctatttttactggttttaataaaaaatcttttacaccatattttaatgcagtctgagcatatttaaaatcattgtatccacttaataccatagtctttatatgaggatgatttttgtagagatatttaattaattctaatccatcgtattgaggcattcttatatcagtaataactagagatggacattgctgttctatgagaggaatggcaatttctccattgctagcttcacctactaattcaaaaggaatagataaagaattaattttttttattatattctgtcttataagatgttcatcttcaacaacaataagtttataggtgtgtgtattgttcataaaaatcctccttatttagatgtacgggtccaccgattataaaaattgttctatttttttgagaattatcaattgaaaatatagcttcagtaccatataaaagttgtaatcttagatatacatttttaagtcccattccgccaatccttaatgattttagttctttagttctgtttaaattatagagattagataataatttctctttatcttgatcacttaaacaaccaccattatcttcgatatatataagccacttttgatcatttgttatagaagatttgatatctaaaatccaaggtggtgaggagctaaagccatatttaaaagcattttctactataggttgtattattagtttaggaattaaaatgttctttgttgattcatgaatatttgaagtataaataaaatcacttccatatcgcattttcatacattcaatatatttttccgtatatgatatttctaaagataaatgaacagcagtttcatcgcatgttgtaatataacggaaataatcacacaatgcatgacatatattaattatttcgctattcatatcttcttcagccatgatacttatatttgttaaactattatataaaaagtgtggattaataagagattgggtcgcttgtagttttgcacgagtttcttctgattttaataataaaatttcatgagaagaatctcttaatttttcatacatatcacaaaacgattgatagagctcggaaatttcaagtatattactattaattggaactaatagagtttcattttcatttaatactctgtctatagtgaccatctttgtagaattagttaaagtacttaaaggttgagttaatctacttgaaattataaaacataaaaatagtgtaaaaatgattgaaattatagctataataataaaaccttctttaaaggagtgcaatgatctgaaaacaacttccttaggttcaacggcaatgattgtccaattatatgaatcgactttttgatacgacatcaggacatcatgcttactatctatattaataaaatacccaactgatggacttaaattgtgttcttgtatagtattagtataatttatattatcttctggggcagatgaataggggtaaactaactcattatgttcattatatatatagaatgatgttgaaggatttttttgctttaattctgaaattagagagaatatagtgttgcaatcttgtactacttcaacaataccttctggttcattatttcgattaaagaatacacgtgaaagtgaaagataatgatggtttgacatattttcaattttagtaggagagtatgataatttatcagtaagaaaaatatttttttcaccatttttatctaatgtatccttataccatggtaccgtattcaaatctacatttattactccttgaaagaaacctgatcctatacatattccattttgtgtataaagattaacttgactggctgattgaaagggaccgattatagcagtaataatatcatatatagctaaaacgttttctctagattgagtaaaatgttcgagatttattgtatctgtgttattatgtgtaaaactagtaaaattcttttttatagcattcgagtagacaatattcatggatattgtggacatattatttaattcggttgatactgatttatgaatagaggcactgatagtttcagatttggttttggctgtttggtaaatattatcactataaaagtaataaaaacaaagaaagaataaaagcaataataaggctactagcaacccataaatagaaaataagtatgtcttttgagaataacgtaatttataattcattataatcctcctctccaaaacacattatataataatgttcaaaaaagtgcaaaacggagttcttttttatctatgtctaattaatatacttagtgatattataagcatgtagccaatgtaaagcatatcagaaatgtggacaaatatttatattaatgggggtatagttaatgagtaaacgtttattaaaattagttagtgcggtttgtatgacagcactgatagggagtgcttttgtagggtgtggaagcagcaatggagatggaagtaaaagtgcatcgggaagtggagattcagttacattaacatttggatctcatcaatcaggtcttccaacatctggagttgtacaggatttggcaaaagattttgaaaaagaaacaggaattaaaattgattttcaaatttctccggatgctcaatggcgtgatttacttaaagtaaagttggattctggtgaagcaccagatattttctgcgcggatgctgatcctttaaatctagtaacaagagttaatcctgaaaaatacgtattagatgtatcaagtgaagaatgggtaaagagaatggacccaaatgttcttccttcaatctcatacaatagcaaagtttatggtatcacttttccaggtaaaaaaatgtatttctatgtttacaataaagagatatttgaaaaattaggcttgaaaataccaactaattatcaagaattcaaaaatgtatgtcaaaaaataaaagattcaggagttactccaatttatgaaggaactcaaaatggatggcatcaagtacttccattatttgaaacaggagcaatgtatcaacaaaagcatccagacttatacaataagcttaataaaaatgaagttgatttagattctatacctgaattacaaactataatcaatgaattaaaagaatgtgctgatttaggtttttatggagataattacttaagtaattcagtagaaaatgcaaaagaagcaatggcaaaaggaaaagctgcaatgtttatagcagaatcagcatggagaaatgaagtgaaatcggattttcctgattttgacgttaataagttaggtatatttgcaatgccttggggagataaccaaacaattggtgtgaatcctgcaagtaatgcatattttataaataaaaatggaaagcatgtagaagaagcaaagaaattctttgatttcctagcaaaacctgagaacttacaaaaacgtttagatggacaaccaggattatcagaattatgctggcctgaagtaaaatcaaaatattcaaaagaggaccaagcatacattgattcattgcaaaaaggaatggttatgcaagctggcgttaaatatattgacagccaatggatggatattggaaaagacttagaggctatgtatagtggttcatcaactccaaagcaagtattagaaacaattatgaatagaagaacagaacaagctaaattacaaaaagatcctgattgggataaataattacggttatatgaaaataaggtttctccttttgaaaccttattttattaaaatggagggatttgaatggacagaaaaaaattatatccgtggtactttacaagcggggctctattaatctttttcttactttgttttttaccaggaattataggtatattatattcattcacagattggaataatttcactgataagatcaattttataggattcaaaaattatgctgaagtattgaaaggtaagccagaataccgtgcatatttgtggaatacagtattatttactacagttacaacaatcatgaaaacggtagttggtctagctttagccctattattaacacaaaaatttatcaaactaaaaaactttcatagaatggttatattttctcctcaagtaatgtcttacttagtagtgggacttgttttcaaaagtatgctacatccagatacaggattcgtaaataattttcttaaatctgtagggatggatttcttggctatgaattggctgactgatttaaaaattgtttttgcaactgtcatgtctgtagatacttggaagggtatggggtacataatggttgtaattattgcaggattgatgtctatttctcctgattattatgaagcagcaaatattgatggtgctaatttttggcaaaagtttcgattaataaccttgccattattaaaaccaattattataaatgcaactatattaaatgtaacatatggatttagagtatttgatatgatttattcattaactaacggtggaccaggtaatgcaacaggtgtaattaatactgcagtttataaggagttctctaaaggaaattatgcaatgggtactacattatcaagtatattattctttgcattattactattagtatatttcattataaaatctatggaaaataaggaggtagatgcataatggtaactttaaagaagtcaattggaagcgtaatcgcaaatatagtaacaatttttataagcttattagtactaataccaatggtagttttatttcttaattcttttaagagtcaaggtgaatcaaataagatgtcgctgtctctgcctaaagaatggatatttgcaaactataaaacagtaatcgaacagggaaaattggtctcatcgtttttaaacagccttttatatgctacttgtagtgttttaataattgtaattgtagtagcagcagcggcgtttgttattgcaagaaatcgtaaaggtattaataattttatatattactttatcctttcaggtatagcgataccaattaacaatgttgcattaatgaaagttttgcaggcattaaatcttgtaaatactagattagggattattcttgtttatgcagcaataaacattcctcttagcttatttttatcatatgggtttatttcaacaatacctagagagattgatgaagccgctgttattgatggatgtggaccaattagattatttataaaaataatacttccattattaaaaccgattatttcgactttatttgttttgaattttatggctgtttggaatgactttacaatgcctttatattatttaaataattctgcaaaatggccaatgacattagcggtttataatttctttggagcatttgaaaattcatggaatttagttagtgcagatataatactaacattgctacctgtattaattatatttatattagggcaaaaatatattgttggtggtgtttcagcagggtctgtaaaaggctaatagagcaggaatgttatagttagataatttagcatagtttaaatagaaagaataaataaaataatagaatttataaagttcctaaagacaaaagcttatttaggaaacagagtaggagcgtgtattaatatgaaatttagcaatggatgctggctggacaagccaggatatcagatatttagccctcaagaagtttatagtactaaaatagaagaggatgttgtaactctttatgcaccatgtaataagataaaccaacgaggagatacattaaaggggccagttataacatataaaatctcttcgccaatggaaaatgtaataagagttagagcatatcattttatgggacaacgaaaaaagtctccaaactttgaaatttataaagatgagaaggttaatagtttaatagaagaaaatgaaaaaaatataatatttaaatcaggagatcttaaagctgtaatagataaagatgtatttcaaatgagcttttatagaggagataaaaagctaacgtctagtatgccaagaggactatcatatgttaatactgctgaagaaagagtctttatgaaggttccagaagaaggagtcttcatgaaggaagaattacaattatccgtaggggaattggtttatggacttggagaaaggtttacccctctagtaaagaatggccaaagcatagatatatggaatgaagatggaggaacaagtacagagcagtcatataaaaacataccattttatatgactaataaaggatatggagtatttgtaaatcatcctgaaagggtatcttttgaagttggttcagaaaaagtcactaaagttcaatttagcgttccaggagaatatctagattactttataattggtggagaatcaatgaaagaagtagttgaaaattatacaacactaacaggtaaaccagcacttccaccagcatggtcatttggattatggttaacaacatctttcactacaaattatgatgaagaaacggttaatagttttgttgatggcatggcagatagagatctgccacttagagtatttcatttcgattgcttttggatgaaagattttaattggtgtaattttgaatgggatagcagagtattcccagatccaaagggaatgcttacaagattaaagaaaaaaggattaaaaatatgtgtctggataaatccatatattgctcaagaatcaaagttatttaatgaaggtatggaacacggatatttcataaagaaacctaatggtgatgtgtggcaatgggatttatggcagcctgcaatggggattgtagattttacaaatccagatgcatgcaaatggtattcagataagcttaaagaattaattgatatgggagtagactgctttaagactgattttggtgaacgtataccaacagaggttgagtatttcgatggatcagatccatataaaatgcacaattattatacccaaatatataataaggtagtatttgagactttaaaagaaaatttaggagacgatgaggcagcagtatttgcaagatcagctactgttggaggacaaaaattcccagtacattggggaggagactgtgaagcgaattatgaatcaatggcagaaagtttaagaggtggattatctctttgcatgtcgggctttggattctggagccacgatataggaggttttgaaagtactgcaacagctgatgtatataagagatgggttgcctttggattattatcttctcatagtaggttacatggaagcagttcgtatagagtaccatggctttatgatgaagaagcttgtgatgtggttagattttttactaaacttaagtgtagaataatgccatatttatataacatagctaatgatgcatcaaaaagaggtataccagctatgagagctatgatgttagaattccaagatgatctagcttgtaattacttggataaacaatatatgcttggagattctatcttagttgcacccatatttaatgaagagggagaagcaaattattatttaccagaaggaatgtggactaacttcataagtggaaagaaatataagggtggaagatggatcagagaaagacatgattacttaagtgtacctatgatggttaaagaaaatagtttaattgctgttggaaatgaaaattctaagccggactacaattatagagataatgtatcaatttttgcctatgaattaaaagaaaataagaaaacaactacaagtgtcgtagacatgaaaggcaacaaagttcttgaagtggaagtcacaaaaaatgaaaaaagtattattattgaatctataggtactgaaggagaatggtctttagtactcaagaaactttctaatatagaaaatgttgataatggagtacttattcatcaaggagaggatacaataattaaatttacagatggaaattgcaaatgtaattgtaaaatagagtttagcatgtaacaattttaatataaagcacatgtaatatatgtaagaatctggaaggtcaactaaatttattattagttaacttctagatttttattatataatgaatattttataacctataattgatattataatggtatataataaagttaggaaaaaatataaatacagacttggagtgaatatttatggaactaaattggagcctaaaggaaatatatccgtcatttgatggcgatgaatttaaacaagacttaaataaattaacaaatattattgaagaaatcaataaatgggcattagaagctactaaaaataaagataacttagtagaaaaattagaggactatataaataaatttacaaaagtaacagacttatctagtagaattagtatttttataaatctaagcttaagcgtaaatacaaaggataagaatgcattgaggtattcagatattttagaaaagaaattaacaaatttaattggaagttcagttaaatttgaaagatatattagcagcatagaaggcctggatgaaataataagtaagtctaagttacttaaggaacatgaatttatgttaaaaaatatagttgagcaaagtcaatatttgctcagcgataaggaagaaagtataattgctaatatgaaaaatacaggctcaaatgcctgggcgaaacttaaggataatttgatttccacattattagtagaaattgaagaagataatgaaattaagcatatgccattaacaatggttttaaatatggcctatgataaggatgcaactgtaagaaaaaaagcatatgaagcagaaataaaatcttataaaaaagtagaagaaggtgtagctgcggcattaaatggaataaagggtgaagttttaacagtttgtgattttaggggatataaatctccacttgaaaagacactcatagattcaagaatgagtgaagagtctttagaggcaatgtttttagctatgaaagaaagtcttccggtatttaggaaatacttgagaagaaaaggtgaaatgttaggtcataaaaacggactaccattttatgatttatatgcacctgtttgcgaagcagatatgaagtttacatacgaagaaggtactaaatttgttgaaaaaaacttcagaacatttagtgacaacttaggagattttgcaaggaaagcaattgataatcattggatagatgtaaaaccaaaggaaggaaaagtaggtggagctttttgcgagaatctacatttcaatggagagagtagaatactcctaaactatggcgataattttggagatgtagtaactctcgctcatgaattaggtcatggttttcacggagagtgtttaaataatgagactacgttaaattcagattatccaatgccgatagcagaaaccgcatctacattttgtgaaacaataataaaaaaggcagcaataaaagatgcttctaagaatgaagctttagcaatccttgaaactgaaattagcgattgcacacaagttattgttgatatatactctagattcctatttgaaaaatcatttttcgaagctagaaaaggaagttctttaagtgttgaggaaataaatgatcttatgctggatgctcaaagagaagcatatggagatggattagatcctgattttttacatccatacatgtggacttggaaacctcattattatgatgccgagtataattattataattttccttatgcgtttggattattatttgcaaaaggattatatgctgaatatttaaaaaaaggaaaaactttttcgaaggagtatgaaaaattactttcaattacaggaaaaaataaaatagctgatgtagcaagagttatgggcatagatataaatgatacagaattctggagaaattctttaaaaactatagaagaggatatagaagaatttatagatcttagtaataaataagaaaaatttttatggaattattcatcaaataaatatatttttatttgatgaataataggtatagtaggggttagaggagtaattttaaatgaagatattttataatacatccactggtaattcgttgtatgtagcaaaaatagtaaaagaaagttttaaaaattgtgaattggtatctatgagtaaggcattaaaagaaaacaagcttgaaatttgcgaagatattattggatttatatatccaatccactgttcaggactaccaattgtggttaatgaatttatctcaaagttaaagataaataaagatgcatatatctttgcaattggagtttcaggaggaggaggagcaaatactagctttgttcaaattaataaattattaaaaagtaatgttaaaataagtaattattgtaccattaggtatatttctaattatatacgagcaggtagaaatcctactaaagctagagctgaggaaactataaaagaaaatgaaagtaagatagtggattttatagagtcagttaagagaagagatgctaaagaaattaactttaaagctggaattggaaatttagcatataagatatggaaagatttttatagaaataaagatagaaactttaatgtaaatgagaaatgcattagttgcaatatgtgtaagaaagtttgcccggtagataatatcgtgatagaaaataatagaccaaaatggttaggaaaatgcacagactgtatggcttgtataaatatatgccctaaagaagcaataaatataggaaagtctacaattaaaaagaacagatatttaaatccatatataaagagagaggaattaatatagagatataagataaaaaaataatataaaaaaatcctaaaaatgataacataaatgtaataatatggtaaaatatttatataaataatatatgaatggggttgtcaagtaatgggtttttttaaaaaagatgatattcaagaaaaagaagttcaagtaactaatgaaactaaaattgagaatttagagattgataaaagaatttctaaaaagaaaaatttatctctttttgatgtagatacgattcagtatgtaattaaaaattttccatccatgtccattgaaattcaaagtggtctgagcaacttggcaagcatactagaaaataccatagaccacattgaagataagtcaaatgaaataattaaaaaagatagggattttaaattaagtaaagcttatagagatacatctatagctatatatagcgttgttgaaaacataaatgaatatgttaagtggatgcaagatgaatatgagaaaaatatacaatctgatgaagaaagtatttgtaagataagaaaagatttggtggaaattaagaaagaagcatctatagataaagaaaaacaagaattaaaaaataccttaattaatgaagaagctatagaaatatataaggatttttcattaaaagaacctaaagcaataaagttggatgataatattatagatgttgaagattgggatgacttacttgttaaaacagctgaggtacttacaaaacaatataaaaaaaataaaaatattaataagactatgaaatcaattaaaccagttgaaaaaaaatctccacaaaattcttttagggatactgttatagatatgctaacggagtataagataaattttgatgaatttaaagttatagtgaagtaagatatgtagagtaattcttgtatttcaaataaatcagcttacatgcaaagaaatatttgcattttaagctgattttttatatagttaaataataataaaaatattgacaatggatattataaaaagtacaatatgattataaaagattgagttaaatttaatttataaaaatttattttttttatgaatagtaaatataaaaaagtttaaaatagctagagatatgtttaaaaaagctttagtttaatttataagatggaggaataaagtatgaaaatagtagatactaacgaatttaaaaatgaaatagagagtggagttacagttgtagatttctttgcaacttggtgtggaccttgtaaaatgttatctccagtgcttgaaggattatcaggcgaaatggaaggaaaggctaaatttattaaagttgatatagatcaaagtttagacttagcgaatgagtttcaaatttcaagcgttccaacaatgataatattcaaagatggacaaaaagcagagcaacttataggatttttaccaaaagaaaaaattcaacaagtaattgaaagtaatctataaaatattttctacattaaaaaacatagtgcaatattaaaatgtactatgttttaattttcaataaataagttgagtaaaattaaattttataaagtttactttttaagcataattatgtaaggagagataatcatgaatttttatagtttttctgcaaataaaatgaatggtcaagaagtaaaaatggaagaatataaagggaaagtagtcttaatagtaaatactgcgagtaagtgcggatttacaccacaatttgaagcgttagaagatatttataaggaatataaagatcagggattagaaatattaggttttccatgcaatcagtttgccaaacaagatccatctagcaatgaggaaataaattcgttttgcaaattaaattatggagttacttttactatgtttgagaaaattgatgtaaatggaactagcgcacatccgctatatgaattcttgaaaaataaaaaaagaggactctttaataaggagataaaatggaattttactaagtttttagttaataaagatggagaagttatagggcgatattctccaacaacaaagccatcaaaaattaaagaagatattataaatttgttaaatgcttaaattattgcatttttgaaatagacattaagtggtgcagaagatatattataattatatagtttaaataagatagtttataatagaaataggtttataattaaatatacgtaaatggaggaaaaaaagatgagcgaaagatatgatatagcaataataggaagtggacctgcaggtttgtcagctgcattgaatgcaagaataagaaaaaagaattttataatatttgggaataaggaacttactagtaagcttgcaaaagctcatgaaataaataattatctaggcttttataaaaaaagcggtaaagaattgcaagaagagtttaataaacatttagaagaaatggatataaatataactgaagagagaattaataatgtatatgccatgggagactattttgctttaatggtaaatgaaaaaatgtatgaagctacatcagtaatattagccacaggtgttgaatacggaaaattatttgatggagaagaaagacttcttggaaaaggagtaggatattgtgcaacttgtgatgctccactatatagaggaaaggtagttacaatagtttcttataataagcatgaggaagaagaggctaattttattgcatcaatagcatctaaagtaaattatattcctatgtataaggaaaaagttgaggtagatccttctatagaaattataaatgatacaccagttggaattataggagaggataaagtaagcaagctgaagttaaagaattcagaaattgaaacagatggtatttttatacttagagatagcatttctccagggcaattggtaccaggattaaagatagttgataaccatattgaggtagatagattaatgagaacgagtatcaaaggatgtttcgcagctggcgatattgttggaaagccatatcaatatataaagtcagctggagaaggcaatatagccgctttatcggcagtaagttatgttgattctgtttctaaaaaatagtaaagctatagaaataagatatgttatctataatattgagcataagtaagctttatgtattggacgaaaagtgctatattaaaattgacatgccaaagcaaaaaagttaaacttactttggtttgttaaaattaaatttatataaatgatatggcggttataggagaatgaattatgaataaatcaaaaaaatatgaaagtatcaaattagacaatcaagtttgcttttctttatatgcagcatcaagggaaataataaaattatataaaccaattctggataaattcaatctaacatatacacaatatatcgcgatgctggtattatgggaagatgaaaagagtacggttaaggatataggacgaagattgcacttagattctggtacattgacgccactattaaagaagattgaaggaatgggattaataacaagatatagagacacaaatgatgatagagtagtaattattgaattaactgaaaaaggaagacttctaaaggatgacatattagaagtaccacgtcaaatagtatgtaaagctaacataacaactgaaagtgctattgaattaaaaagaaatttagatgaattattaaaatctttagagtaactttgactgattttgtctgggccctgattagatattttttggaggaatttctatatggaagatgtacttaataaattaaagggaaatgaattttttcaagatttaagtgttgaggaaattagggatcttatttcaaatattggatataatttaagatcatataaaaagggagaaattattgctaatgaagaagatgaatgcaatagtttaggttttgttttagaggggatagtcgaaattcaaagaatataccttagcggaaaacaaataattctaaagagactaagtaatggagatgtatttggtgaggcattagtattctcaaagaaatcaaaatatccatctacagttatagcttttagtgactgtaatatactttatataagcagagcagacatactaaaattatgtacaagtgatgaaagagtattagggaactttatgtcttcattgagtaataagatatttatgttaaattcaaagataaaaagtatagcgtttaaaagcatcaaacataaagttataaactacatattagaacaggcaaagagccaaaaaagtgaaatagttaaactgaaagaaaataaagaagaaattgcatcttcactaggtattcctagaccatctttatcaagagaattaatgaatcttagagatctaaattatattgagtttgatagaaatataattaaaattttaaatattgaagagttagaagcagaattatttgattaaaatgatatatattgatatttcataaggcagaggtatacgtagaaatcattaatataaaataattttattataatagaataattaggttagcttactatcgcaaatattattttattaagtttatagtaagtaattaggagttatttatgaaaaatatttctgaagaacagttagaggagttagaaatttttaatagtgtttctaaatcatctttaattaagcttaaggattttggagaagttaaaaagtatcagcctggaaatcatctttttagagataaagaagaagtatctactttatatgtagtattaagcggaagtatatctctatataaattaaatgagaatggaaataaacgtgttatattcattttgggtagaggtaaaatgattaatgatgttatcatacaagatttaccatcgtctataaattgtgagatatttgaagagtcttacatattaagttatgacaaatatacatttttaaagattatggaggatgattttatccttaccaagaatgttatgttttcattagctatgaaagtaagaagattgtataggcagctaaagaatgcaacaggtgtagtaagaatggaaaagaaacttgcggcaaaactttggaaacttagcagagattatggagttaagtgtgaggatggagtaactattaatatgaatataagtgtaacatatctagcagatttacttggctcaaaaagagaaactgtatccagatcactaaaaatacttttggacaataaattaattaagtatgagaataaaaaaattaaagtaattgatcaagataaattatcaaaattttttaaagcaccgtgatttatatcacggtgctttatttattaataacttataattaatttataggtaaacgtatatatgaaaggggaatttatagtatgttttgtgaagaatttaacagtgtaattatggcagccaaggcaaaagttaatttattaaagacaaataaactaggatatttcataagttcaatgcttgcaggtctttatgtgggtatgggaattatgcttatattcacgataggaggattattaggtggtagtggatcacctgctacaaaaatagtcatgggagtatcctttggagttgcccttagtttagtaattatggcaggatcagaactttttacaggaaacaactttattatgacagctgcttctttaagaaaagaagtaaagtggacagacactattaacatatggatagtttgttttataggaaatttagttggttctattattgcaggatatttattttatgctacaggacttacagctggacccgttggagaatttattgcaaaaacatcagcagctaaaatgagtgtaccatttttaccactattagtacgtgggattttttgtaatatactagtctgcttagctacatggtgtagttttaaattaaaaagtgaatcagctaagcttattatgatattttggtgtttatttgcatttataacagcaggttttgaacatagtgttgccaatatgactcttttgacaataggattacttaatccgggagctgcaagtgtaagcattatgggttatgtgtataacataggtgtagtaacacttggaaatatgattggtggagcagtatttctagcactaccttattatataatttcaaaaaagaagtaaaggagtaagctgatgggatataaattaagcaaaaatgatattaataaagtattcgaagatttatcaaaagaatatgtagtatatgcaccaaaattatttgaaggtgaaggtagtttctctgatactgatagagtacgttatggtgaaataaaaacaatagatgatatagtttttgatcaaaaggcccaatattcatataaggaagtattacttcctatatctcaaacacttttctatttcacagaagattccataaaggaaacagatgctcctaaaaaaggtgctatcattttcttaagaagctgtgacttacatgcggtaaaacgtatggatgacatttatttaagaaatggacaagaagattattattataagagaataagagaaaatgcaaaatttattttaatggggtgtgaaaactcatttgaaaattgtttttgtgtaagtatggaaacaaataaaaatgatgaatataatgcatacttaaaagtaaatggagataatgtatatgtagatgttaaagatgaggagttaggaaacctatttaaggttgatgaaactttagatgttaaaccagactttgtaacggaaaatagtgtaaaggtttcgataacagataatctttctttagatgttatgaaatcagatatgtggaaagagtacagtgctcgttgtattgcttgcggaagatgtaattttgtttgtcctacatgtacttgctttacaatgcaggatgtcttctatactgataatggtaaagcaggtgaaagacgaagagtatgggcatcttgccatgtagatggatatacaaatatggctggaggacatagttttaggttagataaaggacaacgtatgcgttttaaagtgctgcacaaagtatatgactataaaaagaaatggggatatcatatgtgtgtgggatgtggaagatgtgatgatatctgcccagaatatatatcattctctaactgtgtgaacaaattaaaagatggtatgaaagaggtggcagacaatgagtaaaaatgaatatattccttttttatcagaaattaaagaagtaattaaacatacagaaatagaatatacttttcgaatggagtttaatggtgatgtaaaaccaggacagttctttgaagtttcattaccaaagtttggtgaagcacctatttcagtaagtggtattggagagggcactgtagacttaactataagacgtgttggaaaagtaactaatgaaatatttaataattatgttggcgataaattatttctaagaggaccttatggtaatggctttgatattgaaaattacaaaggaaaagaattaatagttgttgcagggggaacaggtctttctccagtaagaggagttgtagattactttgcaaaaaatgcaggtgaagcagaaagctttactctaattgcaggatttaaatctcctaatgacgttttattcaaagatgatattaaaatgtggaaaagtaatataaatcttattctaactgttgataatgcagaagaaggatacaatggcaatgttggaatggtaacaaaatatattcctgatttactaataaatgatattaataattcagcagttattgtagtaggacctcctattatgatgaagtttactgttgcagagtttttaaaacgtggtatagatgaaaataatatttggatttcacaagaaagaaaaatgtgttgtggaatcggaaagtgtggacactgtaaaatagatgatacttatatttgtttagatggtcctgttttcaattattcaaaaggcaaattcttaatagattaggaggggttagttgtggatttaaatacaaaggcaatcaagaaaaatgcttttagggtcactaaaaaaagagggataactgcctctagaattagagttcctggggggcatttagatgcggaattattaggaatgatacaagaaatatcacaaaagtatggtgatggaactgttcatataacaacacgtcaaggttttgaagtaccaggtataagctttgaggatatggataaagtaaatgaattgttacaaccaattattgaaaaattagaaataaatcaagaaataccaggcaaaggatatactgctgcaggaactagaaatgtatcagcatgtgttggaaacaatgtttgtccgtttgctaattataatacaactaattttgcaaagaaaatagaaaaagctattttcccaaatgatttacattttaaaatcgcattaacaggatgtcctaatgattgtattaaagcaagaacacatgactttgggataattggaatgacagaaccacaatataatattgatagatgtgtaagttgcatggcatgtgtgaaagcttgtaagaaaaaatcagtaggagcacttgaagctattaactataaaatcgtaagaaataaagaaaaatgtattggttgtggtgaatgtgcaaatgcatgtcctacaggagcatggacaagaagcaaagaaaaatattataagttagttcttatgggaagatcaggtaagaagaaccctcgtcttgcagaagatttcttaatttgggctgatgagcaaagtataattaaaataatattaaatacttataaatttgttgaagaatatatagacaaagatgctccaggtggaaaagagcatattggttatataattgatagagttggatttgaagaatataaaaagtgggcattaaaggatgtagaattcccggaaaaaactatcatcaaagaacgtatttattggagtggaatacatttctgctagaattaaatgtattgcgaatcgtctgaaatataaaaatacttgcagtatagtataattttaatttactgccagacaatcgaatgggaatatatgtgtttactctgtttcctagaagattttactggattattctaagattataagttgcatccaaaatgcttgcttcaaagactacgcttttgaacaagcatatttggaacaacttataatctagaataacgaccagcaaaatcttcttatgaacactctgtaaaaacatatattaccattctttgtttagtagtaagtttaaattaagaatatattaatgcaagtatttttatatttatcagattagtaatacctttgatagagattatttacaatcactaatacagtttgtacccttataatacacaaatatataacttttgaagataaatctgtgaaatacttaaagtgatagtaaaacaaagaaatagaatacatatatgtgcagcaggcattgaaaaatgagctgatggtatgtcttaatgggagattgttccgttttgcttgtccaaaatgaattttggagcatgcataaatggatacaacctcctatttagacatacccagcgaagtttttctagtcctgcgaaacatatatgtattctatttcggttggttaccacttcactttaagttcgtcacaatacctttaaattgttatgacttagagtatatatggattctaggttatttttatgtatttataaaaataattccaaaagatttctgagtcgtaacaaatgaaacagagtattttataatttcaatgtaaaataggttcataaggtgattcgagggaatgtacctaactgatatagaaatttataaaaatttatttgataaaaattaagtgtgtggaggagatttcaatatggataataaaatgttttgttttcaatgtcaagaagcagcaggatgtacaggatgtactgtaaaaggtgtgtgtggtaagactccagaccttgctaaaatgcaggatttattaatatacgtgactagaggtttatcagaagttgcaacaaaagctagagaagaaggtatcgttgtatcacgagctattaatactacggtaacaatgaatcttttcactactataactaatgctaactttgataaagaagtattttatggaagagtaaaagatactttaaaaataaaagaagaattattaggaaaattagctaacaaagaaagcttaagtgcagctgctttatataatgcagaagcaagaactgatcttgaagctaaagcagaaacagttggagtattagctactgaaaatgaagatattagaagcttaagagagcttattacttatggattaaaaggactatcagcatacatgaaacatgctaatgctttaggatatgaagatgaaaatatatgtgcatttatgcaaaaagctttatcattaactgctgataacaatgtaacaatagatgaatatatagcattaactttagaaacaggaaaagttggtgttgatggaatggctttattagataaagctaatacagaaagttatggtaatccagaaataacaaaagtaaatatcggagttggaacaaatccaggaatactaatttcaggacatgacttaaaagacttagaacaattattaatacaaacagaaggaacaggaatagatgtttatacacattctgaaatgttaccagctcactactatccacatttaaagaaatactcacatttagtaggtaactacggaaatgcatggtggaaacaaccagaagaatttgaaagctttaatggaccaatacttatgactacaaactgtatagttcctccaagagatagttacaaaggaagactatatactactggctcagcaggttatgaaggatgtactcatattgcagctgatgaaaatggaaagaaagatttctctgtaattattgaacaagctaagaaatgtgcagcacctactcaaattgaagaaggagaaattgttggtggatttgctcataaccaagtattagctttagctgataaagtggttgacgcagtaaaaactggagcaattaagaaattcttcgttatggcaggttgcgatggtagacaaaaagctagatcatactacacagactttgcagcagctcttccaaaagatactgttatattaacagctggttgtgcaaaatataaatacaacaagttagatttaggagacataggtggaattccaagagttttagatgcaggacaatgtaatgattcatactcattagcagtaattgcattaaaacttaaagaagtattcggtcttgaagatataaatgaattaccaatagcatttaatattgcatggtatgaacaaaaagcagtaatagtattattatctctattacacttaggagtaaagaatattcacttaggaccaactcttcctgcattcctttcaccaaatgtagctaatgttttagtagaaaactttggtataggtggaattacaaatgttgaagatgatatggcaatgttcttaagataaattaatataagataaataatagaagaagatagctggtatgaaactagttatcttctttctttttatttagaatacagtaagtagtaaagacaaaatcgtactgtcgaaaaatatttaaaaataaagttgtattgaaaacgtatttataaaaataaatatatttacatcaataatatatagatatataatctgtatgttgtaatagcaggtaataaaaaaggaggagaaaatcctttttattacctgttgtataaagttgaaattgcatagtaatttttacaatatgggggaagaattatgtttaaaaaaattcaatcattattgattggaagagctcttaaaactaacgaattagctgaagaaaaatttagtgttatttgggggctgccaatattatcaagtgatgctatttcatcggtagcttatgcaagtgaagaaatactattagttcttatacctattcttggtatgcgtgcatatggatccatgatagaaatagcaatagcaattacagttttattaggaataatagtgttttcatatagacaaataatcgataattttcctcatgggggcggatcgtatattgttgcgagcgaaaatataggtaagcttccaggattggtggcagcgtcatcattaataattgattatttattaactgttgcagttagtacctgtgcaggagcagctgcaataacatcagcgattccatccttgttgccgtatcaaccgttaatagctatttttgtaatagggttaataacattagggaatcttagaggaataagggattcatctaagttatttggaataccaacatatttatttatattatcaataataataatgataataacaggagtattcaaagtattagtgttgaaagaaagtccagagcaattatatgtagttccacaagcagctggagatttaactttgttattattcctaaaggccttttcttcaggatgtactgctttgacaggtatcgaagcggtaagtgatggaatacctaattttaaaaatccagctcagaagaatgcgaaaatagtattaggaacattagcttgtattgtttttattatatttggtgggatatcatacctctcaacaatgtacaaagcagttccgggtcaagatattacagtaatagcacaaatagcaatccaagtttttggacaaaacagtttaatgttttttatagtacaagctacgacagctattattcttacacttgcagctaatactgcattttcagatttgccgctactgttatcaatattagctaaggatggatatgttccaagacaacttgggaaaaggggaactagattaagtttttcaaatggaatagtattgttatttctagtatcctcacttttagtttatattgcagatggtagtactcatatgttgttatctttgtatgcggttggtgtatttatatcattcacattatcacaatttggaatgtttagaaaatggactaagagcaaggaagggcattggagacataaagcgtttataaatgggttaggggcagctgttacagcagcaacatgcataataataggtgtagagaagtttaagcatggagcatggattgtgcttgtatgcataccgatacttgtaacaggaatgttaagagttagaagacactatactaaagttagagagaacttaaaaatagaaacaggtttagagagtttaattgtaagagaagcaataacaaaacatgttattgtgccagttcaaacaattaataaatctttcattaagagtttaaattgcgctttaactcttggggagaacatagaagtttatcatgttagtacagatgaagaagtcacaaagaaactaatagaaaagtataataagcttgggatagcagctcaattggtcatagaaaatgcgccatacagaaatgttaacgaaaaacttttagcgtatgtagaagaaaaacataagcacttaaagaaacacgaagtaataacaatagtaatgcctcaatttattatacataaatggtggcatcagacacttcataatcaaacatcaatacttttaagaagatctatacttaagatgagaaatgtagttattgtaactgtgccttatataattaatgaataggatcatataatatagaaaggagagtacctcaaaaatatttgaggtactcttcttatttccagagaaatataatatttaaagctaaaatagaaagtacaagtaaaagttaaacttaaaaattatgatcttactttttgttactatttatcagagaagtctaaatcaactttatctaaaggaataactttagtcttattctttattttataacctacgtataagattaagaataatggaagtcctatataagctgcaattaatccattccaatcaatcgcctcaggagtaatgtatgaatatccttgacctattattataataatacacattaataatgctaatattggaccaaatggatataaactagccctatattttaactcatttaaatcccttccttgataaacatatgctttcctaaatctatagtggcatattgctatacctacccaagctataaatccagcaagaccagatgctgcaactagccaaacataaacagtactctctgcatatagacctgttaaaaagcaagcagaagctattaatgtagttagaagtacggcatttataggtacacctctattatttgttttagcaaaagctttaggagccataccttctttagccattgcataaagcattctacttgatgcatacataccagagttaccagcagataatacagaagttaatatgatcgcattaatcagtgaagcagcacctgcaataccagctttttcaaataccattgtaaatgggcttgtatcaagtccagcttcagtaaatggtattattgctcctaggacaataatcgtacctaggtaaaatattaatattctccaaaatattgattttatagcttttggaatattcttctcagaatcttcgctttcacctgcagcaattccaataagttcagtaccttgaaatgaaaaacctgcaattaagaaaatagaaaatattgatttaattcctccatggaacggtccatcttcaatggtgaagttatgaaatcctattttatctccacccattatgcctacaatcattaaaacaccaattactatgaatataagaacggtaaccaccttaataccagcaaaccagtattctgattctccatatgctctagatgataaaatatttaagcctactataattactaaaaataaaatactccaatatagggcatttacatctggaaaccagtatttcatcaacagagcaccggcaaccatttcggctgcaattgttatagcccagttgtaccagtagttccagccaagggcaaatccaagagctggatcaataaatttattagcatatgagctaaatgaaccagatattggcatatgagttgccatttctcctaagcttgtcattaaaaagtataccattatacctactagtgcataagctactaatgcaccaccaggaccagcttggtggagagtatcacccattgcaaggaatataccggtaccaatagatccgcctatggctatcatgtttaagtgtcttgcttttaaacttctctttaattcgtgattttcttcactcatttttctatcctccattatggttttaaatttccataagcaagtaactaagataatataaaaattaaaacaataaaaaaagccatgagagcatactcatgacataaatacgaaagttacacattttaaaaatatgacgaatatcgacatttacattaaaaatagctctccacaaaataagttgtggcagtcttgtatatattttacacaagcccagcaaatagtattaaagcaatcagctatttacttcggcgaaagttcctttcttattacttcaatgagcttacctccataataatactcttaaatttcgcgcctctatcttagttatttacctattaagttatatgtaattatgtaataaaatgaggaataagtcaatataaaatatttaacaatttataaaaatgcatagaaaatgactaaaaaatttgcatattaaaagcgactatcgaaaattatttcaatagtcgcttttttaatatttataaataaatatactatcttggtaaggattagtgtttgtatttagctttttatacaagttggcac

SEQ ID NO: 77 - DNA, 29438 bp, Clostridium beijerinckii
catcgctcgacttgcatgtgttaagcacgccgccagcgttcgtcctgagccaggatcaaactctcaataaaaagtttaatcttagcttactcaaataaaaattgctggtttacttaaatgtatttatcttattctgttcaattttcaaagaccaattttctttcttacaactttcgttataattttatattattttttgtcaccctcaagcgactttttcattttatcacttgattttcaacttgtcaacaattttttaaaatttcaaattcctttatttaaaagttctttaatatttctttcaaattgtttaccgctcttagcgacgtcttttatcttaccattaatatttatctacatatactcaaccatctgcaatatgcagcttttatattccaaattctctctttatatatataatactacaatatcctactatagatacacctggtatagttatctaatgcattatatctagattcctcatatttcttaatcatattaactttttacactttaaaaatttgcttagactcactatcaatttatttgcccaacggcttaatttttcacataaaatatctggcttaaagtaaaacttagttccactccaagccagatatcaattttaccttatggtaatttgtttcctgctgctagatatatttcataccattcttgtctagtcaatgtgatatttgatgctttgcatatttcttttattcgttcagcattcatagatccaactattgtttgtatctttgctggatgtcttaatatccatgcagttgcaattgcagtattagttactgcatacttttctgctattgaattaatcttcttatttaattctgggaatttatcattatctaagaatacgccttcaaagaaaccatattgataaggagaccatgcttgaatagttatatctttaagacggcaatattctaatactcccccatctctatctatagaagcatcatttttgatattcatatttaatcctgcatctatcattcctgtatgcattatactaaattgcaattgatttataattattttgttattcaaatatttgttaagtaattctatttgcattgcagtatggttacttactccaaaatattttacttttccgctttcgtgtaatttagaaaaagcttctgcaacttcttcaggttccataagcgtatctggacggtgtagcagtaatgtatctacataatctgtttttaatctctttaaactagcatctactgaatttaagatatgttcttttgaaaaatcatacattattcctggtactatagaacacttagtctgaatgatcattttttctcttatggaagaatccattttaattgcatctgcaaaaacttcttctgattttcctcccccatatatatcagcatgatcaaagaaattaattccttcttctaacgacgtcttaataatcttttccgcctcgctcttttcaactgatgccattcgcatgcatccaagtccaatttcagaagctttgattccgctattcccaatatttatattcttcatctttatacccttccttcttcaaatctaatatctatttaaaattttgaataaaatatctactatatccctctattgtaatttctccttatatctttccttctgcaatagattgttcgtgttgactaatccaattatatgcatcttctttatcccttgttaaaagtaagtataagatttctataacaaccatagccgatactctagaaaagctaaactcatctagaaatagtttctctcttgttgaagtatttatatgatatttgcttttgttggcaacaggagaattctcatgattagttatagaaatagttgttgcctgtctttcattagcaatttcaagtaaagctacaagctcttttgaagctcctgaattagatattactataactacatcttctttagttaaagtatatgaaaatgcaagttgtgtttcccatatggtattagtaacagatgatattcccaactgattaaacttatatgctccatccattgctacaggtattgtattaccaaccgctgcaaattgaacaattcttgctcctttaattgcttctaatattctttttatattaccttcattcatcattgaaattgtttgtttcaattcttcaattttatttgctaatatattttgaagtgattgcattatattattggaatctaattcatttgatatattactactttttaaattaaccatttctttagctattttaattttcaaatcataaaaaccttttaaattacattttttacagaacctaactattgtagcttcactaacactactttctaatgccaactcagaaacagtcatttcaatgactctttctttattattaattatataatcagcaatctttttttctgcttcatgtaagcttttataaatgcaaagaattttatctagaacacttttttctatctctctcactttaataattactcccttaatcatcgtattcaagtaattaattcataaaacttcttactcaaaagtatagcttaaattccattgtttccttacctcatccattatatccatgacatcaacagacaatcttaaagtatcattacctgttttactcattaccatactatttacgcattcaatttcatattctaatgcttttgaaccatggccttcttcaataatttctacacttccatcaggatatgtaattgttgctttatctgctcttggaaaattttcaacagttatatatcctaattctccacatacaattcctctctttggctgttttgctctcatagttaatgatataactgccatttcatcatcagaatttttaagaattatacctgactgctcatccactccagtttcgaatttcttaactgtagttaaaatttcctctggctgactagagagaaagtaccttgtaaatgacaatgcatatgttcctatatcaagaagggcacctcctgctaaatctgggctaaaaaatctatttgtcacatcatactctttaaggcttccaaagttaacttgaatcattttaatctttccaagcttgccatcatcaacaattttacgtaactttttatataacggcatatgataaatagtcattgcttctgccactattaattttttctcatttgctaattcaactatttctttcaattgctttccatttacagtaattgctttttcacaaaatacgtttttattattattaagactcttaattatatattcataatgattacagtgaggcgtcgctatataaacgacatctatattatcatcttttagcatctcaccataatctccgtaagctttttctatgttatatttattagcaaaatcccttgccttttcaatatttcttgaacctaccgcatatatcttcccattcacttcatttatggcctttgcaaaatctgctgcaattgttcctggccctagtactgcccaatttattttattcatatccttcacctcatacgttttaattttaaatttcattcttaattaaattatttttgtgaaatttctctaataccttcttcactcgcaataattacttttgtaattacattagtaaataacgatgtttctataactccacaaatttttattagattatcatttagtttatgaatatcttttacattattaaagaatacatctactaataggttgccattatcacttatagtaaatccatcttttatatcgctacttctaatcaccggtttcccatttaactctagtacttttttttcaacatacttcaaagagtcctctaaaacttcaagtactactggaacattaaatgttaactctttttcaacttttgcttcatcaacaaggagaatatattcttctgccatactagcaattaacttttccttagtatgaattcctccaccacttttcaatgcatttaatttttcatcaacttggtcacagccatcaaaagcaacgtccactttatccacagaacttgtgtgcaaaacttctaaacctttttctatacaaagcatctttgttttcactgatggagtaactatctttacgttaatatttttatcctgttttataaattctattaaataagctatgctcctccctccacctagacctactatcatcccatcttttatatatttcatggcttccttagcactatttttctttaaatcgttatcactcattctcaatatcctcctaaatacagtatcaagttaatataatcataatatgatatatttatttcgtcaatattattatttatgaaataaaatttcaccgcagcatatcatttattatatgctttaccaaatgcaaaaaatgatgctttaaaatagtgtaaatcacttcaaagcatcattattacatatttaaatatactttttatatcttctaagtactttagcaataggtaatcccagtaataatccaataacaatttgagtcacatttccaggtattgatgcaactggtgctgcccaatttccataaagtattccttcagtaatgtagtatccgattatcatccaaatacctgatagcacaattgccaaaagattaagtacgatactattaccttcttcatttctactccacgctatggcaccaaccatatatcccataattcctcttactataaatgtaaatggagcccaaagcgcccatcctgatgataaatcaaatattgccattcctacagcagcagctatagcacccttctcttttccaaaaacaattgctgtaacaaataacattacagttcctaaatgaaccaatccgccagtagctaatatcggcaatctaatatttataaacgctgttgcaacaaatactagcgctgtcaatagtgctgtttctaccatgtcttttgttttaaatttgctttttcttctgtttatttccattccttgccccaccttgcttaatttaataattaattatttaagtgtctaataaatgaatttactaattcaccattactttcaaaacctagatcttttagtccgttctcaattatatttaatgcataaagaatcttatcaacttttgcattctcccccatgtgtcctattcttaaaattatatcttcgtatggatttagtgatgttataattaaagtattgtatttactcaacatatgatttttaagcctctgagttcctatgttttccggtattttgactgctgttactgtgtttgaataaccatcttctaaaaataattcaagtccaaattcactaacagccttcctagtcgcatatgctattttttcatgtctcttgagcacattttgaattccttcatccaaaatattatcaaccgctttatctaaccccatgatatcacttattggcattgtgtacggaaaccacttatttgcgtaataattttcccagatattaagattacagtaaaaccctattactggagtctttctatttttcattgcttctttagccttttcgctgatgcttaccatagttaatccagctggagctgaaaatgctttctgagatccacctaatgctatatcaatcttccaatcatcaactcttatttcttctccacccattgcagaaacagaatcaacaacagttaaaattccatactcatttaataatggacatatcttagataaatcatttaaaactcctgttggcgtatcgcaatgaactattgttgcatacttaaaatcatgatccacacttaaaaattcatttaacttactttcatctatagctttgttataatcgcacgaaaaatataccccttctcctccgtacatttcaacaaagtccttaaaacttctcccataaattccattgtctaaaacaagtactctatcacctggttcagtaagagatgcacatgccgcttctaatcctaaaataccttccccacttagtatatataccggattttttgtctcaattattttccctattttatcacaagtatttttatagaattccacaaattctgcgtctacgtccggattagtagttatcctagctctttctaaccttacattctctctaacatttgtcggacccggagcataaacaaatttctcattcatagaatacatccccttcctttcttctgtattttaatattaattaaaatatcatatataataaaaaaagtaaattgtacggatacaatatcttttttattttaattctctattaaaatgtaactttctaaatcgatcattttcataaaattaagccttaaaagggcatagcatccgtaaattctctaatgataatctactacaaaagaacaaaatcgcaggcgactgtggagccggagatttttttacgcatctgcctcttcgaacgcatgtgagaaaaatctgcacataagaaatggcagctatgctgcatataagaacattttatgcaggcgaatatattttcttttttattctctttataaaacataacattcttaatcagccttttcataagttatccacagatttgaatcgaatataaattcctagagaataaaaaataagctttcaaaaacaacttgaaagcttatttaatagaatttataaaattttttatgaattcttagatttattttgcatttatttcttctctgttaatttcaatgcaaaatccaatactttttgaccattcatcattccataatcaaccattggtattacatctactggaattcctagtggctcacaaattttctttgcctttcctaatgtatatccaacttgtggtcctaacaaagcaacatttacgccatctagatttttatccatttgactttctggaaaagcttcaatatctacttctatacctttagtcttggctgcatccttcattttattaactaaaagacttgttgacattcctgctgcacaaaataatctaatttttatcataattaattcctcctaaacaatgtatttattctagtgttattacttagttaaagtatttacaaattttcttaatttaattatttaatcaattaaactcttttttgttattaaatgatcctggatatgttcaaataaaactctattataggaaaaccattaaatattaatttttcctttttattgatcggtatgaatttattatataacaataaattttctttgtaaatgttttccgatatatccagctaggataagattttcttcaataggatagttgtgactcatcttttatataaatttaatcatttagaaccgccactaatagcaaactatcggagtaccttcttcaatattattaaatagaacctttgctaggtaatatggtgcattaacacatccatgagaaccattcgctttgtatatgtttccaccaaactctgatctccaacttgcatcatgtataccaacattaccataaaaaggcatccagaaagaaacaggactactataattttcacctttcaaggtagcatccttttgcttataatttaatcgataaactccagttggagtgggagatcctctgcttgcattacctgtaacaacatcaccttctattacaagtattccatttttgtaataccataagtgttgaatattcatattaatttccacgtaagtattgcctatgtcattactatcatgagataaagcgacttgcttatatataggctctttttctatattttctcctttctcaatatctttaatcaactcttttgcctcctgtgaagtatcaattacccatccataatttcctccactaacttttgttattgttcctaaagatgttttgaaatctcttgtttttcctgatgtattatgcgtattggcaattttctccatataatcatagacttttttttcatcaattgaaacaaaatagtcttgatctactttaagccaattgtgtattattgatccatcaataacttcattatctccgccgaaggaatatgtaatttttgatgatgcatatttatcgagtatatttttagcgtctaaaacttccttagatgttgatatatacttaggattctcatagcaattaattaattctaaattaattttcttctccccactaacaactgcctttattaagtgttcatacaaagcatctttattaatcttatttccatatatctctttgttaattatatatccatcatctttatattctaattcagaatttttaggtgccactacactgcttcctgttatacaagaaagattattaaagcttttctttaataaatcttcgttatatgatacagaatccgtaattgtataattcttctctcctaaaaaagataaaatccaagcaaatggaatctgcttacttttcagttctttaattttgtctcctaaatcatatcttaagttaatatccgctccttttatttcttcctttgcaccataacgttcttctaattccactgaatatgtgtccattttagataatatttcttcttctgcctcttgcgctgttttacctgagacgtcaaccctgttaattgttgaaccaaaataaaaatgattgataaaatgtatagaaactattgaatatatagctaccagggcacaaataatcatcattattctttttggatattttatgtattgtaatatttgttttatcatacttatcccacctgacatcattcaatcttacaattttcatttttaaatcataaaattatagcttatacagaaaatatattaagtaacttttattgaagttttatattttaataattatgtaattataattatatttagaacattttaaattcaatttattaattataaaatgtttattattatttataaaaaaaaggaaagttctgacctaaaaagatcaaaactttcctttgcattaattataattaaatagagctttttactctcgtgtattgattagaaatatctctaatattactcatgaacaataacagggcagcctgggataatattatcaaatattgcctttgccacataatatggtaaatttacgcatccatgtgaaccaccagtcttatatatttcccctccaaattcatctctccaactagcatcatgaagaccaatatcattcttaataaaaggcatccaaaagctaactggtgatgcataatcttcacctattaatactgaatctctttgtttcgaatttaagtaaaacactcctgttggtgttccatgcccagtactttcattacctgtaactagatcaccttctacaacaagatatccatctttatagaaccataaatgttgtttacctttatcaacttcaacaaaagtatcaccaacattactaaaataactggatatagaggtttgagtatatattggatatttacttatagtttgtccactctttatattatctatcagagcttttgtttcttcagaagcattaatcatccaactatggttattaccattatctccaccactaacctttatgcttgtaccaagtgatgatgcataagtatttgctatattatcaacatagtttctaaccatattttcatcaattgttacattaaaattactatcaacgccaatccaatcctttattattgaactatctaaatattgtgttaatcccccaaaattataagtaattttagaagccaaatacctattaagtgtatccctagcgctaacaactactggggagtttattttaaatctaggctctgaactttcgtaacagttagcagcttctaaattcaatgttgtatccccattttgaatcgcttttactatgcttttatataatatatctttgtttattttgtttccataaacttcttttgatattacataattattatttactaagactaaagtagcatttccagattgaaccactttactatcatcagaacaacttagtttatttatagaatcctgtaacaatttattatcaaatgtgatacctgaatcagtttttaaaccaatgtcagatccattaatttgttcctgaactcctcctctttcctgtaatattaatgcatatgtttcaggtaacttttgtttttcattggtagttttagcatatgcacctatactattaataagagaaataaaaaatacaatgctcagacaatagaaaaaggttatcatctctttagtaattttattagatctattttgtttttcttccataaaaacccccttatataagattctattaatattaaatttttgcacatacaagaaatttttatataaatattgtaaagctgctatatacattattccccctttaaacgctctttgtaaaatataaaatctcttgaataatataacatgttattaacaattgtacattacatattatacaatattttccacataataatcaattgtcatataatatttctcttaagttaattacatacttatgttaaataacaaaatctcagttgcttgtatggtcagaaattttcttaatcagctgcatttctaagtgtatgtaagaaaaatttccaagtaaatatattttctattttactccatttatacaactttccattattaatcagtccttttcatattttatctgcaaacttaaattcatataaaataaaaaggtatgaatttttcacccatacctttaactatccaattagattaattttagtagatctaaaatttacttattctagttgtgtttggcataatgataaacactttaaatatgcattttctaaacacctaatagtttgtctattgtatcaacaagatcacttacttctggcttacttagctgtgcatttgctcccactgattctcccttatgttttaattctcccgtaattagtgatgagaatattacaacaggaagctttttcaatgtttcattttcttttatttttcttgtcaatgtgagcccatccatctgaggcatttctatatctgtaataagtaattgagcttcttcaataaagttttcacctttatttcttgctaattcttcgaagaaatctaacgcttgtttaccgtcatcaaaaattcttaaattcttaaatcctgcttttgtaagagtatcttttaataaccttctaattaaagcagaatcatcagccataactaattttatagatgatctatccttataatctacttttataagtctatcttcacttattccaacacttggacaaatatctgtcactattttttcaaaatcaagcataattaatacttttccatttaaaagtatatttccaacagctaatgagttttctgatagatcatcaggttttcttatttcatcccatcttatacgatgaactccaactatatcatcaatattaaatgaaacttttattttattaaactcacaaactataacctttgatccaagttttcctgccgatctttttgttaatatgtattttaaatcaatcaaagtaagtatctcatctctgcatagtatgaggccagctatctctggcttaggatctggcaatttagttaagtttgaaggcatctctattacctctttaacttttacaacattaattgcataatgatttccatttgcgataaattctattatttctaattccccagtacccgattctagtaatatgttattgttcataatatctctcccccttacttaagatcttgtaattgtagcattattttgcaaaatatatcctttcacttttttatagttatcatagcattgatcctatgttttatatcgtattcataattatagcttatgtatatgttgaataaacatattattctatttatgcctatacttttattaaatacttacatctattatcgttgccatatataacttctttaattatatcatttatacatgataatttgtaattaaaaaaactaaaattcatactcaccgtgaaagatacataaaactgttttaccttaaaataataaaacagaaaacattatttttttatctttgtctcatttgcagaagcctatctttcaatttaccttcaatttcttgtaattcagcttcagcagctttacgtttttctcttccttcaatttgtattcgtaaaacttcatcaagagttgatatcaatgattcatttgtattctttagagtctcaatatcaacaattccacgctcagattctttagctgtctcaattgttgacatctttagtgtttctgcattcttacgtaacagctcattggtcatgttcgtaacttcgttttgaaccttggctgcattgtttgaatgagctactccaagagctaatacaatttgactcttccatagtggaatagtattaacaagagtagattgtattttttctgacattaatgaatcattattttgaacgagacgaatttgaggtgccatttggagtgaaatcattctagttaattctaaatcatgtatctttttgtcaaagcgattgcaaagagccacaaaatcatttgtcgcctgagcatcttctggaagtccacttatccttgctctttctgctaacttaggcagctcatccttttctaattttgaaagcttctttttcccagctaatatgtacatagaaagttctttaaaatataccttatttatttcatacattttatcaagcatagcaatatctttcaaaagctgtatttgatgattttctagagcactacaaattttattaatattcccttcaaccttttcatactttgctttcatttgcgaaatcttttctgcagatttcttaaaaagacctagaaatccttttttttcttctacagattcaaaatttttaagctcacacactacatttgttaacatttccccgacttcgcctaaatcttttgttttaacgttatttaatgctgtctcagaaaaatctgcaatcttcttttgagctcctactccatattgaagaattgaatttgtattatttatatctattttatctacaaattcattaatcatcttcttctcatcttctgttaaatagctttcatcaaaaatttctttttgcttactttcttctacctttacatcagtaacttccccttcaaaaggttcaaatgttaaacttggcatcatatctatatcttccttaaatccatcattcacttttaattcctcctcttagttcaagtcctattttttgaaatcatcttttttaagcccttcttgagtaaatagtgtttcaagaacagaaatatctgtagaaatatctaatgctatttcttcaaataaatcgtctaataacttttcaaatgcattatttatggtatccaaagtcttttcaatttcattttttgcatttcttatattatcaccctgaaccggctgctcattcagttctttatatgcattaagaagctttaaagtcataggcagatagtgttttgcaaatctatcaacttcttgaagctttttaggattctgctcaacatacttaagtatttgatttataatattctggagcctatttaattttttagaaatttcttctttatctatagaactacttatgtctcctatttgtttaatgtaatcccttcccatttcaattgtattccttagttccatcttcactggatcattgaagtcttttttcagttcctcttgtttttttaattcatcttcattccttttcttcaaagattcctgtgaagtcaaataattctcataaacttcattatttaacatgaaataagtctgcttatcatcaatatgtccttgtggaaacatatttaattcaatcatttttcttaaatctttaactacaaatttattttttttcctaacagcctcagctaattcactaatggagcaatagctattacctcgtagcaatttcacatattctttaaaacgcttcgctctctttcttaaatttataccccttaaagtaaaagctccactcgccgcaagaaaagaaaacaatattcctaagctaatcaaattactcattaaaaattcactcttaaaagaaataagtattgaatatgaaattattaatattcctaatattccgcttaatatagatccaaatattgtatacaatgttcctgatatacttccaactggtctcttagcaatatatttttgtattttatcttcagattttggaacaacattcgcgatatttttatatctattttttaattcatcttttatctttttatcaaaatactgtgatttatctacaaatttatttcttgtctctctaacagtttcttgagctttatcatcaatatctttttttatcttagcaaaatctatgacatcgaatgcattttttattgtatctctaatttgcttttctaaattagaaaaatcttttttatccattcccctgcctccaaattattttattaaaacttaacttaacattaatttatttgcaacgatatattggctttattatatcttattcttgtatccattacaatttgtaacatctttatctccctttaaaattctcattctaagacataaatatccataatttttttattttgatttttatagaaatgtaaaatctgcttcgtagactatgtatttctaatacctttaaaaattgttctcagatttcattataattttccccaaaataaaaaaatcgcaggcgctagaatataaattcctaaagaataaaataagccccgcgataaattatcgtggagctctagtttcaataaaacgcaaccttaaatttttataattccattaaaattatattatatatattctaatcctctaactcatctgagaatactctttcaatgtgcatcgcaaggtatcctatctcaactgattttatttttttcttcaattccttacctagtttcatacatatgtcttcagcaatttcaaatgattttggaaatctttcactaatataatcattcatatcaagctttatcgtttctccttttaacattcttgccgccatatatttaatgtggttcataagacgattataggataatgattcgatatctattgtctttcctgtactttcttcaatggatgtaatacatgatctaactaacattgctacttgcattgcttgtgatactttttcatttcctaggcttgaatgaatatgaagtgctatatagccaatctcatcttcatttatttcaatgccttctatctctttgataatatcttttcctttacatgcaacttcatattcttctggaaataaagctttgatgtcttgtgttaatggattactaatttgttcattatctcttattctttttactgcaaatgcaatatgatctgcaagtgggcataaaatgttctcgtctacttcgtgaaatttcttctctgcttccagaataatattattcgcaatttctaaaatttgaggctctatattatttattatctctttagtcaatcctctttcagtttcttgctgcaagagatatatatgtgcattttctggagcttcaatacgttcattgacctttttaccaaaacctataccttttccgagcaagatatactctttatagttatccatatttatagcgagtacaccattatgatttagtgcttttatcactctaaacattttatgcctcctcatcccttatatattattcaaatgcatcaactgcaattaaagcttctccggcttttatatctccagtttttaatagacgcaccttttgattgctattcaatgcagtgcatatgcatggtgatgcaatagatggtgcattattttttataaattctaagtcaaagcttaatattttatctccagcttgtactttatctccctcttccacataagtttcaaaggcttttttatcaagctttactgtatctattcctatatgaataagtaattcaagtcaatcagttgttgttaatcccaatgcatgttttgatgggaatacaaaacttattactccatctgccggagctataacatttccatcacttgggacaaccacagctccatctcccattatcctgctcgcaaatacttcatctggtacttcggataaatcttttgcttcacctgttaatggactatttaaaatcactgtacttctaacttttccttgaacctttttttcaatacctttttcagtgtctttctctgattctttttttattattgcataaccagtatcttctttatctggtgctgtaactaagtaatcttctaaatttgattttataacagttactcttggcccatacattatttggactcctacgcctttgtgaaatatccccgatgctccagtttgttttaacaaaccttcattcaccaattcagagttatgtacagtgcaacgcagtctagttacacagcaatcaacatcagaaatattgttctttcctccgagacctctgcatatcatgaccgaaagttcgtctgcgttttcattttgatcatttttctttgcttctaaatcacttctagtataaagcttaacttcaccagaatcttcacgacctggagtctttaaatcaagcttcttaattaagaaggtgaacaataaatagtatactacaaaatatacgattcctacaataacaatcagtatccagcttgttttagcatttccttgtaaaataccaaataagaataaatcaataaatccacctgagaaggtcatacctacgccaacacctaacatatgcattaacatataagcaagtccagcaagcacacagtgaattccatataatactggtgctacaaatagaaatgtgaattcaattggttctgttataccagtgagcattgacgttaatgctgctgatagtaataacccacctactgcttttctcttttctggcttagcacatttatacattgctagcgctgctcctggcaaaccaaatatcataagcggaaatttacccgacataaatcttgttgcagaaacactgaaatgcgttattcctggcgttcctagttctgcaaaaaaaatattttgagcaccttcaataactttgtctcctacttgagctgtacctccaacggctgtttgccagaatggcaaataaaatacgtgatgaagcccaaaaggtattagtagccgttccatcaaaccataaacccacgtccctgcataacttgatgcaagcactatatttccaactttgtaaatggcaccttgaactggaggccaaatataaaacattaaaattccaactattaaatagacaattgaacttataataggaacaaatctagttccaccaaaaaacgataatacttgtggtaattcaattttataatacctattatgcaatgctgctgtaccaagccctacgataatcccaccgaaaacacccatttgtaatgaaattataccaagtacttcagttgatgcgccacttaaaagagcttctgttccaccatgaattttaatcatggcaccaattgatgcatgcattataagaaatgcaattcctgctgctaacgctgcaacttctctttctttcttagacatgcctattgcaacccctattgcaaatattaaaggcaaattttcaaacacaatgtttcctgcatcattcattactgaaagaagttcattgacaaatgtgccaggtccaattaaacctgtaagtccatacgtatcaagcattgttttattagtgaatgaatcacctatacctaaaaataaacctgctactggtaaaatagcaattggaagcataaaagatcttcctacacgttgcaaaacgccaaaaactttgtctttcataattcttctccttcataggattatttttgcacattatgaatgccttattatctcttttgtgtgcaaaaaaacattaaccaacataaacatcttcaataaatatttatgtatagttaatgcctacctaccagtcacatactatatcacatttttcactctagcatatctataactgcatgtcaatgttttcataaaatattatcgcgggcattttaataaaaaaataaaaggtattagtggtttaacttttcttcatatatattatataatattctcataatatattttaggaggtcagctttcttatgaataatattctaactgaagaaaatattaaaaagttaagagaagaattagattataggatgacagttaaaagagctgaaatagcaaaagaaaaattagtagctgctgctcacggagatagatcagaaaatgctgaatataaagaggcttgcagaaactatagagaaaatgataatagaatccagtatctattaactatgatttcaactgcaacggtaataaatgatgatagtatagataaatcagtactaggaattaatagcaaagctagaattaggtttgtcgaagatgatgatgaagttgttgtaacactagtaacaactatggatctcgatccagaaaatatgattataagtattgaatcagacttaggtaaagcattatccgggaataaagctggtgatattgttgaagtcaatgctccaggtgaaaaatattcagttgaaatactcgaagtattataatacctattagatattagttttaaatattcatatgatgcatattttgaatcccctagctaaattggtgattaatcaaaatctttgctaaaatataatcatataatagaaaatagtgcatataacaaagaagctttttctttgttatatgcactatttttactgatctagttatgaaaatttatattttctatttctttgtataattcttttctttaagtaaaagattaattttttcaaggcgtttagtatataaatcataatcatctagcaaaattcccatataaagcatatccacaatagctaactgcgatatgcgagaaaccattgtctcactataaaatgtagtttcttcaccaccagtaaaaaatgttatgtctgcatattcagaaatggctggtgctttaaaatttgttaatgcaatagttcttgctccagactcttttgctatttttaaagcatttacagtatctattgtgcttcctgaatgggatacaccaatggcaaggtcattacttgttagatgacttgcacagatttgctgtatattactatcagagtatgctctgcattctaatcctatacgtaaaaatttatttctaatatcactagcaacacttcccgaattccccacaccgtaaacatcaatgatatttgagcttctaatcatttctattgcctttttatatttatcaatatcaattatttttaaagtatcttccaaagcctttatagtaagtccaatcatcttcactggcacatcttctattttttcatctctatcaatgtgaagttctaccagtaatttggaatcgtactgcttatctacagattcccttccccactctttcattaatgccatcttaaattcactatatccactacaccctatactttttacaaaacgtataattgttggctcactcacccctacttgacgagaaagctctgctaaagtcattgtagaaacagaatgtccgtttaataatacataatcggctacttttttttcagatgatctcagtaaattatacatattttttattttatattcgtaagactcagtatggttcaattcatccacatcctttgttttgcagttttccttaaatatatattacactaatgtagtaaaactacaaattcaatatttcattaatactattttaagatacttcttttatattgtaaatagttttactacattatatcaattgacattgtagtaaagctacattataatatattcaaaaggaggaatacctaaataatattcaatattgtataattactacataagaatattaaatactaaataggtattatcggaaattatgataccaacaaaaaaagctgctgaaatgactatagaagaattaggagcttacattgatcagtcagttctgaagcctgaatttactttagatcaaattagaaagtatattcaaaaaggtgtagattataaatgcaaaacagtttgtgtctatccatcctcaataaatattgctaaagagttaacagctgaaactcaaactgggatatgtgttgtatgtgattttccttttggtacatcagcaacatcctcaaaaattctacaagcagaagaatgctgtaagcaaggaattgatgaacttgatatagttgcaaattgtggctggacacgaagtaatttatggcactcagtggaggctgatataaaagctgtcgttgatgtgtgtcacgattatgatattcttgtaaatgcaatttttgaaactgatgctctaactttagatcagataaaaaaatctacggaagtcgctatttcagctggtgttgattttattaagacatcaactaatttcctaacaggatttgccagcaaaggtgctaaacctgaaaccataaaaataataatggatactgcgaaggatcgatgtaaaattaaagcctcaggtgccataaagacaagagagcactttctaaaattgattgatatgggaattgatagaattgggataggatataaatctactcctgttgtcttaggtctttcataatgaaaataataaatagctcggttattattgaaactaaagctataactcatcatagaaatatataaaataggaatgtaatgaataatttatatacatattaatccatcacattcctattttaaaaccaaattatctagatttctagttgtcattaattataaggatttttacctttatttttaccaaactcactcttctgcaattttaattgatttactggaattaaaaactcaaaatcacttattatcaacttcttttacatattgccatgttaccccttcatcttttgattcatacaaagccttgcatcccccattataatctccatcagatccttgacctattaaaacattgaggatcccgtcttgctcataaggcatatctggcaaatcgaaaggattatatttttccccattatccagtgttacttttctctctggaaaacttacttttttataatatacaccgccatcctcggtgcgatataattctccattactgccaccactatgagataaacataaaaaaccaagtttatcattcaaaaaacttattccagctgccactcctgttttccctgcaaaaggatcttcatttacaattgtccatgtatttcccccatcaattgtgctcttcaaagagtacgatctgcttccagctgcagctccagtcacttctagcctataaccaacttgatcagacatataaaattcatcctgattatttgatttttgagaaatacttttatctttgtcttcttttaaaggtgtatgcgtcttaatgttatttaaatcttctgttaaaatatatctatacggagtatatattttttctttaccaggtacgaatactgaaacagcataacctattatctctgaagaggcctttgaagctgcttttgtgctcccttctggattaatataagtaattccatcagtattatatccaaaacttcggttaccgtaataaataatcccatatttattttcattccatttgctcactgtatccttaagtgggatagccttcatggtacttagcaatggctctaacaatttatcttcattataatcagcatctacctgcccatttaaatatattgttattttatctgatttgtcattattataacttatcaaataactttctaacttacccttattatcttttccataaagatatgtatcaaaagacgtgattgttccatccgaattaaaattaaaattaaagttacttgaaacatacaatttatctggcatatgaatttctttattaatgtctgcgaaaataccttctattccattttcatatatattgttatgttcaaactttactgtctttttgttttttaaatcacttaaaaaccacgaaagttttccgttatagcttattgtatcattatatatttttgctccgtaaaataatgttgcagtagctataactatcatagctatataaatccatatagttttataatttgatttaaaaatctttccctcattcaagctcttctttattacgcctatttcttcatctgttctatctatcatacttaaaactaatatgtctctgtttctaagtgttataacaacatattttctatttattctaaatgactttatatctcgaaaatctatctctagtccatcttcttgtaaaacttttatattgctttcattaaacttatatttttctataatctgttgcggcacacttataggcttttttacactttttattattacatatgtaagccacactaaaatgaatgttatacatccaaacaatataatagtattattatgaaatcttccaaacctagaaagcgtatataactcataaagcgaaatacaatatataaatacaaatattaggttagacatcattgataaaaatatacttcttcttataatctgcctgtattttttcattttaacctccttgcttttttattagtatatataaattatacagcaaattcccaattatttgtattgttctactttttatatctaatttacaactgaaatggtccatataaaatctaattattatttagatttatgggcattatcactcactcccatattaatctacatatgaaaaattaaaaatgaccaatgattcatatttaagaatcattggtcatttttattatacacctattaataatgctcttttactttttacttttcgcttatactcatacatacgtctatcagctctctttattaattcatcaaattcaattccttctcttgggaagttagcaataccatagctataactacaaacaattttgtttccttcaaatactagtgggcaatctttaaactttctaatcagttcttcaagcttattagttaaacttactaaatctgaattcaaaaagattcctacaaattcatctccaccaaatcttcctataatatcgccctctccagccaaagcatttaagccttttgaaaattccttaattaattcgtccccagccaagtggccatggttatcattaacaagctttaaatcatttaagtcaaaaactacaaggaaaaattcttctatattcatatcttcattataaatttcactgtgaattaattgttcaaaccacgttctgttacatacattagttaatttatcatatctagataaatataaagttctctcatgaagtttatgattagtaattgcaaccgaaacttgatttctcatgtattccattaattccaaatcgccttcattaaaacaattattgtagatactatcaatattcaaaaatccatataattcaccatctataataataggtgaactaataatagattttattttcattccctctgccgtatctagcatttttatattttctattctatgaatatcattgaaaatagttgttgtatctaccttatttctctcattagcccatgcaaagtgctcttcgtactttaattcaaatgttttaatatcctctaagttatagcctttagccacagctatttttaaacttttgtctttatctaaaagcagcaccgatccacaacttctgctatctatacaattaatgacttcgtccaatattaattgcagtaaattattaatattagatatctcgttaatcgagtaccctattttcagcatagactcttttaattttaataatttacttatcttttccttgctctttttttgttcagtagtgtctattataacgccaactaatcctttaacatcatcatcttcatttacaacaactgatttattaaagattacatcatgatatgtgccatctttatgtgtaagcctttcttcataggcttgggattgcttttgactcattatattcttatctgaattactataaatctccgctagttccttttcgaaaatattataaacggtacttcccaaaaattcttctttactcattcctaaaaattctgtaaatgctgcattacaatgattatataatccaaattcatccttagaatatataggattaggaatagcatcaataagtgtttgaagaaatttcgcattatcatatactttttttctttgcacttcaatctcagtaatatctgttaaaattagtattttaccaactatcttaccattattctcagatatattattaatatttatcttataatattttagctgttcttcataacttatactaatcaagctttcattactggaaccattctttataacatttaataatgttttatatttcctaaatacttcatcaatcttatgctctcctttacctaggtctcttaactctaaaataatattttttgctgaatcattaaaattcactatattattttcagaatccaatattataacaccttctagcatactggaaaataccttgtttaacgctattggggtaagctccaaaaatttgaattttaatatagcaaaactataaattattcccgaaaaagaaagcgtaaatggagataaatcaagagtaaatggtaacagcttcaatatataaatgatattcgccccccatggaattacccatgcaactattataagtaaaatttgttttctaataattgcagctgattttaaatatgctgctaccaaaaacactaaccctgcaatcattagaatgtatgtataagcaatatgtatccaataccaaggcccttctattatctttgctattggaaaaactccagtatcattcatatatagttctttatagaatagatgatgaaaatcattcgtacaattcagaataaatgtaattgaaggtattatatatagtaatgctaaagtattctttttaaatttatctttatatcctgtaaagttaagtgcaagcattaaccaaaacacagctataaatggaatacctaagtattctatttttatccagaattctactccttcgatgcttgtacataatatttcaaatccatatcctaatgcataaattgatacaggaatcaaagacattgaaacatatgatttatctcttttccatgaagaatatcctatatacattaatgttagcgcagataataatagtatcaagcaaaaaaaaatgtttagcttcaaaaacatcacctcatacactccattatactaaatatatcttgtaatattctacaattttatatttaaaataaaacataatgccacctaattctaaaattatggcatatatgtcattataaacgtgttaccaaattgacactggattattacgtctcccaaaataatccattctcagaatttcataaattcagtaacgactttgaatcttatactaatttagacttttgtgattataagtttaattataaaacacattaaatataaatctaatgtggtatataaataagaatgatatcagtataggaaatactgatctttatatttcttgtaatattaaactaaagttataaaacacaaatatccaatctctaaaatatcatctccaaaaccatccctaatgaattctatcatagcatcagtattattacctattattcttgaaaaagctacagtgtaattctttatgtcttcctcatctattttattttccatgcaatattttaagaataaggaataccttaacaataaatactctaatataatcatttggaatgaaataatcatctcttctatatcatcactgatacaattgctaaaaattttagatataatgcaattttcaacaaagtcgttatatcgctcgaacaaacttttataatcattccatttagatgaaagttttttaattttagcattttccgcgaaattagcaatatcttttaaaagaatattaaaaatagaaacttccttgtaattctctatgatatctaaaaatagattattgacttcctcaactgagtcatttgtgtttatctttattcccttatacatgtcaataagctcttttacataattactattcttatacttttctaattcttttaataaggcatgttctccaagattctcattttctaaaatagtcgatagcatttgaaagctaataataagcttattttctagcaagaaattttcttgctgcattatgtttatgatggtttctctaactttaatttctaacgcattactttctaaattattatgactttctgaagtcatatttattttgccagtctcactacctataagctctaatacttctggacatgaacatgataatgaaagctctattctatcctcaaaaatattctctattctaggaaacatttggcatgttaaagataaataattttccccatgatcttttactatattgcataatccatggctgtctaaaagcggacatgcttcatttgttttcttatttataaaatactcatctttaccttcatatctttttatttttacattatttaaaatgttattagatttatcttttttccaattcttatatgtattgtcatctacactaatatcccatccttcacaacatgtgaatttacacttatcagctgtgcacttaaacttatcatagtttgaaatttttaaggtatctattttattcatatatatctccagttttttataatattaacttaacattaaccattatagtttaattccttatccttagtatactgtttatataaaatattaacatttatttctcactttaaactatttcctttaaatataacgcttttataaataagatgctcttactttaccctgaaataaaactctaaaaatataatataaaaaatccccttcactattatatcctcatgtataatagtgaagaggttaattttttaataattattgttctattaactgctgacaaagtacatttcacactaatttcctgaatttgcagttgtcccacctgccgatgactttgtatccacatttttagtagttccatctgtagaagttttctgatctgtattcccatttgttccacttgttgatgcctttgcatccgtattttcacttgatgttcctgatggcgactttaagtttgtgcttccatttgttccaccaattgttggtgcttttgtatctgtattattttggctatttgcatctgttgatgtttttatatctgaatttcccgatgctccacctgcttgtgtctttgcatctagtgttccagtatctccattttgtgatgtttttgcgcctgaatctttatttgcttcattacctgaaacttttactggagaatttttactttttccatttgtcggcgttttttcatttgcatttttagtctgttcgccttctgactgcgattcactcgttgattgcttctgaacttcagttttttcatctgaagtttttgcattagtggacatctcctgaaaatataatgcgcctaatcctccaatgcttataatcaaaatgagcgatataatggctattagcgcctttctattgttatatgagtttttatctctaccaaatctcgtactattttctttaccacctattttcttagcagtttgtcctttatttactgtagatctgcgccctctattagaagttgaagctttatcatccttcgttatattacaaagtaaattctttatatttttaggcatgttaagtaatgaggatattattcctccttgctcaattgattgtatctctttaaaattttcaggtgatctaattgttacaacaggctttttatattctccatacttactttccacatacaatgtagctgaaaattcatcatctttacttaagaaaggtatatatacatctaaaatgttatcttctattgaagaatcaaatttcaaacctttcgttatttgagcatctccaattttcaaatcattttgtaacccttgtatatttaaggttaacttatgaattgttttatttgatatgtttcttaccgtaagaacatatgcacatatttttttgttgtttaattctagtggtacaccttctcctatattgcataatattttaggagccagatttttataatactctaacagtaatccagatataaatgatattattatagttataattgcagtttcgataacacttatcatagtaattttcgcttccttgtttttaaaaattgtgtaactaaattatagagtagagggatattcatgtcaaacttgaaaattaattataatttctccaataattcatatatagcagtacagattaatctataaatccatttaaattactattcataaatattctacatatgctatatttatgtttattattgactttttgttattattaataaagtgcttttacttttatttatcttctctaatatctatgctatttgttttagtagttcgttttcaaaattactgtttgtaaaaaaagatattgcaataaaaactctactgcaatatcttttgatatatactattttgcaaaaagtattaattcttaattcttacaaaataaaggaaaactgctatatttattttgtaaaagcctaacaattggtacaccaactattgtaacaacaacaaactcgccaattgcaacttccccaattgatagtacaagtggaaattgataaatatagttaagcatccatccaattattactccattaaaaatagtaggccaaagcgatgctattattaatgatgttttcttattctttacaaacctttctgtaattgacacagcataaacactaataaatgttgctaaagtaccaaatattatatctgctaaaccattaggtccaagaatatttgctataaaacatccaagagtaagacctacaatataaaacggatcaaaaaatgctaatagtaccattatctctgagactctaaattgtataggaccatagcttattggtgctagaacaagtgttataactgcgtaaagtgcggctatgatagctgttttaactagccttttcactgtattattattattcatataaactcctccattttactaatgatatttttaaaggtaacctgcttaatcaaccttccccataatttccgtactctcaaagaacaaaatctccacaaattttgtttcaatatagattcctagaaaataaaaaaatcgcaggaaaaatcctacgataaatatactcaacaaaaataaaagattccattaacacaaattaatttaatctttattattatcaattatttaaccgtagttttattttaagtcaggaggctttcgaactgactatatgttattttttactcttatgattatatcaaatagatgaactcaccacaagctatgcattagctttccactatatattctatattaatttattagatttattctaagtaaattaatatgaactttcaacaaaatctatattttatatttctatgattttaataagaaacataata

SEQ ID NO: 78 - DNA, 29230 bp, Clostridium beijerinckii
atgtaaacttattatggaaatatatattttataaaagcctatgttagatttagtataaatccgacataggttaaatttaataatgaaatagaagttaattttaggaaaaagaaaacacaaaaaggttgattaaaatttattatattccttggcgataaatagatggattcttattcattttctttttaaagcaggagctaaaataatattgatttacataaccaaccttttcgctaatttcttttaaagatagatttgtattttctaagagtttgcaagcattttctattcgtatatttgttataatagcacttatgttttcaccaatttgctttttgaataatgcacttaaatatgctggactaacatttacatataaagcaatttcgtttaaggataaatcttttttactataattatcttgaatatatgtaattacgttgttacaaagatattcatgctgattttttattgattcatcaagtctattacaaataatcttgaaaatatcaaaaagccaattaattatttcggaactgttacaaattgtacttaagttactgtatgtatttactataatattttcaatatcattagtatttatagacatgttatataatagttttagcacattacttaaaatggaatatatattgttaaatattaaatacttattgttacaatttattagaatttcttcataaaaatcttgtatccagttttttatggagtttaaatcttttttataaataagttgaattagcttatcttctttggcataaagataaacactattatttacattattttttctaacaatatcatgaatatcaaatatgtttttttgaggaaagaaaaaattatattcaagtgctttacatgaattatcataagaaattttcatgttccaaaaagaatcaataacgcttcctatgcctatatttaattcaaatatatcacttttataatgttccatgaatgaattaagtatatcgtgaactttattcagcaagtaatttccatttgggtaatttccaccaataattgtaattatatcgtcccgttcgattaaaagatgatataattgaaacttagaaaaagcagatttaatatgatcacctaagtctattaatgaaatatgatatttttcaattcctaaatcattttttaatgttttagagtttgttattttaaaatttaatgtcaaaaaatattttgaatttaaatctatatttaagtaatccggatatttagaaagattgtattttgcttcatcagtgtttaaatgtattaattctgaaaaaaacttacttatcattaatgggcgactttcatttaagattttacgattccttttttctttctctaattggacgaatgcattattaataattgtgctgagataattataatcaataggtttttctatgtaatcatagaccccaactctgatagcctctcttgcgtattcaaatttatcaaatgcgcttataagtataatctttatattaggattaaattttaatatttgctttgacatctctagtccagatattataggcatttctatatctgatattattaaatcaatattagcagatttaacagcatcaataacagattgtgaatcataaaacatatatgctacttctgaatttaaagatttccagtctatatttttataaataccttcaacagataaatgattatcatctactataattacttttctcaaaaatacgtctccttacatatatattttaaataatttgatttaatatcatttgaattttggtgccactgtctagatcactagtaatttttatatgttctttagatatctttgaagaagctaacctagcatttacattacttaaccctagatatttattatcgacaccattattttttaggatagattgtatgtcaataagcttgtcagtattaataccaatgccattgtctttaatggtaattaaaatataattttcataataaacgatagatatatctatactgattttatttttacattgtccaattccatgcttaatgcaattttcaataagtggctgaagtgtaagttttggaattagaaagttttcgataccttcatccaaataaaaattccaagctatatttccatctttgcatatgctctccattgataaatataatttagaaatttctagttcttctttaattggtattaaattttcagaggtacgaagtacgtatcgatagaactttgataagtctataataatttgatttgcaatatcaaatttgcctatggagttacatatgtgaatagaatccagtatattatataaaaaatgaggattgatttgtgtttgtagtaaatcataattcaatttttctttttttattgataaatctaagatggtattgaaattattatttattgtatttatcatatcttgaaaaattaatgctatataatcaatatcgtcacaatgtacggagttaggatctatcaattcattaagattgtcaatttgtatgctattattattaagcttagcagattttattattgtggatagtttattaagcctttttgtcagttcttttccaagagagatagcaataaatatgaatacaggagttagcagtaaaatagagaagaaaattaacttaataagcggaaaagtgttatataatatatatttttgaggaatatcagtaacaatataccacttattcactagttttgaagatagaatttctgaatccttatatgaagataaaccattgtgaagatcattttgtttaataattgaaagtttttcattatctaaagtactgcctaccttacttttatcagagtgagctacaacaactccatcatcatcaataatataattagatattgaattatctacagtagaattttttagtatatctgaaaattcatctgatttaatacttacaaaatatgcgtacaataaagaatcatttttattgtatttaacgctcctatagcaaaatatagaatccactcctaagttagtattagaaatcatataagggaagacttgttttggtctaaaaacccattttggagatatacctaaatttatcaattcgttttcagaaaccccatatttctcaattgcctttagactgttaaaatttagcttattattgcttataattaaacttggatctacaaaagcatttatataaaatatattaaaattattttttaatacatctatattattagaagtattgttaaaagtatttaaataatttgatagaggaaagacaggagtattatttaaagaatacaaataaaattgaatggaatcagcaacatgctcaatttgcattatacgattattaatatcaacttttaactgattatttataaggagattactattaattatcttatctcttgctatttttacggatgtattataagaaattaagccaatagctagaagaggaatggtagtacaaagtataaaacacactattattttattttgaaaattagaaagatatttttttataaatttatttacagactttaatttataaataataatcatcaagtatccctctcctttggctgtgtaatattttaacattaatgttattatagataataactatgtacattacaatatttataaattgtaaaaatcaaaaacaaaaaatattataaattataagaaaaataatatatttaaatttactattggatttaataaaatgaatatgaaatttaactgaaaacgttatatatttaagggggaaagtttatgaaattaactaaaatcatgtgtttattgacttcgacagttatggcagtaacattttttacagggtgtggaagcacaaaaccatcaagtgctgaaacttcagcaaataaaactgaaaaaataacattaatgacagttgatacaacttttaatgagggttttcaaaagtatattgaaaaagcagaaaaggctacaggaataaaaatagatactattgcttgcccaactaatacagacgatagacaagccaaaattacaactatactttcatcaaaagattctagtgtagatgttataacaatcaatgatgaaatgatcagtgcatttaaaaatactggcttcttagaacctctacaaaatactgttatgaaaaatgatgtagtatcgcaatttcctaaagattatataaaagatttaatacaagtaggagacaatatatattccgtacctatgtatatggagatactaggcttttgggttgatcagtcaaaagtaaaagcacttggtttagatgcaataaaaacaaaagaagattttgaaaagtatgttaaggcctacagcaaagatgggaagtatggatatggtggtgcatgggaaaaaacttatgtatttaatgaaatcggaacttttgtaaatttgtttggtggagactattatgattggacaaaccctaaaacaaaagaagcagttaaattcatgcatgatatggctaaaaatggcgaaactcctatagctcaattggctgatcaatatgatccaatgatgcaaaaattctttgatgacgactatgcatcaatatttatgtatacaggtgctatgaagaattttgttaattctggtagatatggtgaaaacggaataactttagcgccaatgcctacttttgaaaaaaatagtgcttatatagcttgctggaattatgtattaaattcagcatcagaaaataaggaagctgcaattaaattcttgaattatgcagcaagcccacaaggagaaaaggactattatgagatgacttcaaggttgcctgcaaggtctgatgtaataaatgattcaaactttaaaatagaagggcttagtgcaattaaggggtatttacaaaatactgagcttcacggacgcccaatggcacctcaagctatggaatttataagttctatgggatcattattccaaagatatgtctctgatgaaatatctctagatgagttctgccaaaaggcacaagtagaagtaaataaatatgctaaaaaataattaagtctaaatattaaaaaattcatgcctaaattaaatagtagtagcattaagagttgttagtttatttaggtatgagttaattatagaaatacgttataatcttattttttaacaaaggagtttatagtaatagaaaattcaaattattatagcaattatcaaagattggaggagaatatgagtaataaacgtaataagatatggatagcctggatgttagtagcacctgtattaatactaagaggtttcacaacaatatatccaatattcactacctttaagaatagtttttttgatatgagcttactaagaggtggagaagcgaaatttattggtactcagaacttcatacaaatgtttactgatgaaaaactagctacatcaatagaattcactgttatatttacagtagtttctatgatattacacgttgtattaggtgtaggactagcattaatgttaaatataaaatttagaggtagaaagtttttaagaacaattgtcttaataccatgggcaatgccaatggttgttgcaggccttgctgcaagatgggcttttaatgatacttatggtcttataaatgatttagtaaggcgaatattacctagttttcactacgattggttaattaatgaattatctgcaaggatagcggtaatttcagttgatttatggaaggatgtccctttctttgcgatactagtattagcagcattgcagtttataccatcagatctttatgaagcagctaaaatagacggagcaggaataattaaatcatttttttcaattacattgccaggaataaaaaacacagtattaacactatgtatcttttttacaatgtggaggctcactagttttgatgttgtgtattcaatgacatcaggaggaccgggagactcaacaacattactatcttatagaataatgacagaagcatttacaaatttaaatttaggatatgcatcatcactagcagtagttttatttgcggcaatggtagttttaacattaattgatgttaaatatataaagaaaataaataaataggggtgataattatgaattttaaaattaataagactgtaccttttgttgtaaaatgggggttaactgttattatgtctgctgctatattaatacctctatattggatttttatatcatccattaaaccgtcaaatgaattatttacagcacctataaaatatattccaactaatattacctttgaaaattataaaaagttattttttgagttaaagctaggagaaaaagctttaaatacattatttataactacagctgcattaataatatctactattatttgcttagtaggagcttattcattttcaaaatataagagtagaggtttaaaaatagcttatggagctatagtatcttcagctttaataccaggaatagtaactgcaagaccattatacgattttatgaacaaattcaatttggtggatacttttttagggttaataatattatatacaagcgcattaataccattcacaattctaatattgaataatttcttaaatgaaataccgacatcaatatacgaagcagcagaagtagatggatgcagagctatacaaaaaatgttttatgtgacactacctttaatgaagccagctatagcaaccataagcataattaattttattacatgtttaaatgacttatttacaccattgttttttgcaagaaaaatagaagtattaagtgttggaataactacaatacctaaagaaacaacttatagcatgccttgggatctaattagcacaatgggatggataatacttataccaataatattatttgtattattatttgaaaagcaaattatggatggtataatggctggcggtgtaaaagaataattgattagagaggagagtttattatatgagtaattatttatttgcaaatggacttactagtttatcagtgctaaaaaatgcacgttctcgtgctatcaatgcagaaaatccaaatggagaaaaaggtaaaggaggaatggctgcaagttatttaggaccttcaagaaaaggaagcccttgtttaagagatatagagccaggaaaaacggtgacattagctgaagtagatggaccagggattataactcatatatggattacggttgataataaaacaactgatgcagattgtaatgttttaagagatttagttttaagaatgtattgggatgaagaagaagcaccttcagtggaaagtcctcttggagatttcttttgctgtggcttttcaagagagtgtattgtaaattcaatgccaatagtagtagttccatctagaggaatgaatagttattttcaaatgccatttcataaaaaagctaaaattacactagagaatcaacatgataatactataccagcatttttctatcaaatagattactgcttgtatgatgaattaccagaagatattgcttattttcatgctcaatggagacgtgagcgtataacagaattacagaaagactatgtaattattgacaatataaaaggaaaagggcattatgtaggaacatatatagcattgacaacattagaaagatattggtggggagaaggagaagttaaattttatatagatggcgataaagaatatcctacaatttgtggaacaggaatggaggattatttcggaggttcttggagctttgcatcacaggttgatggcaagacagtagaaaatacttattgtacgccgtttcttggatatccatattattcagcaaatgatgatttaatacacaatccatatcataataatgattgtccaccgatgcgaggattctatcgttggcatataccagatccaattcattttcaagatgatttaaaagttacagtgcaacaaataggagtatgttacaaaggattatttgaacgacaagatgatcttgcatcagttgcatattggtatcaatcagagccacacaataaatttgaaaaattaatggataaaaaacaacgttggccaagataaataaaaaaattagaaaagattagattgatgttagaattttaaatatataaagaggggggattattatgaaatatggtgcgattgaagcaggtggaacaaaatttgtttgtgcagtaagcaatgaaaatcttgaaattatagaaagagtcagcataccaacgacaacacctgatgaaacaatgaaatctgtatttgagttttttgacaaatataatttagaagctataggtatagggtcatttgggcctattgatgtgaatagaaaatcaaaaacttacggatatataacaaccacaccaaaattagcttgggcgaactataattttgttggaattataaaagatagatataatattccaattggctggacgacagatgtaaatgcagcggcactcggagagttaaaaaagggtgcagcatttgggttacagagttgtgtttatttaactgtaggaactggaatcggaggaggtgcagtgataaatggtcagctcttagaaggatatggtcatccggaaatggggcatattttagttcgcatgcataataatgataaatatgaaggtgcatgtccttatcattcaaattgcttagaaggaattgcatcaggccctgctatagaagagcgatgggggaaaaaagcatatgaattagaagagaataaagaagtatggaaaatagaagctttttatcttgcacaagcagtaatgacatatacgttaatattaagtccagaacgtattgttctgggtggtggagtaatgaagcaacgtcaattatttccacttataagaaaagaagtagaacaattaatgaaaaagtatgttgcaatgccgaacttggacgaatatattgtacctccagctcttggagataattccgcaattatgggatgtttgcttttagctcaaaagacaaatgagaatgtatagattagattttttagagttttttgaaataagagtattaatcttctatagaaagtgttctttaaaacttcagtaacttaacttgaaagaaaataatctgctgaattaaagtcagcagactattttttttagggggttaaggttctattgattgtgggaatctgaaaacattgtcatggtcataaatcttttttattattctaagggttccataattttcaccatagtattcatagccataatatttaagcccagcataagggaagtttacataagagccattagttatggtttccacatatttaaaaacttgtgatacccagtttttaaatatattgccatcttcatattcttcccaatctgctgttattcctataatatagctggcatctctatagtaataagctgaataatcactggagaaatcttttatcttaccgcctaaagtataaagtcttataaaacaatcatctccagggctacaatctatatacttaattaagtttctgatatttgttttacttagatgacaataaacaaatcttccagtagctttaaatctatcaggaggcccataaaaagaaccaatggctttaacagcatctataaaaggtacatattctattaaagagttatctagtaaacctgggagcagcaaaaactcttttaaaatcttttcagcttcagacttaggtccatagaagaatccatttaaatatatgccttttttacttaaaccagcaaaacagctaatccttttatcagcagttcttagccaacattgccataggttaataaattttcccctggaaatattattccatctaagctgtataagagtaatataatttaccttatgaagtctaaaagtatagctagttacaactccaaagtttccaccacctgctcctcgacaggcccagaataaatcacggtgtatatgattattggcagttattagatcacctttggcattaaccaattgcagctctataaggttgtccgatactaagccaaagtttctacaggataaacctattcctccacctaataccaagccagaaattccaactgtaggacatgttccgccattaaaggcataccctttttcggcagttattgagtatatatttccaagtcttgccccagcttgaatttttacagtatcatttttagtattaacttcaatcttgtccataggagtcgtatctattactattacgccattatctgttgaatagccttcataattatgcttccctgtacgaatgcgaagtcctacatgatgttttctgcaccatttaatagcgttggatacatctgttggtgtataacaataaacgatagctaatggaaatttattaatagatagattatactcaagtctcaaagttggatactctttatctgagggagttattacccttcctgttaatccatttaatctcattttctttctcctttgttaaaatacatttttctttattttatgttgcgagtatcatagaagtgatatggagaaactcaaaaaataccagttatcatcattattttgtataagaagaaagttaatgacaattctatgaatataagaatttgtatatgataatgaataagcttaagattctaaataaaatataaaattgataataggttgagttgaaaagataatatattttgaaattgaatttgtacattttttttattgagcatttggtttaccaaaattttagatgtaagtttattactgcaatatatatgtgcataaatgatacagaaatatttaagaattaactatattgtttttgaacatgatattattttctataattgaaattttactaggaggacttaaaatgagtaaaataaatgtattagatatatctttcgatttttcaggacaaagtgatgctatacatccagttatattggaagatgagaatgaaatgatattaattgactgtggatatccaaattttttgagcttaatagaagaagctgcattagctaaaaatattaatgtaaaggatttatctaaaataattattacacatcatgattatgaccatatgggagctttagcagaatttaaaagaaaatatcctaaagtaaaagtattagcatcagaagaagatgctccatatattgatggaagtaaaaaatcattaagattacaacaagctgaaaatatatatgattcattatcagaaaatgagaaagtagaagcagatcattttcataaaatgcttcaatctatagaaagttgtaacgttgatataaagttaaaagatagggattatttcgattgttgtggaggaattggaatcctagctacacctgggcacatgcctggacatatatccatttatcataaagaaagtaaatcattaataacaggagatgccttagttgtagaaaacggagaacttgttattgcagtacctcaatataccctagatatgaaagaagcccaaaattctgttaaaaagtttttggattatgatattgaaagaattatatgctatcatggtggaatatttgagaatgaaatcagtgatgctcttaaaagagttttttaagttaggcaatttttattattttttcaatccaaacataaatcttacttttaaaatgcgcacttgtaagtgaattaaagtaaaactataattaattatattacggataggtattaattcccatggattaaagaaatggttttagcctataaattaaagtatatctggaggtaacatggcaagaaaatataatttatatcaagttgattcatttacaaaggagaaatttacaggaaatccagcaggggtaatatcaaatgcagatggattaactgattatgaaatgcagaaaattgctagagagcttaacaattctgagacagcatttattttctcttcaaatagtagtgagtatgatgttcaagtacgcttttttacacctataagcgaggttcctatttgtggacatgccactattgcagctcattatgtacgtgctatcgaaaatgaactggaaacttcaaggatttatcataagacaggagcaggaattttacctgttgatataataaaagaaaataatgattacaaaattattatgacacagggaaaaattgagtttggtgaaattattgatggtataaataaagaagaacttttaaaagcacttaaaattaaagaaagtgatttacttgatgattataaaattcagatagtgtcaacaggtcattctaaagttatgataggtattaaaagtattgaaaccttaaatacattgcagccagattatagtgcactttctaagttaagcgagatcattaaatgtaatggatattatatttttactactgattcaaaagaaagtgatattttaatacatggaagaatgtttgcaccttcaataggtatcaatgaagatcctgttaccggtaatgcaaatggtccattaggtgcatatcttgttcattacaatcttgttaagcataataattctttatttagatttaaagctaagcaaggagaggctataaataggcctggtataatcgaagttgaagtaaagatagaagacaatgaaccaatagagaccaaagtttcaggaaacgccgttataatatttaaatcagaattattattaaatgattaaaaaagtttattctataataatcaaattttatggcagagtcatttatacaaaaatattattaataaattatataagcagtctaacaaagaatctgcaagctgagaacatagctaaatgatcaattcaaagtaggcaatgataattttaaaagaatttaattaattggatattatgtggagctattgaaagagctgttatcgaagttcattatagatggaggaattatatgaaaattggtaagttcgttaaagctaacaatttaactattgatactgtgcgtcattatataaatatgactttgataatacctgaaaaacatggagggcaatataactttgatgatagatgccaaagtgatttggaagatatactattacttaaaggaatgggattttcattaagtgaaattaaatcaattttcatgtttaaaagattggcaaaacttacaaagtatgaggagaatgaatgttttaaatcatttttcgtaaacaaagataaagagataggaaacaaaataagagaacttaatttaatgaagcaaaagcttaaaacaaaactagagttgctttcaaatgtagaaattaaagataaatccgttataggtatagatttaaaggctcttgatcttttgagatgttttaaatgtaaaaaggatttaaagcttcgtgaaggaaatatagcaaataaccaagttataaatgggaaattgatttgctcttgtggagaggaatacataattaaagatggagtattgagagtttctaatataaaaatagattctgattttaagtttgactttaattacatcacagattatataaattctactgatacaacctatcttgataatgtctatcgtggaatggattggatttataaaaagattgattttgaaaatttgcaaaacaaagttttgcttgaattaggttcaggaattggattttttctaagaaatgtttataaaaatctacctgatgattcaatatacattgctgttgataatgatataaataagcatttatttttaaaaaatatattagagagtataaattgtaagaaaaagatattatttatttgttctgattttgagcaaatccctataaaagataaatctattgatatgcttttagacatttcaggtacaagcaattacagctttgatcatgaagagtttttattggagctagctgatagatatgtaaaggatagttcaaatataatagggacgtatattttatttaaaaattttgcatcaaactgtttaattgaagataaatatcggaaaaattttattttaaacaatgttaaagaacagatttcaaaacttgactataatatttttgaggaaaatgtatcaaactatatagaaaaaggtggaaaatatgagagctattttagagatggagaaaaagtatattcatatttaatctttggtaaaaggtagggttaaccctatcttttatttattttatcataaaattttgttaattaacctattgatatggtgataagaccactatttaaaattaaattaaattttaaaaaagtaaattatcattaagggaaagtgagattaacaatgttaataaaagttctatcactaaaaaaattttcgaggaataaagagttattaaatataggtttattttcaattgcaaactttatatctgtatttggaacatctatatataattttgctattagcttgtatgtattaaaaattactggttcaggtctaaattttgctatgactttagtaataggagcattatctactgttcttgtaaatccatttgctggagtgcttgctgataaaattaataagaaactactcacagtaattacagatgctttaaatggtatgctattgcttgttctatacatcctaaccattgaacatcctttgagtttatctatgatttatttaagtacctttatattgaatgtattttctaatatatatgggataagtattgaaactgcaaaaccaaatctagtatcagaaaaaaagctacttcagataaattctattagtaaaataattgaatcttcatcttccatacttgggccaatgattggtgggatgattttcgctttattagatataaggcttttcataataatcaatagtttttcttttgggatgtccgcatttcttcagttatttatggattttctatttaatcacagcaatgaagaaaaagatggagaaaaatttaatatttttactgatataacttatggagtaacttatttaagaagtaaaaaagacatagtgaatatgcttggaatatttattgctttaaatttctttatcggtctttcaataaatgtaccaatgccctatatagtaaataatattttaaaattgagttctaatttgtttgggataatacaagcttttttctcaataggaatgattgttggagcgcttacaataagaaaagctctgaataaattctcacatcagaaaatcgtaaaagtaatgactaatatattatcaatttgcatgatagcaataggcttttctgttataattcagtataaaatctatgataataataacctctatgtaatatatttttgctcaataatgttattagcaggcatatccatatcagtaattgatatagctatattttatgaattgcaacaaactattccgaatgccattagggggagagtacttagtataggaatcagcatagcaaaaataactttacctattgcactaattatagcaggtagtttaataaatcttataccagcatatattttgcctataataagcggtgtagggctttggatttttactatgctatatgttagaaatgactaattttatgtgataagaaaatgatattaaatttatccgagattatgatgaggataaatggagattagcagcaagaacgataactatattattatatttaaagattacgactgagttattcaaacaagaatacaaagatgcaaattttctaaaggattctataaagatatcctttagaaattgaataatagaattttataaaatatgctataattaagttacataaaatggctgattagttaattatagtattagtgtattcaaataaataaattaattatgtagagaggaaattctaaaatgtatattgggtgtaactggtcaaaagcactaaaatttcttatagaggagaacttgataagagtagactatattaaatcatttggatatggaaattttaaagaagacttcaaaactatgcgttcaatgcgaccaattttagtacatggtttaggctattatgaaaacacaggaatgaatgatatagagaggattgattttaattctgcgaatagtatcataaggaaatgtaattcaccacattatggtcttcatcttgctataagatctaaggatatgttaacaggtatgacagaagatgacatatataaacgcatgtctaatcaaattcagttctttaaaaagagtttatcagttccattattacttgaaaattctcctgatacaccacatgaccgtaaagtatttgacctttatccttatgtaatgccagaacagatttataatctagttgttgaaaatgatgtatctttcttgcttgatataacccatgcaaggattacagcaaaatatcgaggatgggatgtttatgagtatattggaaggttaccacttgatcatgttgtagaaattcatacaaatggttcaggtcatgatgaaaatggttttccaatggatacacatcaggccatggaagaagaggactacgaattgttagagtgggttcttgatcgtacaaatccgaaaatagttacattggaatttaatgaagtagaaacagaggattataacaaaatcatttattcattagaaaaacaattaaatcgaatatatgatatatgcagtacgagataagtaaaattaataaataagaataaaagtataagaggtgtaagaataattatttcaaaccaaaggaacgaggctttaaatgagtaaaaatgtatacgatgatttatggatagatattttgaaaaataatgggattttccttagtgaaaaaaacataactttattaaagaagatttttaagccaaagctattaaaaaaagatatgttctttttacaggaaggtgagaagtctactgaaataggagtcgttgttaagggagtttttcgttcttattatactgataaagcaggcaaagatacaacaaaatatttttacaaagagggtggggtactattctcatatgtagcacatctatctcaaaaggaatctatgtattatatacaagcattagaagatagcgaaattattgtagctcaaatttctgattttgaaaaaatagttgaggaaaactatgagctacttttgttttacaaaaagatgattgataatgttcttattatgaaagaagagcatgcaattagttttaaagtattagatagcattgaacgttataagcagttcctcaatgcatatccaggattagaaaagcgtattaaacaatataatattgcttcttatttaggaatgacccctgtgtcacttagtagattaagaaaagatttaaatattaacaaatgataatgcagctaacctccatgtgatttatgatgtatataaattttattaatgggggtaatttatatgaaaaatgagacagttgttttaattacaggatgctcaacggggataggacgagaactttgcagcatattatctgagagaggatatatagttgtggcaacagctagaaatgtagaaactttaaaagatttacctgtatcattaaagctatcactagatgttacccaaaaagaatctatttcagttgcgatggaggaagtgatagcacgatttaagaaaattgatatccttgtaaataatgcaggatactcaactagaggtgctttagaagaaatcgatgtaagaagtgcaaaaagcatgtttgacgtgaatgtatttgggataattaatatgattcaggtagttgttccggaaatgcgtaagaaacaatttggcaaaattataaatatcggttcaatttcggggaaatttgttcaacctattaatggtgcatattgtgcatctaaatatgcagttgaggcaataagtgatgcattgcgtttagaattgcacaacaataatattcaagcaactgtaatagaacctggaccaataaaaacaaatttttttaaaactatggctaataattcaaataatcttatgactaatcaagattcttattattcaactttttatgaagcagatgctaaatatcgaaatgatcaaaatttaactaatcttaaagaagcagcgaaaactattgttaatataatttcgaaaaggagacttaaacctcgttataaggttgctgttccgcttgcatataatatagctatacactttcctgactttgtaagagaatactttatgaaaaagcgctagattaatgaataattataatttatagtagcagaatatggaaggggataaatcaataatgacatttttaaaacaagtaaagctctatagagtaaaaattactgaaccttgcgacaagaaaaatatattacagaaaacattgaatttgaattatactctcaataattcagggatatgttatagagagtttaaaagattttctaaatagagttcagactgcagatatattaataccttataagagaattgaaggacattattgtaaaattgattagcattaatttagagtgttaaataaccaatttttataaatatgtatttaaaaaaatattaaaatatattacagaattaggtgagaagatatggaattaataaatggaaattctaatcagattgataaaacaagagaaagtataaaaaaattgattgaagattataaaattgaacttgaagttttgagtagaatgataaatgtggattataactggctaaaagattatatggatggaaaaagaaatttgcatgagttttatgctaatgcaatggactctattaaaaacaataaagaatttgtgtggaatccaaagtgtcccgagccttcattattatcaaataagatttatattctatctgaagggatacgtagtataaatgaagatgacagagtcaaaggaataatagatgtattgataattgacgttggaattagatacgatactttagctatgtatgcaggtatcagcttagaagatgttaagaattttatgaatgatactaattctattacatatgaaaataaatataagttagcggtagcaagcttgtttttacattttttgattaatggcaagaaatcagcaaattagttgtgtaaggtgatacaaaccattcccatatttgattttacaatgtttcttggtgagattgtggcaacatatgcaaaggaagattgtttggaaaatgggagaccaaatgccctaaaagttaaaccaacaatattaatggatactggttattttgatttaaataatagagttggatcaatatttaaatcatgtggaggtaataggtaatcaatatttatgtgaaattttaaagtaacatgaaataaaaaatagccaatatgaaagtaatcaaagtatagcatttttgtatgtatgctatgtaagaagtatgtatgaatttaatagttatttgaaatgcaaaaaagagtaataaacatatggggaatatgaatattactctttgttttatatattttgggaaatatatatgaaaaaaagtttttattaagtttatgattttattatagttgtttattatgtcagaataatggcaaatgtgaagataaatttatattccccaatatgtaaaacttaatcaaaagcattatcttagaccatattcctcatgtaaacacacaattacctataaatgagattctagaaataataccgtatgggaaagtcagttttaaattaacttttatgaaaatattacattaccatcagtaaagattataattgaagaagtgtatgtaagtggaggtaaaacctggtgggtaactcgagcatttaatcttaatagagcttccatagtttggtctgaatcaataaccataactatagctttactagtagattcgccaagttttatagtaagagatgaattggctggtaagcctgaatcgctccaagtgtaaatgccttgtttaaatgttttaggggcggcagatacacctttaatattaaagcaagtagatatgaagaaaaaaattaagaatataggaataaattttttcattagtttaaccacctttaatgttaaattttatataatatatcatttgtattatgcgtatttagggttgaaatattcaacatatagattaaacaaaaaataccacttgtcgaggtatttatgtatgtgataattaaagggccttttttaaaagaattattgatttaaaataaataacgctaaaaaataaaataatatatttctaaaataaacgcaaaaaaacaaggaatatagaaagaattatcgaatatatacctatcatagattgaatttactggagggtgtatatatggaaaatagacttgaggcatttttagaggttattcctgaattaaaggaaatattacaagacgatatagcagttgctgtagcagatactaagaaatttatatattatcgtgatggtgattccattaacttacctatcaaagtgggacaagaattgagtcctgaggaacctttatataaaagtataaaagaaggtaaggtactgagtgtgatagtgccaaaagaattgtttggaatatcatttaagggaatttcctatccaattaaggattcaagtggaaatattattggtggggttggaataggtaaaagcttaaataagcagcttaaagtagaagaagtagcagagaatatttttagttcactgcaacagacaagctcaagcattgaggaagtggctgttgattctcaaagactttcatcttcaatgaataatattgtagatgcaacacaaaaaacagaagaaaaaataaaagaaacggatacgatattaaatcttattgccagtgtttcttctcaatctaatcttctagctttaaatgcagctattgaagctgcaagagcaggcgaggcaggaagaggtttttcagttgttgcaggtgaaatgagaaaactttcacagatgagcagtgaatcgtcaaagaaagtatcacaattgcttcttgaaatgagaaattctattgatgaagttattaaggagattagcaatacaaacatgatagcagaatcacaagcagcagctactgaagagataacggctactttagaagagattacctcaaactccaaggaactagtggatatgtcaaaggtagtatggtaaagatgattatagcatttacttcagatacatataattttagcaattatcttattagattatttaacaaccttcataaaatttatcaggaaaatttaataggataatagtataaaataagcagaagatcgcattgttcaataaaatatgaatatgcgatttttttctgcctaaatataaaagggcatatagctatgaagtagtataagtatattattcgtggttgaagaaaacttttgattattcattacaaagatgtttctttatgtttataaacttcttctccccattcgccaagatgttgtaaagcaactatgagcttttgactaagttctgataattcatattctactcttggtggaatctcattgtattggtgacgaataacaagagagtcttcttcaagttcttttaagttttttgagagcataagactggatatgccatcaacttttcgctgtagttcattaaagcgaacaattccattttgagatataacccaaatgattaataatttccattttccatttataatttttaaagcatattcaatagaacagttttccatgaaagcaacctccattacttatataaatattagtagctaaacattttttgcgtacttgttgatttatatgttacttaatataataaagtcagtcaatagataattgattggcttaagagaattttatatttaaaaggagagataagatatgtcaaaggtagttatttttaaaggcagtccaagaaagaatggatatactgcaaaattattagaacaagttgcaaaaggagctaagtctaaaggtgctgaagttattgaatttgatttaaatgattctggaattcgtggatgtcaaggatgtatgtattgccgtacccatgacggatgtgctgttaaggattatttacaaccaatgtatgaagctattaaggaagcagatgctatcgtttttgggtctccaatatattattatacaattacaggacaatcaaaagtttggtttgatcgtacattcccaatgattggaaatgattataaggcaaaatatccaggtaaaaagttaataacaatatttactcaagggaatcctgatcctaagataggtgcggaaggcgttaaatttgccaataatatgttagaagagttaggttggaagttagaggatagcattcattactgcggaactagccataatcctgatttagcagtatttgatgagttatctttaagagcatttaaggatggagaaaatttagcttaataaatttataatgcaatatcacttggacagtataacgaataatactgaatttgaaaatttggaacttaaagacacacatagtgtaatgttaacttgacattaaattcaaagtggaatatacttttatgtaaggtaaacatgacaggagtggttcttaatgaaaaataaactaaaagaatttcgtgaagctgttggattaacgcaggaacaattgggagctcttgtaggagtatcaagacaagcaataaactctattgaaacagaaaaatatgagccatctatatggctagcttatgatatttctcaaatatttcattgtgcaatagaggaagtgtttctttttgaacaaagtgaaagaaaatcaagagcacaattaagtagaggtgtagtttaaatggcattaaggaaaattagattatttggtgatgaagttttaagaatgaaaagtagggaagttgaagtggtagacgaaaagatcagacaaattctagatgatatggcggaaaccatgtataatacagaaaatggtgggggactagcggcaccgcagataggcatactaaaaagactggttgtaatagatatgggacaaggattaataaaattagtcaatccaaagattatcaaacaagaaggaagccaagaagttatagaaggatgtttaagcaatccacatgtatttggaagattattaagaccagaaaaagttacagttcaagcattagatgaaaatggtaaagaaataatactaacgggtacaggagatttagcaaaatgtttttgtcatgaaattgaccatttagaaggtattctttttaccgattttgttactgaatatttaaaatagtatattaaactttttgttactgtattatttaatatatcatgcattgttaaataaaaatgaaaatgttaattaataatttaatacaatatttatataatcaaaaaatcattaggcaatgtctagtgattttttgatgtctaaatataaggaaaatcattgatttagtaatatgaagcaaaagtgatgaaatttaactaaagaattaataatatccttgtatttatatatgttaaaaagaataatatttttatcataattataaaaaaaaattaagaatttggctgtaattctaaattgtggaacatgaaatgttatcacgatataaattaatatattttgcatttacaggaaaatatattaaaaatggttgtattttacttttgatagtagtagtatctaattatagttcgtatatggaactatactgaaatagaactattattatgggagtgatttatgtggaaggtaataataaaaacatatttaaggaaaattcgaaaataaattttaataggacagctcaagcttacgatgaaagcagtgatggaaagtttgtagccccaatgtatgaggagattgttagtagggtaataagcgcaaatcctaaaaaaatattagatgttggctgtgggacaggtaatgtattaataaaacttagcgtcaactataagttcggtttatatggagtagatatctcagaaaatatgattaaaatagctaagaaaaatcttggagacaaagctgaattgaaagttggtgattcagagtatattccttgggaagataattcttttgatgtaattgtatgtaatgcatcctttcatcattatccaagcccagaaaaagtattattagagatgaaaagagtattaaagaatagtggtttattaattataggggatccaacggcaccagtaatttgtagacaatttataaatttatattgcaaaacatctaataatggtgactataaaatatattctgaaaaagaaattaaggcacttttagtaaaatgcggatttgagccatttgattttaaaaagattaattataagagttttgcaattagtgctaaggtaagaaaataatcgttaatagattggagtgacaatatggataaagaatgtaaaaagcaaatagatgaatttaatatattatggcatcgtatgttatttgaatcaagctataaagatattgaagctaaatatactagaataaaaggacttagtgataatgaaatatccataattagaattatttccgagaaagaagaagttattattagagatattttagaaatattgaatattcctaaaagtacattgactaatatgatcgatagattagaaaagcgcaatcttataatgagatctattagtaaaagagatagaagatcttataaattagagcttacggaagaagggaaaaaagcacaagaggagcatataaaatttgaagaagaaatttatggaaaagtaatgatttctttagatacttatgaagaaagagaaaatttattaaatattatgagaaagattgtttataatatttctagtagataatgaagttaattttcgaggtcaaatggttatttactttttgtgaatccatttaccatgtcacaattatagcctaaaaacaatattataaaaaagagtatgatttaaagaatattttcttatttgagataaagttcacatctgtaagtggtttttagattatatgcggtaatattatacagcctaataatttataataaccacttttatgttgaaccattcaccagagcgttcataagttactaaccaacaaaattgaataacaaattgtagaaacgtaatattcttttaattcactaatattgagtttgctagtgagttgttgtattatatactaactataatgcaatatatatttgacattgtgatttgtatatgttacaacaataatataaggaggaatgcaggtgaaaaatcttaaaatgaaatcagcaagagcctcgatggacttatctcaagaacagttagcagatatagtaggcgtaacaaggcaaacaataggaatgatagaagctgggaaatttaatccatcattgcaattatgtatcgccatttgcaaggcacttggaaaaacattaaatgatattttttgggaggatgatgataatgaataaaaaaattgatgaacgccaacagcaggaattctataaatgtgagcatatggcgtttcacattatgtttagtgtatcagtaatagtgattgtaatacaaatgttatttatgaaagctgcttttcagcaagtacttggtgaaacagtcatacttgcatgtgggggcatttcgatgattttgagttgcttgaaaagtggtctatggagctacaataacaatgaaccttctgtaaaaagtaatttaatttatagtattatatgctcagttgtagctacgttattgtttgcaattataatttatacaagggcaggaatcaaagtgatgacccctactataattggtggattctttggtggaattttcattcttggatttattgttttaacattactaggacaggtatcaaagaatacaaaaaagaaaatagaaaataaatataaggatatttaagtgatactatagatacccaatgtagaagttagattacgaattagcgcagcttaatttcaaatatcgatgaagattctaagctgtagatttcaccattttagcatgatcaaactttcagtatgacaagctaaagtggaacaatctataactaagaatcttagcaactcatttttaaatgttttatccacaaatatatttatgatttctagctaagttaaccatttatatagggtaagtatggaaatatgtccacataataagtctaattaataatttggacatctatagtattagacaagaatgaaggtaagatatatggatattgaaaaacttattaaggagcttgggaaatccattggaaagattatttgtaataaaaaagaagaaaataatgagaaaattgatatagagcaaatgagttctatagatatatttaaaataattcttaacaaagttgttcatgatggtgagtataataaagcagaagatttaatctttgatgaactagaaaaaaataattcacaagaagtttatgaaattgcaattgacttttataattcgctccttaaaaagagtgatgaattcttgaggaaaagtaatttcccaagagaagaagtttatcagggattaaaagatatagaaaaatttaaagttaaataagtaggtgttttaggaggaatttttatggtagaaagggaagagcttcttgcttatgtaaaggaaaaatttaataccaatcctgactatccatggcctaaatatccagagtatgctgtacttagacatgaagtgaatggcaaatggtatgggttaattatgaatataccaagaattaaattaggtctaagtggaaaaggaaatactgagatattaaacttaaagtgtgacactgctctaaatagtttgttaaaaagtcaagatggaatttttcctgcatatcatatgaataaaaagcactggattacaattgatttggacagcctattttccaaggaggaaatatataatttaattagcttaagttatgatttgacaaaatagaaattagttatcaaaagtaatgcaatgattctaaaatcgcattattcaagaaaattgaatttgcgattttttttgtacggtaaattatagatttattgaacgttgaatatgtaatactataaggctttatggaattgaaataatattttttcaaaacacaacaggatagcatttacaaaatatgttacaattaactggaagataaatggagatttagaggtgtgaaaatgaaagttttaataatcggtcttggtgtgattgggacaacttatggatatgtttttcaaaaagaggggcacgaggtagagcatttaataagagacagcaaaaaagcatttgtacctgaaaatataaatgttaagttattagatggaagatttaacaataaaggcgaagaaaaaaatgataattataagatccatatcgcaaataaaaacagttcttatgattttatattagtaagtgttccagctggaaaaattgaaggagtaataagaacattaaaagagaatgacattaatggtactttgataattttcaacggaatatgggaagataaaagttatattgaaaatttatttaaaggatgggagtatatacttggttatccagtagcaggtgggaatataagtggccatgaactaaattgctgtatatttgatcatattatgcttgaaagcaaagaaaaaacaaatattaaaaattatgagaagttattggaattgttatctaattgccatattaaagctgaaataccttttgatatgctcgaatggatttggattcacatggcgataaatgcagcagttataacaaacgctggagaatatggtgatataaaaaatacgactgaggcagcagaaaagttgatggattcctctaaaattttatcagaaacaatagtaactataagggaaactgtaaaaataattgcatctagaaatgtaaatctaaaaaattataataatgaattatttgcttataaaatgccttcaaaattagcaggaatagttatgaaaagaatgtttaaaaataatcagctgactcgtagaattatgacacttcataataatataaatgatttattatatgtatgcaagaatgtatatgactgcggtaaaaataatcaaatggatgcgccgctgttttcaagaaaatacaatttactagaaaagaagataaattgttaaattttgcgcccaagcaattcaatatagagaagtgtatcaaaattattaaatttcttgtcttatatggcttaatgctttctcttttaaagtccctacaattttataaagaatgaattaagtcatttgaaaattaattctccagcgtaacgaaaatctactatagctttgatttatagcttattataagcagaaaaatttttattttgagtaattttatataataattaacagatgtataaaattgctataaataaaaagattcaagaagctaataataaagtgaaataagctttagatttatgaggcaagttacaaaggaggaaaacaaattgagaattaaatcaaaacatatcttattttttttggcaagtatattttttattctaactatatttatagacaatataaatattaattctgatttatgtgatttagtattcaatgaaaatgttaatttaaatgaaaaaataagtgagcataagaaaaaaacaatttatttaacttttgatgatggacctagtagcaaagtaacaaatgatgttttagacgtattaaaggaaaataaagtaaatgcaactttttttctaatcggaaatcaaattgaaggaaaagaagatgtggtaaaaagaatttatgatgaaggaaacggaataggacttcatacatatacccacaaaataaggaaaatttatagcagtgaagacgcatttataaaagaaatgattaaatgtcgagatgagataaataaggctattggaatttcacctaatataattagatttccatgcggaagtaacaaaagattgaacaaaaaatatttaaaaagattacatgatgagggatttaaaatatatgattgggatttagataatacggatggattaaattcaaaactctcaccagatactttatatagaaaagcaatcaaaggaagtgaaaatcgcgaaagcataatattacttttgcattgtacagatatgcataagaacacatgcaaggctcttccacaaataataaaatattataaatctaagggatatgaatttaaagttattacagaagatactccagaattatattttcatatgagaggaaaattatttaaataaaaatatatttgcctaaacaatataacatttaaaaatagaggcagcatgttattcatgaagattaagcatgaaaaatctagaatatag

SEQ ID NO: 79 - DNA, 29062 bp, Clostridium beijerinckii
atatattattcctattaatgtatctttatagcaatattctaattattttacgcttattttctataataaacagtagttaggtataaatttcatttatacaaaaatttatcccattaaaaactttctcaatctatgagataatttaagcattaaaatctatatgataattgaaccattaaaatccatgtatatctgttttctttatatcaagttcctgaaacatgcttgatatgattcctttgtattcctgtaaactactagtctttcttatctttttagcatatttatcactattagtaaagatatgtatcatataaaaccataattctttcattttaaataagacatttttatcacctgaaagaacttcttcatatcctatgcagactttatcatgaaatgcctttattaactctttatccataagacgattggtcttaatttcttcaatcaatcccggatttgcaataagtcctctaccaagcattactgcttcaagctttggatgagcttcggataatttcttataatcttctacattaaaaatatcaccattataacaaataggatttttacttaatgccaatgcatccttaaacactttcatgttaggcttatttttataaaagtctgtctgaattcttggatgaattataagctcctctaaaggatatttattaaagatttcaattaactcataaaattcatctggcgaatcctttccaattcttgtctttatggaaattttgcttgacgcatttgaaaatatatcctctaaaaattcatcgagctgctttctttgtgcaagaaatcctgatcccttatgctttgcaacaacagtgccagatgggcatcctaaatttaaattaacttcatcatatccaaatttactcaactgatttacagtatcaatgaaatactcagaattattagtgagtatctgaggaataacattgattccttcattatgctcaggcaacacatcgtttagctctctagaagtaaaacctttattcttagtttgtgatataaatggcataaagtacttatcaatttgtccaaaaaaagtttcatatgcattcctatatacatatccagtaacaccttctaatggtgcaaaataatatttcatatcatgaatctcctcattatgtaagtaatttcacctttattgtatccaacaaatacatttttgtatatagatatatcagctataatccatacttatgtgtatacctcgccgaaatgaataatatacttttgttccagtttctaggtaattctgatgagtgattctaaggctataaagttgcacccaaagtgctagcctcaaagaacaagctttgaactagcacatttggaacaacttatagccaagaatcacatccatcaaaattaccaatgaaacattccacaaaagtatattactcatttcttgttggatatatttcatagtctaagtatagtttatgattgtgttatctatagataaacgacttaagaatttcatttatactttgcaataaataccatactagaaagtagaaacatttttatgcagcaggcatcgaaaatgagctgttaaaagctcttaattgtaggttgttcaactaatgcttgtcacaatgaaattgggagcaagcattagttgtgcaacctgcaatttagaactttcagcgaaattttcatagtcctgtgaaataacaatgtttctgctttcggtggattattgcataagtttaagtctcacttaggttatctatagccacaaaaaagctataaatatattgcttcaataaatgagtatcctaattttaagccatagaatataagtattagtccacaaattatgttgatccatttaattattttattaaatttactgctaaacttccctacgaatcctgcaagtccactaaaccatatgactgatgccatgcagacccccaatataaagtactttgacatttctgctggaagtgaagcattgaatccacctaataataaggatccatcaattattgcctgaggattaagccacgtaacagcaaagcaagaaatggtaatcttaataaatgaattatcacccagctttttatcttctaacatttgtgaaaatgttcttattaatccagctcctatgtaaattataacgacaaatccaaatagaagtattgccaattttaatatatggtatttttgaataagcgcccctattccaaaaaagcacgaaatcgctaatgaaatatcaaataagatagttataagtgcaactttatatgtttcagccttacttttttgcatagcagtatttattacatataagttttgtgttcctattggtgctacataagcaagtccaaatagaagcccttgtaataagtatttaatcataatttaccccctttattagttcttttattattttaactaataaaatataaaaagtccccaaccaagatattagtttattacccaaccaaaagcagccattgaaaaaatcaatagctgcttttacttatatcattaaaatagctcttttttatcaattctgataatatctttaaacccctttctaactctcccagtgaagcatatgaatatgaaattcttaagttttggctattagaaaaatcataaatatttcccggattaatcaatattcctttctcataagataattcaaatagtttatttaatgatagtgatttctttaattttaaccaaatataaaatccaccatgtggtttgctccatgttgctatgccatcaaaatacctctttaaaatatttagtgtagcatctcttcgaattttcagccgatttcttagttgtagtaaatattcatcatataagccactatcaatcaattcagctaagacttcctgagacaaagaacttgttccataatccatctgcatcttaagatcacttaaatgttcaattacattttctggtccaactagccaaccaactctaagacctgctgctatagatttagaagcagtgcctaaatacatgacatttccatttttatcttttgattttaacggtggcggtggctctttatctaaccatagttctctatacgcatcatcttcaataataggaattctttcttttgaacatatttctaaaatttcatttcttctctcttctgtcattacaattccagtaggattttggaaagtgggtatagtatataataaagttgaattatcgtttttcttattttttataatttcatttgtcttgatgccaaagttatctattgaaacactatttaaattcattccatatgattgaaataaattaagcgaactcaaatatgaaggcttttcaacaagtattgtagatccactctttaaaatccccatagaaattaactgcagtgcttgcaatgatccagatacaattaatatttttgatggggaaacacttatattatgctttttcagatacttgcttattgtttctcttaaatgcagtgacccttttggttcttcataacctaaatcttttacattttctgaaattttgtttaaaatcactttcatcatatcatgaggatataaatcacgagaaagttctcctgttcctaaccgtatcattccatctttaaattctaattgatttattttttgaattgtaggcaggtttggcttttgtataccactttgaatataattttgccattttaatggtgaaatagatgtaattagagaccatgtattattaactatgacagttcctacaccgcttttaccttcaattagaccttctgcttttaattcatctaaagcctccacaacagtacttctatttacttcaaatatttttgacagctctctttgtgttggcagtttactacctacatcccattcccctgttgatatcatcgtcttaatataattaactatttgctgatataatggaatagataacattttatttggtttccaattaacatttaacatataactcctacaatatatagatatccaactaagacctgaacttatgaatacaactcgccgaaatgaataacatacttttgttccagtttctagtttggatatatttcatagtataaatctaacttataattggcttatctatatagatctccaatttaagaattcgacttattagatgaacatatttaaaaagttactaaaactttaagctcatatcttcaccagaaatcataaatatatttgtgaagaaaacatttgaaaatgagctgttaaaggttcttagctgtaggttgttccattttagcttgtcaaactgaaagttggagcatgctaaagtggatactacctgctgcttagaaccttcagcgatattttcatagcttttcggaatcaaaatatttatgatttcggtaagttaccacataaatctagttttaaagttagatatctataacaacttcactatttattttaaataaattatgatattcaaatcttattttaatattttacaatattatctcttgatactccataacttaaataacaattgtcaggattgatctttctaagtatatcctctataaactcatcagtatgctttaacaaaagattattatctttataatattctgccttattattatctatctgatctaggcatgttattgcaatagatttacttacattgatttttttattcttgctcttgaagctaatcttattataatcattttctatattctccgataataaatctatatctagtggtgcaaatctcaaaacaccttgaaattcattttgaatgttagttaaatctgtaatatttttgtatggcttctctttaatttcatttggcaatggtccagcaccatgtcttgttaaatagctccttgttacatagattacttctatgtccagttcacagggctttgcttcttctaacaaatctatcacattgcttacacctgttttagaatgggtcacataaggaaaatatttatagtcctctgatagcatcaatccttgcgctccttcaaatataatagtttcataattttctaaaatactttctatattagacagttctacttttgctttaaaattgttatcaacatcataaataaaatgttctattatatttgcatcaaacagtatactcattaaattatcattggatgactttaaatttaactgctcaagccttttatctatatattctttttttataagctccagcttatctttataaattccactgaaaatatcaccgcaggttattttatatctatccatactatttcttacaatcgactcattatatcctagtccgcaacttccatgtttattatttcctctatgtctttctaatatctgatttaatagcatgtcttgtggtataactacagggcaattgggatctatcattgtatgtggaatatttcctattttattaagttcatcatattcttttagaaataacaaaggattggctgaaaaataactgcttaaaaaagttggaataccttgtaagcttcctgctccaaaatgtccaaatacatgtcttttaccatctggtgtaactacagtatgacctgcttgagcagatgaattgaatcgaatcacaactggattttcatttatagaacacatgtaatctgtcattagtccttttccttcatcaccaaaattagaacctattatcacttttatagatttcatgccaagctctcctctcatgatgttaaaaatggagctgttccattaagaaaattggccacagtatgttgtattagaatttttaaatttaatacagtatattgtagtttttattctttctgcggcagctccaataacattaaaactttacaagtccatcatcagtttttacatttggaactaattcctttatagaatttcttattattaggcttgtacttccatcccaactatcagaaacattatccttgtcttctccagttaatacttgtagtgttgatactataagttcaggcaattttgtataatctgacaatctcaaaactctttggcctaaaatatcattccatgactttattacttcatctggctgataacgcatatgacttccttcttcaataataatatggaatacttcgtattgcttagatacaagccttaataaatcttgtgctgacatgctatcagtttgtattgtatctccaaagactttttttatttcatttttaagaacagtcttaggacactcttcatctcctatagtaaatagatatcccttttttcctctttttataaaattatcgcattttgtatgcattccagcaaaccaccaaggcaaagtataactttcagagttatttcctccacctccatgttccacataaattttagttaactcttttgcaatccttatatcggcttcaaattgagttacctgcaaaggcgctgaatcatatttaacatcaccaattcccataaacatgatatgtgggtcagaaacaggctttctgttatatatttcagtagctaatttttctaagccttctcttgcaatactatctgcaattattcccattgaaccagttacatctaatccaataataattggtgttgagtttggattgtcgctgctgtcacagctttccctaaaacttactttatacggatttaaacttggatcaagtttcctcgctgcaaagacatcatctactgttttctttccttttatagttgcacttgcataactatcccaagcttttgaatcccatcttcctgttcccattttaatacctcctaaatactcatatatatttcagttcacaattcacaatgcacagttcacaattttcaattcacaatgaaaattgcacatttcacgattgataattacgactaaaattcttgcaatatttttttgaattatgatgaatgattatttttgtaacatatatatattacttattaatttttccagcgtataatttatttatatcaatatccatttctacgaattttctttcccaataactttgtttaatcacactttcccaaagcttatactcttccattggattgtttactgagactcctctgacccaatcaataagtggcttaggtatatcagaatcctcaataaaactcattccattcttatcaccaagcaagattcttccaattaatcttatggattctaaatctaatagaaatgtacctattttagatgacttcatttctggagacatgatgctataaatttcgctaggtactccaagcatcttaccatctataggaactgtataccaccagccacctaacaaaaatccactatgattcgaaggtgaaatataataattatcaatatttattccattatgtgataaattattataatatagaaaacaagttatattatataaagtgcttagaatccacattacatgtcttggtggaactttgctgctataataatttaatatatctttaagagaataagcatcttctggcttttctataagcagtcctatcttcttatctatggtttcaaatttctttaacactttgggaaaatacttttcaaattcagatttcatgttgttattttcgtattttaagttcttgattctatccaatgcattttctacaaaatcctcatgctttttatcaattaaatataaaattgatctatttccaataaaatattttcctaattcaaatgaatattctacattatatctcattgaatatttctcgccatcaaagcttgttattttaattaacccctcttccatccagtttccattctctaataatttaacagtttcagaatataattcatttattttacttgtgacttctttgtatttctctgaatccctatgcaaatctggatgaaatattttaagaagatcactgtgttcctttttagttatttctctatcacctgtaaataattcataggggtatttcatttcaagaatttcttcaatagtgtacaaaattctcattcccttcttaaaaatacagtaaatctaaaactctccatgtaacttctctctaatttcttttaatgaataatctttaatcaagtttccatccttaaaaacaacttctaataaattgtctttatactcctcctgctcttttaaagtaagctcgtccttataaaggatgtcctctccctccctgtatacatagcacattcccttttgagattttttaaagtttcctgtatcagttttaggatctttaaatatgaatttttcttcaccatttattactgcatgagttgctttcagagcaaatccaaaagtatcacgagtattatattgataggtgtaagaaccaattccaaaagtacaattgcttactgcaaatcctttttgtgcaaggcatctgcagatttcttcgcacctttcaactgtgatgctatcaccataaattgttcctatatgtgaatctaaaactttatatccttttgaattaatttccccaccaaatatatcccacaaaagttcaacagttcctttatatgctggactattatgtggtgcttcactatcaccacagattattttaactggatctccactatctcctctgattactacctttccatctctatttaatatatcctcttttaatattggaaggatattagtaatgaggttccaataatcgtaggtatctgaaactatacttataacaccgcttggaaatacttcattaattaatctcttataagctttaagttcatcagttccataagtgcacattacactatgctcagttgatggggttccaagtccaactatttcattttcaatattacagttataataattttctagataaagtattgatgatattgttgcagttaagtcaaatgaaagtaaatgccctgcactgctaacctgtgcactttcaattgagctaaatcctctcatgctaaagtcaccgcaagctttttttacatcaccattttcaacagttagatcaaaatactttaaagcaatttctctatatctatatgctattgttgcacttgtcataggctgccatatattacagctcatgaaagtctccaaataattcacaagccaagcaaattcatcgtgagtattagtgatttcaatcataggtgtttttatatttactcttgttccttcttggactgcttttatttgtataggcaaataacctaaatcatgcaatttttctatgtgagctgtatctgctgcgatgcttcccattgttctagatatcactctcttatattcactaataatttcatccttaggaatggcgaaaaaattttcatcaaaatattctattaaatatttttttataaaagattgaagcccaaacataaccactttgttcatgttttcttttctagacattcttggagtccaatagcttacaagctttgtaagtccttctgcatagcacatatgatgtattgtcttataaaaatcagttaataataatggatctatcatttatatctctcctatcttgtaactttaactcctagtgattcaattacatctaatgctttgtcatgaagactatcatcaaaacttgcacacaatgttccatctacacttaagtttgcatttatatactgagattgaaatgtgactacattgcttattacacaaatgttcgttacaactccaactaactctatttcatctatatcctcgccaacatcctttgatatctttaacatgtccgctggcgctattccaaaagagtttttattataatgaaaagtattctctacgcccacaaattcttttaactttccataaagctcatgaccttcagtatttatataacaatgaggtacaggtaaattctttccttctcttgtttctagataattttcaaaatgagtatcataagtgaataaaaccttatcgccatttttcaaatatttttttgctttatcataaataccttgttctaatgtttccgctttcttaaatcctaaagctccatcaccaaaatctttttgataatctacaaccactaataatttattcataatcgtctccccaatctctataatttaattttagatatccaactttcaacttagacttgtgtggtgatataccgaaatcacatacatttttattccataggacttaagaaatctccgctagaaagttctaagtaaaaggttgtgcccatttctgcatgctcctcaagcaagttgatgacaagaagtaaacggagcaacctctcactaataactttcaatagctcaatttcaaatgcctgtttcacaaaaatgtatgcatttctggcataggtacacacgaacgtttaacaataaaagataattattctacatataagtctggtctatagttgtttatctatactcgctcaaaacattgaaaacactacaaattgttaactttttatatttttttctttaaaaatattttcacttttaactttttaagttttttcattgttaagaatttaaattcttatattcctttgttcttaaattcttatattctttcatttttaactttatagatattcaatttgagaattatacttatagcttgaaaaatctgctatatcagaaaggacaggtactcttttgtacagtgttacattagagaatatgttgcaggcatttcttcatcataagttgttcaatttctgcttgtcacgagcttgtctcgggagcatgctgaaatggtgcaacttatgatgttagaaagcctcaacttattctcagtaaccgaaacaacagagtacctgtcctttcggtggattattgcataagtctaagttatacaatagaggatatttcaagtttctcatgctctttagataaaatgctgttagtagtaaataccttagtaattaaatcagtcttcaaaatttctccatcaaaaattgtatcctcacaatgtgttaccaccaaataaatctcagttgcacccatttctttaagctttttagctgttaaaataaaggttccacccttagagcataaatcatctacaataatagctttaaaatttttactttctacagttccgtttatttcaagcttatttatagatcctgttttaaaatctctttctttgtttgcagttaatattttttcatattcaatttgtttaccatatcttttagctgcacctgcatctggataaactaagtaaactgaatcttttttatcatctactttttctaataaatcttttgctaatattgcagacatgtttataactttaactctatcgagcaatgccacacatacatctgaatgtggttcataaattgatacttcttcaaaatttaaattattaataagtctgcataaatgctttagggtaaatacagtaaacccttctgttctatccattctgctataaggcatataaggaattataagattacatttaatatttaattcatccaaatgatcctttaaaaatatcaaatgagttatatcattatcactttcaaatttgagtttaatggtatttacccattctttaatatttaactcttggctgtttattaaactttctccattaggaaattttttaacctctatttctttgtcatttaaaaaaatcatttaattatcccctctcatattaaatctcaattctctatcattaaattttattaacaacttacattttgtttaaaaattgtgctcccagttttcattaaacttaaatactttagcaggtctaaaaggtttcccctctattttttcatcagtttctataatcatatcttccatttttcttctaaaattcaatatttctcttcccattattgcttcatatacattttgaagttccttaactgtaaacaatctaggcaaaagatttagtgcaattggcgtatattctattttatttctaattctgtctaatgcataatctattattttataatgatcaaaagctaattcatcattactttcatttaacgtcttataactattttcctttttcctaaaaatagttctttctattttttctattatctcataattaaattttatttcctcatcttcactttcaaattttagaatatatttatttatggtatgcgtctcatcttttttagaatcaactaaattcttttctacccaaaaccaccttgattctttcctatctttataatcaccaaatctaatatcttctttcgatattaatgctatatttcctatacttattactcttgtccttggatctctattaatttctccaaaagtgtataattgttcagtatatacattatcaattcctgtttcttcctttaatttccttagagctccttcttctaaactttcatcatttttaacaaagcctcctggaattgcccattttcctttgtaaggataatcatctcttttaattaagagaatttgcattcccttctttggcactttccttgaattctcttctatcctatcaccagttgtaaatataataatatcatttgtaacacttggcctatcataaatatttacatcatattcacttagaaattctctttcatttttatctaatagttcttgattcaacttccccacctctatatattagaaaactttttactatttatcatttagataatatcaatttgattctatgtattaatattaactccattaactttatttgtaaatacctttttgaaaaataattatagaaataatccaactaaaacctgaacttatgcatataaatccccgaaataaggattatgctgttgttccagtttctaaggaagttatgatggatgattctaagatcacaagttgcacccaagatgctagcctcaaaggcaagctttgaactagcatacttggaacaacttttaatctaagaatcgaaaccatcaaattcctaacgaaacatttcacaaaagcataattcttatttctagttagtatatatttcatagtataaatctagtttataattgttttatttatatagggttccgcaatgagagttgaactcatgtggatatcagctgaaattgaatacatatttgttacatataactatgaaaatttcgctggaagtttctaaatggcaggttccccccattactgcatgtttccactttcagcgtgacaagcaagcactagtggaacaagagatatctaaaactctactcacgttcattcgctgatataaaaaaatagagagctaatgtatgtatggcttgtgtgacattttgtaaattatgttataataattgttattaaaaactatagtttaataaacaatagtagattattgtgaagttataggagcgtatataatgaaagaattttttttaaaatcaataagaattggattttcaagatggagtgaagatgatatatgtgatgctttagaattatggggaaatccagaagtagcaaaatttatcacagcagaaggcacgatgtcaaaaagacaagtacaagaaaggctaagaaaggaaatagaaaattataacaattacaatattcaatattggccaatttatttaatagaaactaatgaaaatttaggatgctgcggtttacggccatatgattatgagaacaatatattagaaatgggaattcatttaaaagagaagtattggggaaaagggattgctaaagaagcatgtttggcagtaatggaatatgcttttagaaatcttaatgctaatgcactttttactggacacaatcctaaaaattcagcctctgctcaattgctaaaaaaacttggatttgtttacacccatgatgaatattatccaccaacaaatttataccatccttcgtacttaatgaagaaacaaaactatatggatgtgcactaaaaggcaatattcataaatcatgaatcaaaaaatcaaataataaatgtaaagtcgtattattaaagaaaatgaatttgcgatttttttgtgtgcaattttcatatatttagtattaataggtagacaatcctatatataatttttaaggctatatttcaacattatattaaaaccaaacatagccttatattatttaagaaatgaaaatgaaaaaaaaacttttttacaagttttattatacttacaataccttaacattagcttaataaaattccaaaaatattattatcatataggttgcaaaaataattcttaatcatagttctaaaaatcttgcaataattttaaccataattgtgaatcgtgaaatgtgcattgctacagatactttctaattatgtagttaatttacttatcacagaataataaataaatgtataaattaaacccgtaagggcaataaatcctaaaaagtactttattagtttcaatacttttgacataaatctaatcctttcactttgttattattttagtgatacacaaaatatcgttttactattattttaatgatacatcaaaataccgttagtttcagaaaatgttaaactttatttataaatttattcaaatattttttatagcattctaattttatctaagtcaatatagcactatatgaaaacttaatttaattaaatcaactcgaactgcttaactgatatattttcaatatttcttgttattggtagcttcataaaaaatgttgttcccttacctagctctgtgtcaaaccatattttacccttatgaatattagtaattgtatgatagaccataaacaagccaagtcctgttcctccacttcttctaaaagaaaaaggttcaaataaagtctcatttatttcctctggaattcccccagctgtatctttaattataatgagtatggaatttttatatttttcagttgtaacttcaattgacccaccaatatccattgcttgaattgcattgtttataagattctctattgccctctttaaaagcttctttgatatgttcgcatattcatctacattgtctaccaatgataactttatatttttatgattgcaaataggctgaaaagagtttaaaacatcttttattagaggagttaccttctgtggtgtgagctcttctggtttaaatatacttaaaagttccattaccatatcattcatttcgtcaacttgattaattattctattaaaataattgtccatcctagctttatctgaagttgctatgccaagctgacctaatcctctaactacagatagtggatttttaagatcgtgaacagctgttgcaattaattcacttgttgcagctaaattgattccagttgatatgttactaaatttatcattaatatatttcatggctgtctcaattgaatttatacaagctataaaagagtgtaattttaccggattcatatgttcaactggaacacttattccaattgcccctatgacattttcattatttataattggcacgcctatacatccacacttacaatcaggcataccatagtgttctgccccataaaccaaaattggctgccccattgccaatgcagtgcctatcccattattcccaatattttcttctgaccaatttaccccaagagaaaaaccttctattattccacccagttcttcagtcttttctctaaactcaatgatccatccatcattatctgataaagcaattatgtgtggaatatttgctaaactcatagatagtgaatccatatacaagtttgatatttctgttagtttagagttttcctttttctttttttcaagatccctgcttgataaaaactcaaatttcacttccttaggattcattcctaacttctcgcatcttttccatgactctaatgtaatttgtctcgctgttggattttcatttatagtcgatataaaatcatcccaagatgagaaatcattgcttatttctactagacatttcattcggactttcaccccatatatttattgtttgactataagtcaaatctattattatttattattcgctaatcagatttaaattcctctttttcaacaaaataatacattataagataaataatttcctagagttatgatttatttatctatatcataactatttattgagatttttaccaccctttattataccttctttttcttaacataaccttaattacaacaaatcttttgatttaatatatattccaaaaatatttaaagactcttagtcttaatcatgaattatacattttaaattgcagcatatatattataagtctctttaatgaataaatttatattaagttaagataataataaaaaggagaaatttagtatatgaaaattcataaaaaattgcttgttcttgttatgttattaatgattattattcaattaatattttgtggcgctaatataccaaataataaagtatcaaaagatagattagaatcaataaaagaaaaaggggtactggttgttgcatcttcaaatgatattccctttgcttatatagatcccaaaactaaagaattcactggaattgatgcagaaattataagagaagctgctaaaaggcttggaataaacaaggtagaaatgaagcaaattccatttaacgatttactaaaacaattaaatacagatgatagcatagatatagtagctgatggaatgtatgttacagatgaacgaaaaaaagaagcattgtttacaaatatattatataaagaatctgaagcaataattacccctaaagtatctaaaattgtctttaaggaagattttaaaaatgctgtaataggtgcacaagtaggaacagcttttctagttctagccaataaatggaaagtagagggtgttgttaaagatgtagtttcatttaaaaatcaaaatgatctattatcagcagtaagtactaaaaaaatagatgccgcaataactgattctatttttgcttcatatataatctttcgaagtaatttatatttgagggtattgcctccaacagattatacgcctgaatcccctggcaaaatagctgctgctgttaggaaaaatgatattactttagcaaaagcaataaatgaaaaaatagatgaaatgaaatatgataaaacaattcctgaaatactcgaaaaatacggcttaaatagcagttactttgtttcagttacagatggtcatatttatctaaattaaagtgaaggtagtaattagtttttctaaatactgcctttattttaatttcacactcctttataacattttcagacaacgaatatcaaaaattcaaaatatattttataaattatcacattatttcataatacgcataagatacttatataaatgaacaacaaatgaaggagtgttaacccttatgtacagacgcgacgatgatgactgtatgtgtaaatcaaaagaatattcaaaagaatattctaaagagtattcaaaaaaatatgaatatgcacgcgcatatatattacctcaaaaatatgaaaatttgtattcttgcaaagaaggtttcgtaaaaggaacaatatttaaagacctttacagaccatataaaaaacagcatgatcataaaggctatgattgtgaccatgatcatcatgagcatgagcacgaacatgaatatgatcatgaatatgaatttgaatacaagaaaatcaaatacgagaggtgatataatattatgaaccaacgagatatgctaaatagtataagagtttatcagttttgtgctgtagaactaaacctattcctcgacaattttcctgaagataaaaacgctaaagaagattacaacaaggtatcttgtaagttaaccgaactaattagcgcatacgaaaaaaactttggcccattaacaaactttggatctgcatatgtagaaaatccaaaagcatgggtaaatacaccatggccttgggaaaattgtagcagggaggaggaataagagtttatgtggtactatgtaaaaaatttagaatatccagtgaatcttaacaaatgcaaagatcttaatatggcaaaattgctaataactcaatatggtggtcctgacggagaattaagtgctgccttgagatatttagatcaacgttatactatgccaactggaaaatcaaaaggattattaacagatataggaacagaagaaatggcccatgtagaaataattgctacaatggtatatcaacttatggaaaacgcaactatagaagagataaaaaaagcaggacttgctgggcattatgctgatcatagaaaggcattattttatacagatgcaacaggaaatccatggacagcaacttatatccaagcaaagggcgagcctatagctgatttacatgaagatttagcagctgaacaaaaagctagagtaacttatgagaatttaatgcacttaactgatgaacctcaaattaaagaaatactagcatttttaagagaaagagaagttgttcacttccaaagatttggtgagtgcttaatgcacgttgaagatgcaatgtgcattaaaaaataagatagcataatttatatatataggcttatatatataaataaaactgcctcaaaatacagttttgagacagttttattatacgtatatactttcctagtaaaggtacatattaataaattgcttaaagcattctttatgaataaattcctgcttaggttctattgtatgtaaataaagtttgttttcaccactattactatttgtaatagtcactttttcatccaatccgataacttttcatcattccaaattactctaccatttcttatacacataattagcttaaatatgttagtattatcatagatgttaatttcatcacataatggaataatatcacataaccaaattatatttttaggtactgaaccacaggaatcccttttatattcatatgaaagatgaaatttattacaaaaattataaataaaactatacaaatatcaagataattgatattgtaataccaaggaaaatataattttatatttgcgcaaaaacgtgtagagttaaccactttgaaattactcatttcaaagtggtttttttattttaaggaggattttatgatgaagaaattaattttgaagaacattagacatgccataacatttaatgacagagaagaggtatttgaaaatgtagacatattaattgaaggacctaaaattacttcaatagctacttgccttgaagtacctgctgaaaccgaaattattgattgtactggacttgtggctttgccagggtttgtaaatactcaccaccacttgtatcaaacgctatttaggggaataaaagaagttcaagaaaagccacttttcccatggcttattgggctttatgaattttggaaaaatataactccggatgctgtatattatggaggtctagtaggttttagtgaacttttaagaaccggatgtaccttaacttcagatcatcactacgtatttccaaagaaccagcctgacacattaattgatgaacaaataagagcagcacaagaaattggaattcgctttactgctacaagaggttctatgtctttaggtagagatcatggtggacttcctccaatgtcagttgttcaagctgaaagtaaaatattagagaatagcgatagacttataagcaaataccatgatacaaatgatttttcaatgacaagaatagctcttgcaccatgctcaccattttcagttaccaaagaattaatgcttgaaactaagaacttagccagaaaaagaggagttatgcttcatactcatcttgcagaaactattgatgaagagagattttgtatcgaaaaatatggaagaagaccttttgagcttatggaagaacttgaatggcttggtcctgatgtttggtatgcacatggaatacactttagcgattcagaaatagatagattgaatggaactggtattgcccattgtccttcatcaaatatgaaacttaatagtggtatctgtagaacttctgaaattttaaaaaaaggtggacatataagtatagcagttgatggaagtgcaagtaacgatggttcgaacatgtgggaagaagttagacgtgcgtaccttctaaatcatttaaagtatggagctgacggacttaatgcatacgaaatactaaagattgcaactagaggtggtgcagatgttttaggaaggcctgatactgggagacttgatgttggaaaggcggctgatataatactatttgatcttaacaaggttgagtatgcaggatgccatgatccacttgtttcattagtatgccttggaaattcaagctttaccaaaatgactattgttaacggaaagttagtatcaaaagatggaaatcttatttcaatgaatgcagatgaaattggaaagacagctcataaaattgctaaaaatatagttagcaatgaaagattacacaaaggatagtattcaagatttttgcttaaattcttatattgattaatttatagattgtttcatcttttgcaaaatggataggattaggcctccagttataagaaaaatccacgaccacctgtaaatagctatttaagctacatacaaatggtcgtgtttttcatgtggaggcgaagtgcgacctttgaaattcaccataggcaagtactagctgcatcattccaatggcaaacatgcttaaaagaacgcctataaaacctatcatagaaaaaccgcctattcttctagaactattacatatccgctatttccgtctactcttattctttgacctgtttttatcattttagtagcatctgaaattccaacaactgctggtattccgtactctctagctactacagttccatgagttaaaagtcctccaacttccataactaatccagctgcatttataaaaagcggcgtccatcctggatccgtaaatggagctacaagaatttcccccttgttcaaggatgcctttgaaggatcagttatcacctttgcaactccttcaataactcctgaggaaacaggaatacctggaagtgctcctttttgaagatcacctatcttatatccaccttttatttcttctccttcatttgtaataacacgaggtgcatttaacgttttataatgttcatattcttcttttctttgttctactattgttttaagactttcattattttcaattgctctatataattcactgaatgttacataaaaaacatccttttcttcatttaaataacctttaacaaccaaatcttctgcttcttttagcaattccttcttaaaaatcatacaaagtctcatcatcataaatttgtgatgttctcgtattggaaaagaatttcttaaaacaaatataagcctttttacaattttagctttgattttgccatgctttctttgtatttcttctaccatattttctgttgctatttttgctttttttatagtatttttgtattcttccctatgagcgccttcctctgaagttttaatagttgcaagtattgattttacaagtggctcaggattttcaatccatctatctctagctatatctatttctcctgaagcacgcactccgtacatatttataaaatcattaaaaaagcttttaaattcctcattacctttaatttcatttattcttgaaaccaaagtttcataatcttcattttcaaattcattaattaaactttgagattttctcaccatatccgccaaatctccagtaagtaatcccatttctgttgtaatatttccttctaaaccttttgcaattatattactataattatttgttcctaaaagcttcatttccagcttttcaagaagcttaaaggcaataattcctggagctaaatatggtactattattttagcatcctcataaagacttgctttttcatgtattatatttaacttttcggtacctttctttgaatttaaaatagccttcaaggtatcttcttcacgctgtttaatataattattcataaactccaccgttccagttaggttagtgaaaagaagggttttcataactttaactgctattggagctatatattttaagaagggttttaagttagctttctttcctttaaacttttccttaaattcttctctctttaagagctctcctaaagcttctgccatcaaagcatctgcatttgtcaataaagctaaaagcttttcctttattctttcagaattcataaagccacttacatctgcataaatcctaccacccgctgaagctaaaattttatatttttcttctcttttaatatttctaccaaaaggcagcatatctctaaataaatcaagccctaaaggggatattggatcggtcatcacttgaagatgatttatagaaatatatacatgagtgttatcatcattgttattaggggttggaagtggaaataatgatgtaattgcacgactctgcacaatatacaattcaccattttccaaacaccactcaatatcctgtgggcagccataatgcttttctattttcattccaagttcagcaagccttttaatatcagaatccgccatgacttggttagtagatttttcacctgtaatatcaacttttttagttcccccaccttgaattggcattatagcgagtttcttttctgctatagtcttatctattatttcctcttttttcttattaaatttatatatatcaggagatacaagaccagaaactaacgcttctccaagtccaaaacttgcatcaatagaaataattcctctatgccctgatacaggatctgcagtaaacataataccagctatatctggaagaaccattttttgaactactacagacatatgcactttttcatgttcaattttattttgcaatctgtaaagtattgctctatcagtaaataatgaagcccaacagttttttactgcattaattagcgaatcttttcctttaatattaagatatgtatcttgctgacctgcaaaagaggcaaaagctaaatcttctgctgtagcacttgatctaacagcataatagttatcaattccgatcttatcagcagctttaatgatttcttcttctacttttctaggcatttctgcttgttctattttttctcttaatttaatccctatggtagcaatattttcaagatttgcatctttaatttcttctacaataaaactataaagtttattataatttataaattccttataactttctgtagttacacaaaatccaaaaggaactagaaaaccagccttagtcatctctcccagatttgcacccttccctcctacaagtgataaatctttcttatctatttcatcaaagtacaatgtatacttatttaccatagtgatcatctcccctaatttttttgaagctttgctccatttaaaaataattctataatttggctctttgataattctaaatcgatattatcatctccataaatacttgaaataaaataattcatgtacatgaattgaaaatttcttgccattattattgaagaaatgtcatttctaagctggttattttcttgtgcattttttataacttctgaaatcaaattttccaatccacttctattaggattatctatgggattagcgttaaaaagtgtttggagtctgtatctaaaataaattgctgtatattgaatattttctctaaatatatgatttatgaaatctaatatcttattcaatgtttcttttatatctcttgtttctttgaatctttcactaacttcattaaaattattatcatgattatttataagtgcctgaaaataagctgataatattgactctttatcttggaaataattatataacgtccccttagaaatatccgatttcgttgctatttcctccatataggtttcttgaaaacccttttcttcaaaaagagctaatgcactatcaattattatttccttagttaattcttttttacgttctcttctatttatcatcaaaatctctcccatttttatactcagtatatttttgaacttagtataattttatactacatcaaatattttcagacgtcaatattctttatattaagacttttaaataaaaaaataaccatctgtaagcagctatttaagccacatacaaatggttgtggttcatggtgaaagctaaacacgacctttgaaatccaccatagaatttttttaattctattctttaatattatactttctccattttatgcattcatgcattatattcctagtctaatccattaaatgatggataagcagattccccatgttcagctacatcaagtccatcagcttcttctgagctatcaactctaatatccataaacattttcataacttttataattaagaaagtcatcccacctgcaaatattattgttattacaatactcattatttgtgcaatgaaaagtttaacatctccatagaaaagaccattccattgtgctacaggattaattgcagtttgtccaaaaattccagttgcaataccaccccaaattccaccgattccatgacatccaaaagcatcaagtgcatcatcatatccaaacttagtttttactttttccacaaagaagaaacaaattggagatactgctataccaattataattgatgaccaaagtggaacaaaacctgctcctggtgtaattgcaactaaccctaatactgctcctgttgatgctccaagtaatgttggcttaccatgttttactttttcaattaacatccatgaaagcatagctgctgctgctgcagtatttgttgtcatgaatgcatgtacagcaagtggaccagctccgagtgcactacctgcattaaatccaaaccatccaaaccaaagtaatgctactccaagaactacaaatggaatattatgtggtctatatgctataattccatgtccacgtctcttacctaacataatacaagctacaaggcctgaaatacctgagcttatatgaactacatttcctccagcaaaatcaacggcacctaaagaacttattaatccaccagctccccataccatatgtgccattggataatatactaaaagtgaccatatagctacaaatatgaacaatgcggaaaacttcattctttctactaaagctccagttataagcgctggagtaattattgcaaacatcatttgaaatgcagcaaaaagctcttgaggtattgtaggtgcatatgctgaaggctctgctcccaccccattaaaacctaagaaattaagtccgcctattatcccatgaaagtcattaccaaaagacaatgaataacctactaaaacccacattattgatgctaatccacaaacaaagaatgaagacatcaatgtatttaaaacatttttcctacgaaccattccaccataaaaaaatgcaagtcctggtgtcattaaaagtacaagtgctgaacagattaatataaaactgcaatcgcctaaattaatttccatataaaatcctccttagtatgttaaatctcaaaacaaaatttcagctatttatgtataagtttttttaatttttgaatgtgccttagcttaaaagttactgcgcattacctaaaaattaatttttgaattctttttctcaactaatcataatgtcctattttttgtataaaaaaacgacatccgaaaaatatactttttaaagtatgtttgtcgaacgtcgtcgttcttatttcatagtatattattctcacagaattttgtcaatattatttacatttaaagatacaaatgattattttattatcataacaatgcctaaatcctccagtaatctataaaacatggaataattctaatataggggcaatgcccataacgaaggaaacaattgatgcagctgaaaatgaaatttctaatgatttgaatatctgcatggtaattcatgtagatccagtaaaagaactgcctaaaaaaataaggctcagcaatagcccattttcactaatcttataccttgtctataaaaagtgagctgtcacataaaaaatatcactacagctttaaaaatctttatcaataaaaaagaattttaacaatgctcttgtgcattactaaaattctttttacataattataattttttaaccttgaatttatccttgtcatttactattttaatatttaaattatttaatactttatctaaactttttatttgattaatatattttatattatcttttttaattaccttttctatcattttaattatagcttctttttcttcagcttctaatttaattcttttacatatatattctctgttaatgtgaattaatgtagtccaaatttgttcttctactatgttattgatattcatcataacccaagtaaaatcttttcttctatcttttacagggtatgcctccttaaagaattttataaaggcatcttcttctttaggctccttttcaactacatatttgccaaactgattttttaattcattttgaagatacataatagtattcggtttaactttatctgacatcttctcaatattatcatagataaaattataagtatcttgaatcttttctgggtcagcttcacccttttttagtatcttagcaatatcaatatattctaaaatgttcttcttacaatttaattctttgttatataacttttcccatatttcttctgaatttaaattttctaagcttaagttttcttccatgcttacactccctggtatcttttaagatactatgtattaaaataattgtactcgtgaaaatatttgtattaaattattataaaggtacgcgataattttatcacaataaaataaaaggagcaattataatgaataatatcttgaaaattaacaaggaaccgtcaaaaaataactaataattatacttgtatattttttatactttacttgttattttatttctgtttccttaattaaagtaatctaataattattccaataaattaataaccttctcatctttaccacaacactttttatatttttttaaactaccacatggacaaggatcatttctttttatatccttatttgcctttaagctaactacatttgatttaatctcattagtggttgaacccttatatctccataacctaattttcttaacaaatttattcatcatactagatgcaacatatctggcttcgtcattttcaatattaattaattctatcattttatctactgcatctttaggttcattttcttgaacatcaaaaatcaagtcttccatcatagctattagcatgtctctatctactctaaacatattagtaaactctttataaaaagtttttcctgctttactattataaacccaattttcttctaacatatttaataattcttctttcgaaatcatggcataactcaaatctttttctgtatctatatcctttaatagttcctcaaaattatctatttcattattaacaataaatattccttcttctctatattcattgtagtaatatgttgcctccctaattaactcttcaaattcacaattttctatattaaaatatctttctattatctctttagcatcttctagttttaaaataccatatactttattcattgccctaaagatatttataatttcactattgaattttattttacgtctatattcaagattatttctttctttgattaatccttgtactatttcaggcattaaaaatattgataccccatcttttgcaattggaaagagcattccttgctgtataaaatatacgctcttatctgcttcctcttcatcaatatcatcaaaaagttttacacctttgctatccacataactttttaaaatcttatatctttcttcgtcaaagaataaagctcttttttcaaccaaattcttatattctttaagtaatgtttcaattaatttttctttatttaaacctgatatcttatttactccaagatttcttgctatattatatatttcatctttagataaacaatttattaattcatttaaatcaaaagaataaactcttttacttagctttttctctattttatcagcaagtttatctaacccatcttctatgctcctgcaatcctcacatagccaaccattattttcatcactaaaataacttgcttgttctccacagtttttgcatttattattttctatttcctcttcattgcactttttcatctcaatgcatttacctgtattttcttctccattttttatttgtttattataatcattctttttcttcaaataattctatctcctctgtatataaaatcaagctaattcttaagcacaaatttgattttatatataaattaaatttaagtcaataactcactagtactttctatttaatctaataaaataccaaaggctatttcaaaattaaaattaaattcctattttgaaatagccaagtcttagttatttattaattttttaagaaattaactataaattttccattgtatttccttcaccaactaaactatagaaatctttagtaaatacgtctactgcactaattgttgcatcatttttaattaacccatctattacatcaggtgccgctgtaacagatccaatctcatgtttacataaatttaggacttgttgtgaatttttaaaacttgctgctaatacatcagcatttaagttattaattttaagcatatcatgaatatcttttgaaacttgtacaccatctgcccccatattatctactctatttacgtatggtgctgtaatcttgtccctgccttagctgcaataaatgcttgctttgatgtatatacagctgtagccataaaacagaaacttccagtttctgtaacgacccccggggggggtactaggcaggcccaagtggttcaccttcatacaaataactaaaaaaagagcagctaacttttaaaatggaacctatgaaatagacactaaaaaaagactatttcaataggttctttttttgtacaataaaagataagaagaaatatagtaaggttgtgaaaagaatgagtaaaaaattattttcaga

SEQ ID NO: 80 - DNA, 28598 bp, Clostridium beijerinckii
taaccataacaaatttgagtctatttttctatattttttcacttaataagtgaagttttgaatttgttaagaacagcttaacgagccatgcaaagcatgtttcatataattttatgaataattcaggataaataatctttatttcacgataatttactattacgtttttttaaattgaggaataaaaataccgaaaattcacttctaagcaataaagcatttcaatcaattatttttcatatttttagcaactctagtccatatcattccaatgtaaaagcactatatctattatttattgtttatggtctctagcgttgcaaatatcatatatggtagaaacacccctggtactcctgaatagatacccttcatattaaaaaatattatacttgtaattgcaacgaataaacaaaattatcctgttttaattccccttcgtattcatcacatagaaaaatcacattaatataatatacttggtcaccatttggatatactgtatgcatatcttctcctgaaaaaaccttataaaattttaatttgattggatttatacctatttcttcattcaattcacgtttaactgtttcctctactgtttctcctaattctagaactcctccatgttattgcccagttaccactgtctgctcttctctgtaataatatttttctatttttatggattatagctccagctgctacaagaagtaatggtgaattaccaatatgctttcttaacttttttatgtattcatccatatattttcacactacccttaacaattctttagatgtctaattcataatgctcttcagtttcgaagtaactaaaagataattttgaatttatttaattctctctgaaagctactgcatcaatctgaaagtcaattccatctctaataaactttgtttcacatgcctttcttgctggatattttccttcaaatctctccttaattatttctcctaaaaacgataaatctttaatatctctaaataagcaatccatttgcactacagctttcaatgtcaagcctatcttttcaagtctttcactcaaaacatcaaatgcaccatttatttggttttctattgattgcccctcattcttcatgcaatagctgatataaacatgatttcctgcctcaacaatcgcagagtgtgcccattcttcgtctatttctgttcttataatttctctcatttaacattctcctcatattttattttcgttacaaattcctatttatcttttagttaaacaaacactattggttcccataaatttattattatgttttatgatacatttagttctttttcaattactttcataaagaaaccatgacaaattatgcctcatctaagagtaaatcaatcaactgttactatatgaaatgtaaatggaaattcctcagcttgtctattttcaaaatcaactttatatccagttccatctttataaaagaaaccgtttttcaattctatttttacatagcacatattttcatcattttcgttattatgtttaaataccagggttcaaatgcctttattaatatttctctaatcccataatttttttctaataatggatgaccaatattatgagcaattccagtaaaatgatataatttattacacattgagattttattatccttctcgatctcttgtactttttgcgattttgcataagaaacaatataaaatacaccattatcataaaaagtatccacaaacctaacagatggaatattatcatttgatgttgctaaagcaaattgataatcttttccaaataacacttctagaatatttaaactattttcgtatgcagtcattttcactctctcctttatagattattgctcctaactttaattgcaggtatgtcctgttatattttcttatatttatacataatagttgaaccatcatttttattaaatactggtggaaatgttttatactcataaccaagcttattataaaatctatgagaacttttggaagatggaatttcaattaaattgctatcaagacaccattcatcaagttcaagatgatgtacaaggtctcttcctatacctttccccctataatctggatttacgaatatagcagtaaaatagctttgtttttcttgactataatctctacttactcctccacaagcaataatcttgttattataccaaacttcataataatgtcttgtttcaataatgttttttagccaatttgcagtaaatgtacctaaatatttttgaaattcactctcattataatctatataattcacttctttcatgcacctatgtataatttctaacataatatcaacattttgtatatccgctcttttatatatcaatttgcttaactccataatattttccttctcaaacatttatttcgctatttaattacgcatatattattttacttaacttcaatatccttacatctctgattatgaaaaatatcaatactaacacttacttcttttaaaatagtttcttgaaaaatttaacaaaaccattaacaattatgcctatgaattgtaccgatctcccaaaaatcatgccaattattatcatgatcaatacaaaaatcacacctataactgtttgcattgaaattcctctcttctactacttcttatctaatcattcatatttttagaaaatggatcatagctactattttcattccatgaatattcaatgctttgactaatttctaatgctttttcttttcctattaagtcttctatcagacccaatgccatatcaattcctgcggatactccagaagatgtatatatgttaccatcctttatccatcttgcttcttttacccataatacatcttcattttgttctgtaacccatttaaatgctcttttatttgatgtcgctcttttcccatttaaaattcctgctttagcaagtaaagctgaacctgtgcatacactaattatatattttgattctttggacatattttcaatgaattttataaaatcattatcattaactttttctcttgtaccacttccacctggtacaaataaaattttcaaagtatcattgtctcttgtgtataaatcagtatcaactctcactttttgagaactttcaataatgccaccatcaaccgatataaaattcaatttaaaaatatccggtaatcgtccaaatatttcaacaggaccaaatacatctaatgtttcaaattcatcaaataaaagtatatcaactctataattcatgttatcaactcccaattttataattttaaaaacagctcacatcatcaattattcttaattttaaaagtgcggcccgtaatgcccactcaaaataacactaattacctgcttttcatttaatataaactttacatgctatttataaatacttacacatttaacgaaatatcgtaaatgtctctatcacttctgtgttgcaattaaagcctttaagtataagttcaattcctaaaaattcattttcattataatcaacattgcatagctcttctctcttactgtatgtattagtcatttcattaaataatattgttaccatttcatcagtccgctgaacatttatgtttcctatacgctttaccttaggaaggataaactcatcacagcacttgctttcattaaaaatatttatacctatccatttgttatccttatcaaataatagctcacacagggtatcctgaattgttttgactttgacattagactcttttaatttaatatatattagagaaaagttacttaatttttcaaatgttattttcataaaaatattcttctcctaacgttaattcataataatttactattacgttctatctacagatagctgattacctcaactataaattaaaattcgttaaactctcaaagctaattccaaagctatataaaaatttttcaactgatgagtcctttcttcatcatttcctaatattcttctatcccattcctgagaatcaagtaaatcaccactaatcaaaaaatcatagtattcaagtcccctaaaatcgcatacggcttgtacaccagcacattccatctctactgcaatacagccttctttttttcttttttccatgttagctttcgtttcgcgataaatgccatcagttgtccatgttttcccctttacataaggaattcccatatctttaaatgcttttgcaataacatcagcatttctaattgttatgtaatcttctgctggaacatagtgataagaaaagccctcatcacggtatgcttctgttggaattattactttccctgcagtaatttctttatctaaacaaccacaagaaccaaacattatatatttttttgcaccaattaagcaacgagcttcttcaatgcatgtcccagcacctgttgatgaaatcatagtcatataaaatgcaatttcttttcctttgtaattcaatttataaattggaattaatccattagctgacattatatcatcaattttttcacatctaaacgtctgtaaaatattttctactacaacatttgaaaaagttacaatacaagtctcacatactttttcttttttttcataaaaattttctgggctaattatagcttctgttttatcatcaaaagtattagttatcataaaatcgtttctcccttttaaattacaatttgtttatatctaataatttttattttgcatttaattacaatagcaattgcaatattaatttattatttattcagtattatcaagacttaaaaattttgtttatcccaattatattagaaacttactatctatttctgcaatcgaagatttataatttgcattacttttaagtgactgcaaattaaattacggtaccaatatatttttctataatttcaatatctggagggctaatatcaattggtaagttgtcaatttcaaagaattctaaagaactgctttcttcattatctatctgtaattcaccaccatatacatttgttgtaaatacggtaacaacattatatacttcatcaccatgaggatatatataatgttgtctctcacctgaaaaaacgccaaataattttaaatcctttaaaaatattgtcaaccctgtttcttctttcacttccctaatagcagtttcttcaactttctcacctatttctattgagccaccaggcaaaccccattttttgttatcagttcttaactgcattagtattttattttgattactaataattacgcacgttccacactgaattagtggtctttttccaacaaattttctcagctcaagtatataattactcataatttcctcccattatttatttttaatatagaatttagttcatcataatttgctcccctgcatcaaccccaagttccacataatacttactactacacatatttcaaaactctacataaaggttgggttatccttctatgtaaccattctagatttaacttttttaaaatttctggtgtacgctttacttttccagcgattacatctagacttcctcctacaccaaaaacgactttagggttaatatcgtttttatgactataaatccatttgtcagcaagtggtgaccctaatgcaactataagaatatctggattggaaatcctgatattttcagatgctttcatgtttacttcttcatctgaacctagcagataaaatgaccaccctttttgatttccaactttaatggtttctaaaagtaaatcataacctgtaacacgttctggtacaggatttccttttaatcttgaagcccaaacaattcccactccatcaggagttattagatctgcaccaagtgatattttctttaattccggatcctcttgaatctgtactgcaatttctggatttacagtaattaagtgaaatattctattgctaccttctgatatttttgtatcaattaattcaactgtttcttttagatttagttttgaaaaatctatccctaaaatatttacataactgcccatatcatatcctcttttattaaaatccaattagtaataatttcaaaaaatattaaatgcaatacttcgatattatttattaatatcatccattagattgcaacttgtataacacttattatagcattatttacaaaatattacacatacaatccatatatctgctctatatttttaagtcttttattctcatattattaatgctctacattactttggaccataaagtttataggtttccataaaaacataataaaagttacttaatcattaataagtattgactaaaagcataaacggatatattatagataaatgcagtctgcaatgtacttgattaaaacaattatatttaggttataaataacttaaataatctttgctttaaaaataagatttatattaataataaagttataaaaaaattttaaaggagatgtttatatgtcagagttttgggaaaaaaatttttcagaaaagcaagcaatgtggggttttgagccatcaagcactgcaattgtagttgcagagtactttgctgaaaataatctgaaagatatcttaataccaggtgttggatatggaagaaatataaaaccatttgttgataataacatggaagttacaggaatcgaaatttctcaaacagcaattaatatagcaagagaaaatggaattaataataaaatttatcatggctcagtatcagatatgccttttgaaaataaactctatgatggtgtagctagctttgcacttattcatttgttaaatgaggatgaaagaaaaaagtttattaatgattgctataaccatttaaaaccaggtggatatatgatttttacagccgtttctgaaaaagctccaatgtacggtaatggtacgaagcttgctgaaaattattatgaaacagcgtatggggtaaaactgtttttctacaattctaagtctatagagaaagaattcggaaattatggtcttatagactttgtagaaattgatgacatatataaggataatccagataaacctccagtaaactttttaatgataaaatgcagaaaagagatataaatctgataaatctaaacttttttgcttacaataaaattatgtagatgtgctagttaactattatgacaaaaataaaaataccaacttttcttaaattgaaatgttggtatttttattttgcctatgttttaatatgatgttgaaatatagcctaaaaaattatagttgagattgtccatctataatactaattttaaaaaaactacgtattatttaatttctgcaaaaatttcatgtatatttccatctgggtcagcaaatagtgctgttctttgattccacggcatatcttgtggctcgtgaacagaagtcgctccctttgagattaacgtcttaaatgattcatcaacatcattaggactttcacatgggaaagcaagttcaaatccctgtccaaatgactctttcctatattcgtcactatacacatacataacatctctcatacaaatagcaaaccttactccatcattttcaaattcaacataattaccaagatcattttcaattctaaatccaagaactttattatagaaatctttcattctctctatatcatttgtccaaatcgtaataagattaatttgtgctttcatcgtatatttttcccctttcttaatttaacatatagttcattttaaaaaaataatgtgaaataatttaactataacgtggaatttgcgataataatcaatccactttctgcttacataataaacatggttgtatcttttctcattaacattaatgagacgtgtcgtttactagattagcaatagcttcaactatgcatttccacgttcctttaggcatatcacgtcccattccttcaatcaaaagtaatttagcattaggtattgtacgtgctgtatcttttcctgcttcaacaggaatcaatggatctgctgttccatgaatcaccagtgttggaactgttaataatgaaaggtgttgtcttctatctccattagcaaccaacgccgcattttggcgtacagctccttgtggataataagaacgatcatagctttcttcagtatatcgtattgcacgttcctcttcaaaaggaaacccttcgctccaaagatttttccacatacgtaaagtataatcaatgtatgcatctcgtccatttgggggcattgctgtaacaatcttcaatgtttctggtgatatttgtggattgtttggattacctgtagatgacataatggaaattaaactatatatacgtgaagggtgtttataagcaaaaacctgggcaatcatgcctcccatagaagcaccccagatgtgagccttctttatattgagcgcatctaataagccagccacatcatcagccatatcttccaatgtataggcgacattaattggttttccctcttgcgctgcctggtatattctttccatatcaggaataacagccgcatcgaattttgtagacaatcccgcatcgcgattatcaaaccttataacttgtaaattttcctttgcaagcatttcacaaaaatctggttcccaaaaatttagctgagcaccatttcctgcaataagtactatagtaggatttgtcttctccccaaaaatttcatattcaatttgtattccatttgcatttatgcgtgccatcgcatacatctcccttttgtatttttattattaatatactactataaaacgtctttttatcaatttgtaaataaacgatcattatttagcattaattcactattacgttttatagtagtattatgcattgaaaatatagtaaattcaatctcttaaataataagatttcacaatttgtcattttattttattgattcatgatttaataaaaatgtaaatcaacatttcccctaattctcttatacctttaattaatcttgtaatgcagcaaagttatctttctttacaattgatattatcttttcaaaatgttttgtatactctttcaatatgttttactgcattttcaagtcctttttcagattcaataatatttttaatttcttcagcatttcgaatatatctatcattttccatctctttaaatgctttaactaaatcatatacttcaagatttttttcctttaatggatgtgtagtaagtccttttaaataaagtctgttagcccaaaacggctgatctacagtaaatggcatgattaattgtggaaccccactaaggagagcctctgacatagttccgactccaccatgatgaataatacatttagctcttctaaatagtagtctatgagatgctttttttactgccataatattatcatcattttcaaaagtcataccacttgttccagttaaaacaatagctctgttaccggtctcctttaatgctttaatcaacttatctttaaatattttagggtcttttagatgcatactgctaaaagacacaacaataggcttgacaccggatttcagaaaatcctccaattcatcatcaagctcagtttcaactatatctaaaaagaaaaatcctgaaagaaaaacattctccctccaagtgtctacttccttaaagagaaacgggctaatcggatatactatcggaatatttttcccattcactttaaacgcaagctcccctgcctttctttttggtaaatgcaatgatttttttctgaagtcgttaatatgtttcatataagataactctccaagtgaagaagctttataagagagtttatttaagaatggtccaaaattcttattagcagatatggccaggttggggaattcagtaatcggataaacaattgaaataggaggcatactgatgcagggaatatttaaatattcagcaatatcaactgcccctagtgctttaggatgatacactatgatatctgctccttttgaagcctctaaaaagtcatccatgctttttctatatgcgggtgtaattacttcctttgcatactttaacattctaaaaacattatagtgtccgccattaaaaatcttttttccttcctcactctctaggatagccataaggtctgctgaagcttcacaaaaactcacaccgttttcctgtacaaaacttttaaaactcgccccagtgcacaccaatgcttcatgcctgttttttatgagttcttttgcaagtgcaacatatggttgaacatcgcctctgctacctaatgttaaaaatactactttcatacatagtttctccttcaccaatataatcagttgttagttaaaactatcccctgtttatatttcttatgtccttacacttaatatattctgtcccattacgaaactgataattcacataatattactattactttttataagaaaatgatgaagatattattatttaaattaatctgatactaactttctacagattgtgtattacagcttgctaaatgtttgaatatcccctaataaggttatttttttattatcaataattattccaccggtatttgtaattgcgtatactttctctcttttttcttctaataccttattaatgtatttattctgaatttcagtttcttcatagtgaacttcaatatcaaaatccttaatcaaatttagtcccgtattgtatgtaaatatttcataatcttcatctggagtaatgtgatattctgatatttggatcattgctcctgcactactgccaataataacacctgtaaaattttcaatatcatcaataagattaaactctttaaggcgtaacatcattttatctggcagaccaccagtaaaaaatattatgttggcattttttattttgactttcgcattttcctctgtatctttaaaataatttatccaatttatattttcttcttcaattccgtaattcaaaaatagaacaacaatactttcataatatctaccattattcttactataggcgttctgccaatcattatcactacttatattttcgccaaatgaaaatgggattattaaaactttatcattagaatttatatatttcgatactatatcttttgcccaactttcatgaaagttatataaactaaacaacatatttaccataaatatccctccttattaattcacaacaatttactactatgttttataatagtatgccgaactattcctaactaaacttttcatggcattgctttttaattggtttaaaatctttttttcaaagttcagtattacctttttctatatggtttggtcttggaccgattcctatagatcgattaactctttcatccaagtgctacaattaagtacacttgctacacttatatgctttcataatttaatcccctttattttagaattgcacataaaaaatatcgcaaatctattcttagctttatgaatagtgcgatactctaatttactattaaattttcagatataataacatatataagtaactctacgaattggaatttatctcttcttaccttttttattgttagcaacaaaaatgcataaaaaagtagcacctattgcaatccaaagagcaatattcatttaaatcctcctctcaaattactattcaccttttagtattatagcatattttgtaaatatcacaccattcaattttcaaagaacattttcataatctactaagttaaatctacatgtaatgcattaactattttcatctaatctacaagcccatatcctattattttatgattatccattcctataaacacaaaaatattattaggaacataattaacatctaatataaattcaacacaatatgcatcctttccccaataagactcatcagtaagtccaactcctcctgttatagtttttatagaaattttactatctttccatgttccttttactttcttttgggtttctgaatctaattgattaaatgcaatttctctaatatcttgttctgatgaacttatatcactacattctttaattcctgcaaactgttctcccaaaatgctctttaaatcagaaatgattttctcattctttccaatatactgaacaataatatttccctttttaaagaagtgaggatatgaactccaactagcactttttgatttttcttccccccatggttcagtaattgtatatccaaatccatctttattaatatttagtgagtctttttccatttctgtattgctattatatatatacacaactagttgttcattaccaaaagttattatttttcttgtagttggtaagaaatcttcatctgcatccttcacttctaatttatatccgtttaatttcaaaatgctcgtgaaatcatcaatagttgtgacttttccactactttctgaatttgatgtattactttgctcagcctgaatccatgcgccatcaaaacctatgttatatccatcaattgttgtattttggaccatagcaccactagcagataaataataccacttatctccattttgcagccaacctattttcatatatccgttgttatcaaagtaatatcactttccgtcaatctctttccaacctattgaccatgggctaccttctgtattccaccatccattagaatcctgtttccattctgcatttgctactattttatttaatgtaagtatcgaagttactaccaatgaagtcgctattattttatttaaatttttcatttctacttacctcaatttcattttttatttatacataataaattactattattaattagattatagctttacacaacacttattataacattaattacaaaatattacacataacatacatatactggctctctatttttaagccttttattccaatgtttgagggtaatacattactctgacctataaagtttttagcttttattatttatttatttgtataagatactttaatccatttgaatcactaaatataattactaatatatttagttgcagcacacatatatgatctgatagcatatatgtgtgctttaaaacttatgtaggtatgctaatatcaactattatggtaaaaataaaaataccaacttttcttaaatagaaatgttggtatttttattttggctgtgttttaatattatgttgaaatatagcttgaagaaattatagcttagattgtccacctataatgctcaatataagatcattgtgtattatgtctaaatcatgcaaaaaaacactgcaacttctagatgatcatgtaatatttcaatctagtctttacttgtattaattgttactcatggatgattacgatttatttttactggtattgcccaaacaaaaagagccgtcgctggtccagcaataaaaaaacaatcaatcaaagatctgtattctcttgcaatatttaaaccatttatgactaaagaaccaacactactaaataaaaaagcaattataaccaaacaaactcttctgcttattttatcacatataaatttttctatatctacttttaagcagatattaaaacatattaaaaaggatactacatatgttgcaagtgctaaaaaataataataacttttcataaaaatactcttccccatctataaataaaatgacttaataacattgtattccaattataacatatttttcaaatattaaaatgtacgtttttttatttaccattacgttttatgagttggtttgattgcgcactaaaaactcataaagccaatgtattaaataatactattttataatttgttatttgattttaacaatttatgatttaagaaaaaatatacatttgctctttataacattagccacctccactattttttaggtcaacataccataatcctaaattacttttctctacggctataaaatcaggtccaattcctggattttcacagtaatatttacctttccatggtatctcattactcatatatatatctgtttttaacgcctttgctaaatatccgttaaaaaacaagtgtgttcttattgacttttcaggtgttgaattgcaaaataaataacttcctgaaaacgccaacactattattacaaagataatacacttctttaatactttcacttacttctcccctcctttataaaaattccactctattaatcaacaataaatttactgttatgacgcaatttaagaataccatgacataactttataatttatctactacaacatgatactcattttcttagaagttgttttttagtatatcatcaactcgtattgaaatactttctttacttccacttttcataatttcatttagtagatttaaatcgttggaatttaatttaaaaattccaacgtaaggctgatccacgtaaatatcatcattctcttcatagaatgacctccaactagtccccccatttataaaattcaaaccaattagagtaaattttgttttatccggaaaattcgaaacactatctttacttgtcttatttgaatttttcaatatatttagcaaattatctatatctgattgtttagaaatagtaatcttttcaacaccttgacaatggctaatattgataaattcaacactacttaattgttttgacttaggcacttctagttgactttcccttaacataaaaatcaaacctacggcaacaacaatacaaattgttacaacaactaaacatttcatctttctattcatattattctccttcacaagatgcgaattatacttacttctcaataatttactattacgttttattttagtactatgtaactccaaaatatcacaaagccattaataataatgtgataataatatacttttcaacttttgatttgtaaaacttctattcagtagaaaactcactttttcttggttttcgaacatgctttttcatatcattttcacatgcaccgtattttttataattttcttgtccttctcgtaaagttagcccgtggttagcacctgattttatatctaataatttttcttgtgaaacatcttctgtttcattatataatgatgtaattgaattgaatttttcatccataataatatacgcatcatcttcccaaaaacaaacaggacatatatcaaattcagcacgtgtttctaatgtcatatagccacaacacaaacatttatatttcacatattctcctttatccataatctttttatcatctctaaaattatgatttatttaatatagatattataacatattttgtaaatatcacattattcaattttcaaagaatatgttttatagcaattgctacgcaaaaaaggaccattaagttcataatcctaaattacttaaaatatgtttcaaatccattattaacaatatatgaaccctttggaacttgaattgctactaaatatatattcagacagtcgacacatgaacccattgcatttaataagcatagaaatatagtgaatccatttaaccatccgaaaaaattcagaataaaaggtaatacaactgacagcaaaatgaaaggcataatagaaataattaaaaatctgctctttttgactttttcagtagtgtaaacaaatccgaaaaagccatttatcccccaatatatttgacttgatttaaatacattaggtataaaacaagcgtgaagaaattcatgtatagtcataaagatgaaaattgcaacaatgtatataagagtaaataaatttactgtgaaattaatactaaagccatgcccactactactaaaaatttctttcaattgtggatataaataataggaaatagcaatagatataatcccatttataagcataaaaggcactgatagtaacattgctatacccaaattagagggttcttttagttttgtccatccctctgatattagcttaatactaacttccttatctgcagaaggtattttctttaaatatctcattaattaaaatcctttcatcaaaacatagttgatttttattgaataatccttatttcggtaagttactacataaaactagatttatataaagaaaaatgcttcaactagaaagtagaaacatttttatgtagcaggaatttgaaaatgagagtcgaatttatgtggatatcaactgaagttgaatctatgcttgttccatatatgctcatgaaatatatactaactagaaataagaattatgctagttcaaagcctgcctttgatgctagcatattggacgcaactgatcttagaatcatccatcataatttccttagaaactggaacaacagcataattcttatttcggtaagttactgcataaattcttcctaattaaaatctccatcatatattgcttttgccattgggaaaggttcaagtgctctttctagaattccttgaacatatcctattaatactccataatttacaattggtatttcatatttaactgcattaccaattcttgaaagcatagcagctctatttaacatgcagcctccacaatgaatgataagtttgtatttcttaacatcatcagtaaatgaatttccagaagaatattcaaaattaatttgttttcctgtcatctgacgtacccatcttggtattttaactgttccaatatcatcacattgtctgtgatgagtgcatccttctgagattaatacgtaatccccatcttctaaactttctactgctttagctccttttacaagttccataagatctcccttatatcttgcttgcaatattgaaaatgatgtaagcattatatctttaggcgtatctgctgatgcctttaagaaaacttgtgaatctgttataacaagtttaggttttttctttaaattttcaagagtttctcttaactcatgctcttttgttacaatagctatggcatcactttcaattatgtctcttattgtttgctgctgaggaaggattaatcttcctttaggagctgccttatcaataggcgtaacaagaacaactaaatctcctgggcttataaggtctccaactaatttaaatttatcttcattatctggtattacgcttataattttttgcttaagctcatctattccatttttatttaatgcagaaactgaaacaacagtagttccaattgtcttttctatctcagccaattcctctttttctatgcttttcttatctgccttattaaaaatacaaattgtaggtatcttcttttcctttatttgatctattattgatctatcattctcagtaactccaacagtagcatctaccactactaatgcaacatctgtttttgataaaacttcaatagttttcttttttcttgactcacctaattcactttcatcgtcaagtcctgctgtatcaataatcatacaaggtcctatcggaagaatttctatagctttataaacagggtctgtagttgtccccttaacatcagaaacaattgaaatttcttgatttgtaagtgcatttataatacttgattttccagcgtttgtcataccaaatagagcaatatgtactctttctccagacggtgttgtatttaaactcatattatttctcctttgaattaattttaattactcaaaaatatttttttaagttgcctattctattataatataaaatataaagatatacattgcaaaataattctttatttattgatgatttattatcagtacaaaaatattaaggagtgttcattttgaattatagattagaacaagatgtattaggtgaaagaaatattgataattctacatatagtggaataaatacagcaagagctttggagaattttgatttaaacagcaaaagtgtaaatctaaatttaatacgagaaattgcccttattaaaaaagcagctgctatgacaaataaaaccttaaaatttcttgaccctgaaaaagccgatgcaataataaaagcaagcgaagaagttatatacggaaaatttgattatgaatttaaacttagtgcatttcaaggtggagctggtacatctactaacatgaatgtaaatgaagttattgctaacagagctattgaattgttaggaggcgttaaaggggactacaatttagttcatcctcttaaccatgttaatatgtcacaatcaactaatgatgtttacccttctgcccttagaattgcggcaattagattaataagaaaattaagtgattctttatcaagtttgcaagaagctcttcaaattaaggaaaatgaattttcagatataataaagcttggaagaactcagttaatggatgcacttccaatgactgcggggcaaagctttggagcatattctaaagctatcgaaagagacagatggagaatatacaaagtagaagaaagattaagacagataaaccttggtggtacagctataggtacaggtttaaatgctacaaataaatatgtatttatgatgacagatattatccaaaaccttactggccttggaatagcaagatctgattaccctatggacattacacaaaactgtgatatattcgtagaaacttctggacttttaaaatcgtgcagcgtaaatcttcttaagatttcaaatgatttgaggctccttaattctggtcctcgtggtggaataggagaagtacttcttcctaagatgcaggcaggctcaacaattatgccaggaaaagttaatcctgttatccctgagatggttgctcaagtaagcttaagagttatttctaatgacagcgccataaccatggcaagttctatgggacaattagaactaaacgcttttactccacttatagcagaatgtctacttgaatctctagaacttcttgaaagaagcgtcacactttttaaagataaatgcataaatgatctaaaaatggatgaggatagatgcttagaaaacctagaaaattccttagtttctgcaacatccttagttcctcacctaggttatgataaagccagcttaatatcaaaaaaagccttagccactggaaaaaccataagagagattcttctagaagaacaaatattacctgaagatatcattgataaaatattatctccaactgaattaataagaacccatatcccaggaaaataaaacaaattgaatgtgccctttaaagtatatttttactctaaagggcacacttttattttaataataaaatcttggaatattcctttcattatcaaatccaggtataactggtggtctaaattcattcattccaaagcttctgcttgattcagttgtattaagttctgcaagttttgttactccaacataaatatctgatatcctataccatgttgcataatcaactactcctgtttgaggtaatgtaaatatttgttgaaatgttttaactgctgcagctgtctttggtccatattttccatcttcagctatcttaggaatgagcggataatttcttgctattctgtttaattgaccttgaattactcttacagctggtccagatgacccaagtgttaattctcttcctgggtatgacattggtattcctgcaaccttctcagctgtagttaattcaatattatttccatagtaacgtgttaatatatcgtatggtccaagaccttggcgtgacaattcctgacttccccattgacttaaccagttaggacaagtaacgctctttccatcgcaatattgtgcaaaaagcggctgctttcttccaactcttcttatatatgttgaaaagatttcatctacaatttcacttatgttatcataaatatttctgccataattaaatgcttgatcataagctgtggaacttgtaatatcgaaattttttcccttacctctataccattcagtaaatattctatttaatgtgaatgatacaatacagaaaatatttgctcttatagctgatcctgtccaagttgaatatatttcacatgaggcaacatttttaatataatctttaaatggcaccttataatttggtgctgatggatcatttggactaccttgatgaacaatgacaaattcaggcactacaggctgtggtaatacaacccctgaagttggcggtggtaatggcttatcttctgcctctggtatcttaggaggaaaatttccattcaaagtatttggcagtatgtctataacttcttgtctcatagagcctctgcctaaattaggttgcaaattacatatctgatatgcaatttctgtaggaaacacttggcatcctcttattattataggattaaacccttctctctcaacagttatatcatataaactataaggtatttgattactattaggatttaaggaatattccaatggtggtgccggtagttctataatattagttaatccaactacatcagtaactaactcaatggttctatcattacctaaagtagattgtcctcttactgttattctagctctatctactggaatataatcgtttcctctgaaacattgtatcttcaagccacctatttttggtgtagcacttccagtgcttggcgtcgttccagtatttgctggggcacttcctgtaatgtttcctgcacctaatgtagcacctccagtacttggtgttgtgacattcccagcagcgcttcctgtagcacctcctgcacttaaagttgaacctccagctgtatttggtatcatattttcgccagtactacctgtaacatttccactacttatattctccataacattcctctttctattttttcaagatattatatttaataaatgcaatatttattactaaaaaatataattatggttaataattatttactgaaagtgcataatatttatgtactcttaatatctttttatgtgaaacctttaatttggaattttatattccagcttaatttaattgaactcatacaggacaaatagagcatgaataaaggaaagtttcttcaagataaaacggtagtgttggtggagaaactatacgaaatatcttatgaatctttggtctattactttctttcatgtacctaaaacaaattttaggaggtgtatttttaaatgatgacacaaaaactagatgcaaaagacacgctcaagatagaaaatgaaaagagaagaaaaatattgccacctgaacagacacttattaatcttgatctgcagactggagatgtaatggctgatataggatgcggcattggatattttactattcccgcctctaaaattgtaggaaaaaacggtaagatattagcacttgatatatcagatgaaatgttgcaagatgttgaagaaaaaataattgaaaataacatatcaaatgttgagactattttaacagaggaaaatcacttaaaattagaaagcaattcggtcacatttgcttttgcaagtaatataattcatgaagtcgaagaaaaagagagatttttaaatgaaataaaaagaataatatgcccagaagggaaaattgctatacttgaatgggaaaaaattgatagtaattttggacctcctattgaacgtagattagacaggatggatctaataaaactattggatgaacttaatttttcaaccatatcaactatagatattggtgaagacttctacggaataatcgcccaaaaataaaatcaatttctattgataaaccaactaatacctgaacttatgggtatgcctcaccgaaatgaatagcatacttttgttccagtttctaggtaattctgctgggtgattccaaggctatgaagttgcccccaaagtgctagcctcaaagaacaagctttgaactagcacatttggaacaacttgtagccaaagaatcacagccatcaaaattaccaacgaaacattccacaaaagtatgttactcatttctggttggaaaatacttcatggttcaagtatagtttatgattgtgttatctatatttttatatatatccaagctaagaaattgacatataaagcaagctaactcatgtaaatcaaaggtataagtaaaagcttgtctatatggataaacaatttaagaacttcatttatactttacaataaatacaatactagaaagtagaaacatttttatgcagcaggcatttaaaaatgagctgttaaaagtgctttattgtaggttgttctacttgtgcttgtcacactgaaaatgggagcaagcacaagtggcgacaacctgcaatttagcactttcagcgaaatttttatagtcctgcgaagcaacaatgtttttactttcggttggctatatgtatgattctaatccatacttggtttatctatatttatatcacaaaaaaagagcccctctttataagaactcttttttatctagatttctaatctagcttaattgaattaaatggctatactcgtccaaaatagaatctaattgttgacttgcaacaattacctcaggatcgaacaaatcaactttttcctttattatatttagaaggttttgttccatctcataaatttgcctatctattttgtttatagaatccataattaattctcctttatttgttaatatctttaagaatttttttataattttatcagataaaccagtaaggtatgttgccaaaattgctgcataaggagggtttgcttctattttctactgatttattttaatttgttttgacactaatatattaaccttaacttacacttatactctttaaaaatattagaaaaaatagtattaatataacatcttgcctacgtttaaccaatttcatacataatatcaaatataaaagtaaatttatatcttaaaaataagtgcttatgagtagtcattaataaattaaaacaatctatcctaaaaactctatttttactaattataacttgaatatatattacaatgtttcatagactactcttgatacaacattcaaacttattaaattgcacccccggccattattcttctcttttaccagccccttattaattaaggggctatttttattaaattatatattttaaaaattatagaattgttgtgcctaattttgaatattttattcatttgagggcaagctattttcatattaatttttgtgaaaaggagaattttaatgaacaaaatgctatttcaaactcgtagagaaagaattatatcatttatcaaactactaaataaagatcttgatttaagttttactgaaaaggaaatcgaagatgataatttcacagatatgcctaaaaagaataatgttatcccatttaaaaaagttgaataacaatgtatctatatttattaaagtagtccaagatatctaaatataataagcaaaaaagagtgccaattgttgtttgttatatgttaaaaaacttaacaacataatactcactcttttttaatttattaaagaaatattttattacggtaatcttctgaacatttcatttcctttaatcgttctattacggagctgtctccccaaaaatgaattggaaacactttatctgtattagtgtttttcatgaaataatcaaatcctaagtaaaattcgtccccttgcctagggtctaaaactacaaatgcagcatcaaaatgtctattcttgatcttattaatttcttcttcaaatctttctcttgcactttcattgtccttttgatcccttccattccaccaccatagattaagatctcccgcatgataaattgttttatcttctgctgttacaataaatgctacgccctcatctgttgaatttaatgtctctattttcaaatctgatatttcaagagttttattaatatctataaattctattttttcataaacctcatcaacaacaccatgagtattaaaaaattttctaccaaatttcttcttgatatcttttgaaaaaatgtacacaacatttggatatttatttaataactgaaaaatatctatattaaaatgatcatggtgattatggcttgaaaacacgtatattgtcttttctggctcaaaatctggaagctgacctttaaaataatcaaatatcaaaactactttatcaagttcaactgaaaaacagctatgttcaacatatgtaatattcatttgcatcatcctttttttataaatttcatctcatgctctacatccacaagagtaatcttcaccaatttaacttaaataatcaattctttaagacaagcaaaatcactggcgaatatattttattttttactctctatcaaatcttaacttactaatcttaaataaatcctatcataacaactataaatatcaaaaataaaactgctaatccagtaaccaatacctttactttaagcattgaataaaatattttgcaaaactcttcttttagaaacttagaaagcacacttattttttccttatagcttatataaagaagtattaataatatagcgattaaaactgctattaatagataccattttgatatttcattatatttattccagtttgctccaagaacccttcccaaagatataaatgtagtagtccatatgaatgcacctaaatatgcactaatcgcaaacttcttatatgataccttagtcatgccagaaaagtagcctgtaatatgccttattcctggaataaaatatgctacaatcagcaatataccaccatatttttgataccatgttgaaatcttatccatcctatttttatttagatgaatataagatccatatttctcaattaattttatttctaatgccctgccaatgaaatatgatatagtaatacctattatagccccacttgtagccactataatgctgagcagataactcattttattcatataaacaacatatccacaataagtcattagtgcctcaccaggcaaaggaaatgctattaattctaacgctaaacttataagcactgctatatatccataatgattaaacaattctataacatgatccaatactctcacttccacggcttaataattttctgcatacttccttcgcaataaatcttatcttaattctccatatttgataaagagtcgcaagcaaatatgatttatttggaattaatgcatttattatattactaattataacctcttttcatttattttgcatagtttaatcatttagcatatattcctttaaacattataaaaagccaacagaacaaatataacaatgttatattgctctgctggctttttaaccgcaaggggatagttattatattgcgaagaaatggttttctattattctatgttactaattactttaaaccttgttcgtagctttcaatcatgtgcttaaccatgtatccgccaacgtatccattttgtcttgaagataaatttcctttatcttgattttcgtaatcatgtaatcctacttctgaagcaacctcagtttttaatctgtttaatccttgttttgcttctggtactaatgttctgtttcttccactattatttgatgacatatacatctacctcccttaattaatattttgtttgcagtaatatattaaccagtatgataaattataatctataaaaatattaacaaaagtagtacagatagcttgtattagataactttagataatcttatgttttactttgaatcctttaccatcatttatgatatttattcctaaaatatcagtgaattgtttaagacttttcatattatttataaatttaacatttcctttagcaatcaatttcttaattacttctattatgtcttttttttcagcagaacttagttccatagaattacttagacactctctattaatataagttaaagtagtccatgcctgctcctctgatatactgtttatatccattaacacccatgtaaaatcttttcttctactattttcaggatatgcagctttaaaaaattctataaaattatttattggcttgggatctttttctttaacatactttccaagctgtgattttaaactattctttaaatacattattgtattgggctttatagcatcctttaaattatcaattttagtataaatatttcaccttgagcatttaaattactattattaatcattctttattaattacgttgtagacacatctaaattgtcatatgcacgatttagagtatatcctcttcccccaacttccctaacgtctgatactgttataaaagcgctataatcaattttattaacaatattttttactttttgcagcttctcagctggaataactgtgctgatagctttagcttcaacttttgagtatcctttttctgcatgcaataaagttactcctgtatctgcctctgagataatagccttttttatttcatcataatgatcgctcataataactacttgtatcatttcttttccaaaagttaaagtcttatttaacataaaataagttaaaaatacaacaaccagaccatacaatacattagtagcacttgaaaatgtaatctgcaaagttaaaatgcataaatcaatgacatttaaagtgatatgaactggagtattaaattttttatttattataattcctataatatcaattccaccagatgatgcatttgcttttaatataagtcctgctcctattcctattaagcatcctgcaaggacacatgataataatatatcattgcaataatgatgcaaattttcatgcttttcaaaaaagtccaaaagaataggaaataaaaatgtagatactaaagtagataaagcaaatttctttcctaaaaaaaataatgccgataaaaataatgcaatgcttataatgtacacaactattgtcaagcttgccccagtaaaatgatttatcactcttcctaatcctgtaactccaccaacaataatattattctctaatattaatgtgctaatagcaaaagctattaatatattccctagaagaatgtaaattaaactattgatttttcctttcatattatcaccccaagacacagaataccataatacttgaaacaaaaatgtaatctatgttacaatctcataaaagaaggtgaaaaatttggataaaataaaaattccagaagaattatattattattttgaaaaagttggaaaatcattaacatataataagaatgatattatctatatgcaagatgataacgcaacccatttatacttaataaaggctggccgagtaagagtatattcttcttcaaaagacggtagtgaaattacaatagagatagttgaaaaaggtagaatatttggtgaatcatctttcattcaaagttcaaaacagcctactacagtaagtgcggttaatgatgttgaattgatttcttgttcattagaagatctgtatccttacctaactcaatcaaaagaattgatgattctgctttttcagttgctttcaaatacatgtaatcatctttcaagtctgcttaaccaagcttacttttataatcgttatgaaaaggtagctaattttttattgcaacagacagctgttcctaataaagataaaaatataagcgaagattgcattccttattctcatgaagaaatcgcttcttgcattggtctaaatagagttacaaccaccaagatattaaactactttagcaaactaggatatattaaactaaaatataaaaaggtaataatactagaacgagaagctttaattaaatatgtagagtaaaaggctaaaattatcttaaaaataggctatgttttaatataatgttgaaatatagcctataaaaattataagtgggatttcccacctacaatacttaatatatatgaaaattatgaaatatttatatatatgtctttaaagtgtaattttaaatatttttcctttcctatgaaataaattgttatcactataacttgaatattctcctacttctatgcccaaacgattatacatagaaaataccttaggatgacttgattttaaataaattgctttataatgtttagatttataatattgtattatgttcttcaaccacatttctccatttcctctgccttcttgggctatatgaaaatagttgaatatcaaaatgtctttatcctcttcgtttatctttataggttctttaaaaaacatcttataatcaagaatgccactactaacaagagcaacacctaaacatttttcgtctttcttcataatatgaaagtccatatttatattttcattgtttcttacattctcaattaatttacagcaatgataaacttcattataatcatcccactcattttccgctttaaacagtaaattttgtattattggtgcaagatattcgcttttaaattcacttgaaactccaaaattaataccattagttttgctaataatcttcattaacgaacctccttgtataatctagttgtaacatttgatagaaaactatttatctttctaacgaacattacacctcttattatttttaatattctaatttattactttgcctacgccccgatagggaatatg

SEQ ID NO: 81 - DNA, 28379 bp, Clostridium beijerinckii
ccatatttatgtacaaaagtataaatacaataaataaaaataaaaaggcatgaaagaaattcatgccattctatttttgttatacctaatttttacatattatactttctttttgtaattctatctcatccaatcataaacttcatgacctactgattcagccatattcctcattcttctgcctgctcttctcattgttttttgactccttctatccatacgtggcattagagacatttcgacagcaactccaattaaaaatccagtcatcattcccttagaaaatctttccataataaacacctctttaacatcaatttattttctataaatatattgtgtattaatcaaaaagttatccaagttaatttattccatgattatatacagttttaaaaatattctaaaaagtaactatgcatattacaatcagctttctatattccagtcctaattaagcacttttcttatttgcattttaaatgcaaatctattattccaacatatatactggtttaattattatcaacgtactctttaagaagataaaaaattaatttttctttttctttgcttaatagcttagaaattatctttttgccttcgatagcgttatttctatataaactaataatttgttcaaatctaatttcattatcatctttcttatctacattcaatatattttccatttgtagatcttcatcttcgccaattaaaattatattatttgaatgacttggagctatgcttaagatttcttctttaaccttagtaccagaaactcttataacatttttacttaaccatttttcaacggttctatcagaagttatccctaagcactctttacatttctcatcaacaagctcgttaaataaatctccagtatgactatcaacttttacaaatataatttccattccagaatttattaactcttgcatctttttataatattgcatagatgattcttcttttcgttcccatgctccagttgcatgatgagctatcccctcgtaatcatgaaatagaactacttttttttgtccatgttctaaagcatattcaacagctctaacagctcccttaagttcgcctgctatttgtcttatatttttagaagagctatctttttcagctccgctttctatatattctacaacatcatcattaacacaaactaccccataagaatatcttccgtcagaagaattataacttccatcaacatatgcatgaagacagtcttttggataactttcatcactcttttttagcattctatttccttcgtttagatatgattttgcctcttctatgtcttcgaaactcttatactttgctccctttaccccttttacatatgctaagcattcattccaagtattgactattacattttcaacctttttgttatttttaatatcaaaaccatattgtattgcataaacttttttcgccatatattattcctttctccgacagtctaacttattattatacttttcatggaatatttataaacttataatctatatgttattaaatttataaataatattttctatagtgatgataattcttctacagcaccatataatttttcaatatttgcagcatttgtaaagttagttagatattctattcctttttttaatactaaaagtatatcatttttaccttcccaattctctactattatcgataatggtatatctttaataatcttatttaaaacaaaaaatataactccaatatcatcaatcacacctataaatggtatactattaggtattatgttaactggtacagttacatatgctattcctgccgacattataagcttagtctttatagatactcttttatccttaagtaatctatatattaaagaagctatatctggcaatacaaatatatactctttataatttctcacattttcagataatttatttgtaattttatttcttccgacagaatagcaatctttagttttatctgtaagatccaatgatgctacatcaatctcttcttcttcacttgtttcttcaacatcactttcctttattaattctcctagtattgaaacctcaacattagaaatttcagcccatacctctgattttttcatgaagacctcactaatatttagatttacgtacggtacatcttgaagtattgtatttatatcaattattactttatctctatcactatttattccatactttttaaaagcttttgctaattgctttaacacaaaacttcttaatattctgaagaaaccaacatttaatgctttaactttaactatctttacagtaattttgttatgaacacacccaactaattggacctttatattgaagtctatatttattccctttttcaaagttccttctaatattattccatcattaatagttactgttcttaaatccaacccatcaaccttaacaaattcattgattatacttaatatatcattaccagttaatttaacttttacttctgatatgttcattttttattcccctttagagtaaattcttactttatatataaattaaatctaattactttcctaaatatacttaaaagtatacattattccagaaaattattaaagatatgttatatatagaatctacaatttttcttaatagcaaaagtccccatttaactttctgataaaaaaagaaggcatgccttaatgtcattttgttgcctaaatgacatctggcatagcctctcttcttttaatacagcatattcatgctgcaaatactagttattattcaatttcttttttcaatctacatgttcaaaatgaactattaaaatactggaattactgaaccattgtattctttttctataaattctttaacttctggtgatgtcatagcttttactaaagctttgattttttcttgattttcattaccttgttttacaacaactatgtttgcataaggtttagcagcttctgaagccttatcttcaataataattgcatcttttgctggattaaatttagcttctatagcatagtttccattgattactgcagcatcaacgtcatctattgctcttggaactgctgctgcttctaattcattaaactttaagtttttagggttttcagtaatatcctttgatgtaactagttctccatctttaatttttattaagccttttcctgctaataattttaatgctctagcttcatttgatggatcattaggaacggcaattgtagctccatctttaagttcatctaaactttttaccttcttagaatataatcccattggttctaaatgtattgcaccaactgaaactaggtgatatcccttagatgaattttgttcatttaagtatggagtatgttggaagaagtttgcatctaatgaaccttcttctacagcagtgttaggttgattgtaatcattaaattctgttatttctactgtatatccttctttttcaagtaatggtttagctatatttactatctcttcatgtggctttggtgttaccccaatctttattaccttgtcatttttagaatctttacttcctgaagtagctgtgcccccgcaacctactaatcctagtgtcactactcctgctaaaactactgataaaattgatttctttttcatatttattccccctattttgataatttattgtaaaaataattgcctataagctgtagtccttgtactactatgattaacacaatacatgttactaccatataatcagtttggaatctttgatatccatagcttatagctacttgaccaagtcctccacccccaatagttcctgccattgcagaatatccaacaatgcttattattgtaagagtaattcctgatgctattgaaggaattgcttctttaagcattaccttaaagataatttgagtgtttgatgctccaaaagatcttgccgcctctattattcctttatcgacttctctaagtgatgattctataattcttgctacaaatggtgctgctgcaattgtaagtggaacaatagctgcttctgtacctatagatttaccagcaataaatctagttaatggtattattgctaccattaatatgataactggaaaacttcttaatatattaattattaaatctaaaactgtataaactattttatttggttttaatccgtcttttgcagtaactgttaatattattgcaggtatgaatcctaaaataagtgaacctatagtcgatgcaaaaaccatctctagagtttctattaaagcttttactattacctgattcattattcgatcacctccaataagatatccttattttcaaggtactttataaccttgtccttatcctcttcgttgatgtttattacaagcccacctaatacttcgctcctaaatttttcaagttttccccaaactatagaaaaatctatctctaattcccttgccatctttgtaattagtgcattttcagaagaatcacttgggaagaatatcttgatattaacaccttcttctggtaatattccttcatcttcttctcctaagaatttctttaatgattttcctggttgtaagaataaatcttctgatcttccttctgcttttatttttccaccatctagcaatgcaactttttcacaaacttcttttattacttccatttgatgagttaccattactattgtaatccctaattctttgtttattttagaaagtaatgctaaaatgtcttttgtaattttaggatctaatgcagaagttgcttcatcacaaagtagtattttagggtctaacgctaatgcccttgctattgctactctttgtttttgtccaccactaagctctgacggtttgcttagctttttgtctgttaatccaactaaatctaataatcttaatactttgtccttaatttcacttttgttgtacccccacacttcaagaggaagagcaacattatcaaaaacattttttctttgcataagattgaaattttgaaaaatcatccccaaatcttttctaaattccctaagactttttccttctaatgatgaaacctctttccccattacatttattgaacctccatcataagattcaagtccattaatgcatcttaatagtgttgactttcctgctccgctgtgtcctattattccataaatttcgccctctttaatgcttattgatacatcttttataacttgtgtttccccaaaattctttaccacatttttgatttctatcaaacacatttcctcctttgactttgttttgttagtttccggataactaaggtgatgtaataattaacttaattattaacgttcacctcaaaacaaaagcgctagagaataaatctctagcgcataaaacaccatacaaatttatcctctcatctatcagctaaaagctgctggaattagcaccatataaatatcatttagtaaaaaataatatttcggttgccgggtttcaaagggccagtccctccaccgctctcgataagatattcagattatttaatttagctttgacctaattatatacaactttttttaatttgtcaaaatctatagaataaccttttgctctttcaaatccaagtattgtaatcggattggttttattatatatactttcttcatatattgcaagatttttttacgaaattaattaataaatttaagtttatagtataaatattaaattattttatatttatattgctaaatctactgtatatgctatatatttctatcaaatattcaaaatcaatatctaagctaataaagatattaacataaaaaataatagatattctacaataaaatttgaaaccatacacatgtagataaatctatctatgtgcatggcttcatttttactagaattacttatatattttatgcctcaaaataattgcttaatatcttaggctgcttttttctgcttatctaaattcagtatctcccaattatttgagcaatctggagatatctctccatgttttttaatgtagctagtcattaaacttctcacttggccatcatcaccaagtgcttttcctgaatcatagacaataatacttggatcagtattgcttaatccagcggctttcataaaaccaccaccgccattaaatctatagttgtttatagcaactgtaaattcatctgaatcttttacttcaacaccattaacctttaaattctttattctatttcctgatattactcttcctgtttccttgtcgatagtacatgcaggttgtgttaaatcaatatcatatgttgcaccatataattgatccaagttataatctggaatatttaatattggatcttttattactgctgcattatcccctgttgtttgagcataatatctaactgaatattccatccagtctttcaattgctttcctgtcatttttactccatacaaaaagttttcaaatacatatactgccatcatatcttttattgtaacatcaccttgaggtatatatgctccagaacttaatggtgctgcaattgataattgagtcccagcactttctttttgtactttattaatcagctccataattgcagtaggctctgttaactgcccacttcctgtaaattctccagttgaagttcctatttttgtatctacatattttaatgttgtatcttcataaggtttaattaaatcgacaatctcctgatcatctactatgccattatcaataacaatgttttttgttgaaattcctataagctttgcatttccatcaaagttcatatcaacttgtgccaaacctgtagctcccttagttgactcaactattggaacaactttaccttctggattcttcttagttagatcatttactttcaaatgtgtatgacctgctataattgcatctataccatcaacttgtgttgctattgcgttaatttcattttctggtataacatctgcatcagtctcttgaccactatgtgctgaaattataacaacatctgcgcccttggcttttacttctttaacccactttttagattcatctacaaggtcattaaataccaatccatcgtaatgttttttatcttcccaacttggtatgcatttattttctaaacctataaccgctacttttacttctttaccattaacataaaaacttttcattatatatggatctacaaaatttgttgaatcgttcttatatatattggctccaagtacttctattccttctgacttatagtctttaatcactctatttaatacatctaatccataattgaattcatgatttcctagtgtccacgaatcatacttcatagctcccataacctttgccatagggtgctctaaagtagtgtctaaaatatcatagtaatatgatagtggtgttccttgaattgtgtctccattatcaattagcatcacattattattattttctcttacacttttaacatatgatgaaactttagctaatccctgtgctttagatggtgcttttcctgttccataatcataatttaaaactgtaccatgaacatccgttgttgctaataaagttattgaactagacatattaaccattcttggtatatcagtattaggtattgtatttttatcatttttatctttattttctttacaccaatctataaatgcatctcttactaaaacatgagtatcatttttaacatctaatccaccgtactttgtaaatgcagtaaacgaatctcctccttgagccacaaaatctggaactgcaacagataaactttcgttatcactaataggggttccatcttcttttgtgatagatttaactctttgacctgatggaagatttgaatcatagccgaatttaattcccgatacctgtaaccccttactgttatccgcaacagcctgctctagaacttcttttaattgagattttgtcatgcttaatttataaattgtgttatcaaaaggcataaactgccacatagttccgactgtaatatttccttgtggaatatctattctaagacctccattattttgaaatccaacatcagctttaatagaatttcttgtaacgtcagatgcccaatttcctaaaactgatgatccatatggagaagcatctaattttcttgttaaatccttttctgtattatacccaataacttcactcgtcattggctctatctgtttattggcattatctacaattttatcaacatcactgtctgtttgtggtgttccagttttatatcctttgtcattatctagcgccacataacttgtttcaagatttggctgatcaaatacgattttattatcactagtcaacttgaatttagcatctatatatcctttaccgtttgatcccccaatatatactggaatattggtattcttagcaattgcagcagttttagtatggctatgtccaccaaatacagcatctacattctgaaggttattagctaaatcaaatactggccctgttgcattatcacccttatcaccttcatgcaccaatacaattactacatccgccaatttatctttctttatttgtagtgcaataggatttatttcacttgcaaggtctgtaaatttatagtcactcacaaatttaggtgatacactcgtctctgtttctcttgttattcctcctataacggcgatttttatgccatctttagttataattttatatggatcaaatacacgcttgccagtcttcttatcgtaaagattgctgcaaactattgaatacgctgcacccttcattgttgtatttgtagttgtatccaatccccaatcaaactcatgatttccaagagttgttatctccattccaatcttagacatagtctcctgaacaggaacccctttcatgatattagatgttgcagatccttgatacaaatcacctccacctaaaatcaatgtcctatctttattagactctttcactttttctattctatctgctaaaacccctgcaacttgatttcctgatgaatcattaagtgttccatgaaaatcagtgatttcgataacgtcaaacattttttcattctcagttgcataaactcttatagaaaacgagctaaataaagtaattatgaagaataagctagtaaaaattgatataacttttctgaactttagaagttttttcacaattatttcccccttaatactaatctcatttacatattattacttacaaaaaattatatgacacatattttttcaatagtatatttattgtaaatgtcacccatttattattcagattatttctataataattttatctaaaaaccccatattatcttgtattttaaccaaataaaaaactaccaaaaatatttttatactttcggtagcatgcttaattaatatttattcttttccttaattgctctatccatgtccctcttatgagctttttctaacatcgagtctctcttatcataatttttcttacctttacaaactccaagcgcaactttaacttttccgtccttcaaatacaatgatagaggtattaaggtatatccatctctagacactaaaccatcaagtcttcttatttcatctctatgaagaagtaattttctctctcttaatggatctacattaaatatatttccttgttcataaggagatatgtgcatattctttacaaatatttcaccattatatatatctgcataacagtctttaagattcactcttccatttcttattgatttaacctctgtcccaactaaaaccaatcctgcttccattgcctcttctacaaaatagtcatgccttgcttttctattttctgctaatgaattctcatttctttttcttgccatcataatcacccgctatggttatatttctactaaaattatattatacccatttctgtaaatcaacttattttgaacattgctgatatgaacgctcaaaataagtttatatgcacaaatttttgctctttcagaacattaaaatcatatcttatacttcaactaactttttttctacttcactaatttttccttctgattcaaaatctttatctttttcttctctctttggctcttgtgtaatcttaaaaaatatctctctatttgttatatctacattaacgcattctacttttactttatctccaagtttatataactttttagttctttcaccaatcaagcttaaatttgcttcattgaatatataataatcatcatctagatctgttatatgaactaaaccttcaatggtgtttggtaactcaacgaatattccaaaagatgtaactgaagatataattccttcgaattcttgaccaattctctcttgcatatactcagcttttttaagatcatcaacttctctttctgcatcttgagcctttctttccatttcagaagattgtttagctgcataacctactatattttttaatttatttattctagttccatctacttctccatgcaaatattcttttatgattctatgaatttgtaaatcaggatatcttcttattggtgaagtgaagtggcagtagtactcagctgcaagcccaaaatgtccgctacattctggtgcatatcttgcctgcatcatagatcttaataaaagtgtacttacaactgtttcttcgttttttcccttaaccttttctagaatctcttgaaaactttttggtcttatttcttctgtccattgaatagcatatcccaaattataaacaaattctttaaatttagctaatttttcttcatctggactctcatgtattctgtatacaaaaggtagatgagtaccaaacatatgctctgcaactgtctcatttgctgccaacataaattcttctatcatcctatttgatatttcacgatcatacggtttaatctcaattggttttcctaactcgttaagtgttatcttagcttctgctatttcaaaatcaatggcacctcttttggttctcttatttcttaatataccgcatagctcttccatcattttaaagtcatcaataagatagtcatatctttttataagttcctcatcattatctcttaatatctttgtgacatctttatatgtcattctctcatcagtttttattacagattctacaatttcatggtctacaacttttcctttatgatctatctccatgaagcaagttaatgttaatctatctactctagggtttaatgaacatattccattagataattttctaggtaacatcggaacaactctatctattaaataaactgatgttgctctttttaatgcttccttatctaatggactattttcttttacatagtgtgttacatcggcaatatgaactcctagtttaaagttgccattacttaatttttcgatagatacagcatcatctaaatccttagcatcttcaccatctattgttaccattctcaaatctcttaaatctcttctgcctttatattcttcttcatcaatttcatcagaaataccttcagcatacttttgaactttttcactaaattcttctggaagtccaagttttttaattatcattagaatgtctattcctctgtcaccttttcttcctaaaacctctgttacaactccttcagcttttctattttcctcaggccattttgttatcttaactgtaacaacatctccatcattggcaccattcctatccttctttgagatgaatacatctttagatatccttggatcctcagaaactacaaaaccaaaatttttagaatcttcatatacacctactattctagtagtgtttctttcaataatttctactacttctccttctcttttcttggtctttgtatcttctcttgttactctaacagatattttatcaccattcatagctccatttatacaattgcttggtataaatacgtctttttgtccctcttcttctggaattaaaaatccaaaaccttttgaatgtgattgaagcgatcctataataagaccttcttcttcatgattcgcattagctatcatatacttgtcttttttagttcttataataagtccttcattttccatagttcttaaagtctttttaaacgcattatattcatttttctttatatcaaatacagcaattaactcttcaatgtccattggcctatatgcaggttctttcataaaacttgctaatgtttgttttattcccataatttcttcctccattatactattactatattttattcctatatacctatatactaccacaataaccttgtacaatatagattttatcttattttaatattagtattgacatatatattctaatttatttatatactatagtttagttaattaaaaaatggcaacatttgaattgtttatattatgttgcaataataaatttaatttaaaattctgttactccaaatgctaaaataagtctagtaataaaaaatccaattaaaatatacatatttaggcattacttaacaaaaatagatatcctcttttatcaaaaggatatctataaatgacttcataattaaactatttaaattttagatgtgcttaataattcgtattattttcttaaatttttttacttattttatgtttaaagatttttacaataaattttatgcactagcgctaattgcagtagtataaatcttctctaataaattaagcgctcctttatatccaatataagttcttgatagtactacttcataagaggctggaaaacctacttcaataattgctccctttaattctttagctgtatctctttcccatgtagtaccaaatataataggcggcttatgcccgaagtctgtctgtcttagcaattgtcctattacatatccatcctctgcaaaatcaacatctgcagatacatcttctgctaatttactatactcactcgcaattgctcttctatactgctctggaggattttcagtaataatttgtttagccggaattaatcccagctggtttactaaaaatttatttagagctaaattataagcgctatctcccactactgcatatttagccggtaagccccaccaatattcagcatagaaatctgaaaagtgttctaaataatagtagtaatttttttcttcatcttttataaaattttcacttttttgtttatctattccggagaaatcaactaccttacgcaaaaatgcacttgtttcctttgctccaataggaacagtagggatgtgtagaaatggttgtttatatttattttctagatgcttagcagtgtctaagccaagccaaggcgaaatcactaaattaaactgtgctttaggtatatctctccattcgcttactccttttgattctggtccaaatagaatgtttactttaagccctgctccttcaagtacacgttttatttctgtaagatctccacgccaaaatgtattttgatatggcaaaagtgaccatacattaattaaccctttttctttttctccatcatattctccaacatattgatctataatagcctttgtaactaattcgtggcctataaaattatttcctttaaatccaccagtttccgcatatacaacaggggctccttttttctgaaattctccaacaactgctcctacatcatctccaacaatttcacctatacatccagtaagaactacaaataattctgcatccattatctttaaggatgatttaatcaattctctaagacgattttctccaccaaatacaacctcattttcacctgcattagaactcggcgatactgctccaccactatatccaccaccttgaaaaccattataaaatgcgagaccagtatactgcttatctgcacaaccaggaccacaatttacaataggcattgctccaggaattgatgatacactgtaaatagctcctatagcgcaaccataacgcacttgatttatagaatttgtttgagtaatatttacgtctttgttaatctccataacttcctcctttaaaaaatatcaattatattattttttcatttaatatttctggtttttttgcaagaatataaggatcctcttgatcaagccaccatttggtataaggcagctttacatgctcttttaggtcttgatgaaatttcctatgggcgagtacatccaaaacagcttctcctaaattaaccattccatcatatccaatagcaagatgttcatctccgagtggagccgctggtattcctaatctggatgccaatggtgcgagcccattatgccttattaatatgaagtctggatttgtcttttttaagagtccataaaattgatattgttgtctattacttacactaaatgaaggtacatcatcataattatctattaaaaatttaagagaatcctgctttggatctccactatcataaaccgggtcatgatgaaatactaaagaaccatttacttcaactcctagttctcttaaaacagtaattaaaccatgagcataagctgaaccagttgcaacatatccttttacgcctttaagtttttccctaagttcttttaacttaggttttattctttcatgttcttttttgataaactcttcagcaagttcctctctatgagtgactcttgctatttcacgaatccaagcatctgtacctgcaaagccataaggttgaggtgcctttatttctggaacaccaaattcttgttctaatgctgctgccatatacgatgacaaggtatagcaaaacccaactgttcctgctgcttctgaaagttgtgcaagatcatctaccgttgctaaatctacaacataatttactcttaatcctagctctcctagcattggtgtaaatacatcagatccccaaagatttataacattaattaaatcttcctgctttttaggatttttacgtacaatttttctaagaattccatgttgagtagcatcaaaacctgtgctccaatgttttgatctaaagccttcacaggcaagtggaattacaggtatgccaatttcatcttctgcttccgcagccacactctccatatcttctccaatgattcctgttgcgcaagatgtacctaaaaaaatcgccttaggactatacctttcaaaagcatctttaattgattgttttaactttttaatacctccaaataccatgtcactttcatctaagttagtacaaataattcttatgttttctactggtaaattccgaagtgcaagtccatttcgataaattgaattataaggtacttgccccactccacaaccaataggtgaatgttgaataagcactgcatctcttacgtttccagcttgacattcaaccatctgttcgctacaaactgatccttgtgtaaagggtcctttcatttcacaaagtctgcattgtttacctctgccctcgcatcctctgcgttcataagaagattgctctgatagttctgatgcctttccatcccatgcaataatagttccaagtctttgttcacgactttcaacctctggaatatccagattgatctttttatatgccatatcttttatccctcctaaaattttattttatgaacaataaaactgagtctcttgcatactaaataatgtataatcaagaaactcagtctctagttttctagtcaacttcgttaataaagttatcatagttaagttttttcccatccaaaatcaaaatcttgtccttatatctcttatttccatagcttattaatttatttatattacttagtcatcaaacaatgttgtacttagatatctatctcccctatcaggaaaaacaacaactatatttccactatcgatttcctcagataacttcaatgctgctgcgagtattgctccagatgatgatccaactattaaaccttcctttttagccagtaactttacattcttaaaagcctcatcgtcattaacctttataactttatcaactaaagatatatccattgttttaggaacaaaatcatttcctataccctctattttgtaactcttatgctctccaccgaccattgttgacccttctggatctgcgagtactcctttaatatccttatccttttcttttagatattttatgatccccgtaaatgtgcctccacttccagcacctgccacgaaataatttatattaccatctaatgctttatatatttcagggcctgttgtttcataatgtgctagaggattatcttcattttcaaattgacctaggctaatgctatttggaatttcttttaataattcactagctttatttatagctccaagcataccttcttcatctggagtattaatgattttagcccccaaggctttcattagcttttgcttttctattgaaaatttggttggtactacaaagattatattatagcctctatttattgccgctagagctataccaagaccagtatttcctgctgttgcatcaactatggtataccccctctttaagcttccatttctctcagccccctcaatcattgttactccaattctatcttttatactgccaccaggattaaaacattcaagtttagcaaatatattaacattttttttaacattgatatgtgtgagttttataagcggagtatttccaataagttcttttacatcacttacataattcatatcaaactctccttaaatgcattgtttaagtcctcaattagatcatcaatattttctatccctactgacaacctaactagattatcgacaattccaacctcctgccttattttatatggaattgctgcatgtgtcatgctagctgggtgacatattaaagattccaccccacctagactttctcctaaagttataagtcttagtgaacttagaaactttttgtaatctatcttttcatttataacaaaagataatactcccccaaagccagatgcttgtttcttatgaatttcatatcctttcgaatcctttattcctggataataaattttagttatatattcactttgtgataaaaattgtgctattttctctgcattttcattgtgcctatccaatctaacacctaaagtttttatgccttgaagcaatataaatgaatcaaatggtccaagtactcctcccgttgaattttgtataaagtgtaacttgtcccaaagctcatcattatttacagctattaatccagctactacattactatgaccgcctaaatacttagtagcactatgaacaacaatatccgctccaaattctaaaggtctttgcaaatatggtgacataaacgtattatctacaacagtaagtgctccgtattcctttgcaagcttactaacctcttctatatcagtaatatccatgagcggatttgttggagtttcaataaaaacggcttttatacttgtgttgtcctttccattttctaaaattctttttacatcatttagtctagaaaagtcaactatctcatattgaagattaaaattcttaaatactttatcaattactctaaaagttcctccataaagattacttggaattatcactttgtcaccgctatgaaataaagataaaacagccgtaatagcagccattccgctgctaaatgcaagtccaccgcttccactttccagcaaggcaatagttttctctaatgcttcccttgtcggatttccagtccttgaatattcatatcctttatttttacctaactgttcttgcttatatgtggaagtttgatagattggaacattcaccgatcctgttgtctcatccccatcaattgcaccatgaactaataatgattctattttcatttttctctcctcctcaaggtttcgctagtgcaaagttttctacactattctttatttcttatatataaaggttgctactatttctaaatttaaattactatatattactcatattattcttatttgtttactgtgttttaggataaatgaaatatttatattttatttatcttaacgattgtcattatgaatccttaataattttttaatacttgtttctattcatattaatcaactaatttcctatccatgagagaaagtttcaacaacttctttatcatataattgaccatgtatatcttgatttttacctggaattccacaggcatcagctctgcaatgtttgcagtgcctaaatacatcaagatattcacctgcttctcctctacatttatcaagcattaggcatgatggcgcttcaagatgagaaagttcgttttgtggtattagtggaattatatttaatattgatgctcctacccccttagttactttagctatctccttgatatgtctatcattaattcctggtattaagacactatttatttttactataactcctaattcgctaatctttttaatacctctaagttgtgcatttattaacttctttgcaccttcttccccttctagtcttttaccatcttcatcaattacaaaagaacatatatctttttgaatctttggatcaatggcattaacagtaacagttattgtctcaaccccagcttcaacaatcttttcagccttttcttccaatcttaatccattggtacttaagcagttaataagatgaggaaattctttttttactaacttaaaagtctcaagagcatgatcagttgcaagcgtatctcctggacctgcaatccctacaacactaatttctggacataacattaatgctttcctaacagtttctacagcctcttctggagtaagtagtaatgaacttacacctggacgcacttctgatttattaaatccccttctacaaaacttacattgtatgttacatgagggactcactggtaagtgtatcctcccatatttaaaatgcgcctccccacctaggcacggatgagtttttacaaggtggtcaaaattccccatatagttcacttcctttattctaactttgatcaaaatttattcattatacaaagtttaattttataatctaagtcctaatttaattgaattctttaaatactatttacttacttgaatcatacttataacttagattattaatataaatctaaaatatttacttttgaatttagcactttttttagtatatcttctataaaataaggtgcctcaattccttttattcctttcgcctcaacctcagctaaggctccttgtccaattctcgctacaaagactgctttacaatcagatattaattcaatagatttacttaaagcatcctcagtgtgctgaaattcttggcacgatggctcattaaatcttgtctctacatacttatattctttatcatccacttcaacaattaagaattgctttgttcttccaaaatgttgatttacaacttttccatcactgcttgcaaatgctattttgtatgacatatcttcctcctctttaaaatgctggaactaccgcagaaccatatttttctttaataaagtttttaacatcatctgtagttaggactgaaataagtgccttgatttcttttctatctttatctccttttctaaccgtaattacatttgcgtaaggagaatctccatcttccctaagaattgctgtatttggatcaattttagcatctaaaattatattagtatttattactgctcccgctaaatctccaagagatctaggtaattgtgctacatctgcctctacaaattgaagatgtttaggattttcagctatatcatttggtgtcgcagaataattttctaatccactttttagtttaattagtccatttttttcaagaagaactaaagctctatattcatttgaagggttattaggtatacctatcttatccccatcttgtaaatcatttattgatttaagtttattagaatataatcctataggctcaacgtgtatttttcctgccacttcaaagtcgtatcctttttcttttgatacagactctaagtaaggaacatgttgaaaataatttgcatcaatttgcttttcatccaatgccggatttagctggccttcatcatcaagggtcactatttctaagttaataccttgttcctttagttttggcttaatatgctctaatatctcagcatgcggtgttaatgctgcacctacttttaaagtcacttcgctcttttcagttgttgttgatgcacttgtagctttgcttgcatcttctttgttagctgagcatccagcaaatactcctactaaaagtaatccacttgtaattattgataataattttttcttcaatttaatccctccatatttattcaaacttaaatctcttcttattaattgactttgcgatgagatctccaataagctgtatagcttgtactataataactagaataactacagtccctataagtacatctgtacgaaatctttggtagccaaatcttatagctaaacttccaagtccaccagcaccaattgcacctgctatagctgtaaagcctattattcctataattgctatagttattcctcttacaattgaaggaagagcttctggaagcagaactttttttattatatcaataggagttgcacccattgattctgcagcttctatttttccaaattcaacttcctttaagctgttttcaattattctcgcaataaatggagctgaacctattgaaatagatactattgctgcatttgcacctaatgtggtcccaacaataaattttgataatggcaataatataattattaatattatttcaggcgtggatcttattacattaattaagaaaccagcgattttgttaactttatataaaggaaaaattccgcctttatccgtaacaaccaataatactccaattggcacacctatcaaaaaggctactatggatgaaagcaataccatatataaagtttcctctgttccaactaaaagcaatttaactaaatcattgctcatattccttccccccctgaaaatttcctattattttgaaatccttctgttattgttataaatttctttaaagtatcacttttaggatttaaaaataagttttctgtattcccctcttctactatatgaccatcttctaaaactaccatattattagtgcaataccttaacacatctagttcgtgtgttattatcactattgttaagcttaacctttggtttatatttttcaaaagttctaaaattgaaaaggtggtttgtggatctaaagcagaagttgcttcatcacttaaaagtacatccggatcattagccaaagctcttgcaataccaaccctttgtttttgccctccacttagttgaagtggatatgaatcccttttttctgacaattcaactaattccaatatctcttcaactcttctctttattgcctctttcttatatcctgaaatttctaatggaaaagcaatattttcataaacagtttttgaatcaaataaattaaattgttgaaatatcatacctattttttttctagcacttcttaattcttttccatttaacttagttatctcattttctccaatgattatattaccagaatcgggtttttcaaggccatttaaacaacgtattaatgtcgatttacctgcgccgctaaaaccaattactccaaatatatcccctcgcgctatttctaggcttatatctctcaacacctcaacttttcctgttggagtattgaatgttttacttatattcttaacagttatcataaaattgcctcccattacctcgaatagtgatgttttaagtcttcctattccttataatatgtctaaaagattttaaactaaattatataatcctcatctaaatccattaatccatattctattaaaatttcttcgagtctgtcttgagtcattggttttggaattacaaataaatcattttcttctatctttctagctaattctctgtactcatcagcctgtttatcttctgggttaaactctatgacagtcttttttcttatttcagctctctgaacaacattatttcttggtacaaaatgaattaattgtgttccaagttcctttgcaaaagcttttagcaggtcaagctctctatcaacatttctgctattacatattattcctccaagtctaactccaccttttagcgcatacttttgaattcctttggagatgttatttgcagcatataatgccatcatttcaccgcttgcaactatatatatttcttttgctttaccttctcttataggcattgcaaaacctccacatacaacatccccaagaacgtcgtaaaatacataatctaaatcttcagtgtaggctcctaacctttcaagcattccaatagaggttataattcctcttcctgcgcatccaactccaggctctggacctccagattcaacgcattttatacctttaaaacctgtcttcataatggcttcaagctctatatcttctccttcttctctcaaagtgtctaaaacagttctttgagctagtccccccaataataatcttgttgaatctgctttaggatcgcaaccaactaccattacattttttccaagctctgcaagccctgctgttaaattttgagtagttgttgattttcctattccccccttaccgtaaattgccacttgtcttaaagttttttctgccattgctatattctccttttttataaattattaaaacttatcggcatataaaaatatgaattcttttaattggtcatttccctattttaatatacctaaagtatttttaaactttccctatacttagcttaaagcttccttaaaagcttgtcttaaatcattaattaaatcttcagaatcctcaaggccaattgaaagcctaatagtttcttgaggaattcttgctaattttaattgttcctctgttaattctccatgggttgttttaggtacattaactattaaagatcttgcatctccaacatttgcctgataactaaatagttttactgaatttattaatttataaatttgttctgtatttcctttaaaaccaaaagtaaaggttgatcctgctcctttagcaaaatatttatctgctaaaaatttatatgggcttccctcgatttcaggataatttatccaggcaacagattcttcatttttaagataatctattatttttcttgtattattaatttgcttctggaccctttcagataatgtttctaaacctattaatatcaaataagcatcaaaaggacttaaaactgctccaaaatatgttagataatctaatctgatttttccagcaaatgcactttctttaaatacatctatataacttctttcatttccctctaaatcttttagagtaaagtacggttcagaaaactgaggataccttccatttgcccaattgaatttaccactatcaactattactcctgcaatcacgtttccatggccacttagggcttttgttgctgagtatattactatatctgctccatatttaataggattaaatagatatggtgttgcgaatgtattatcaacaattagtggaatattattttcatgtgctatcttagcgattgcctctaaatcatataatgctgcattagggttacttatagtttctataaaaattgcttttgtgtcttcttttatagattttctaaattcctcaatatcattgtcatcttcaatcctgtcaatttggattccgaacttaggataaagtttttttaaagcatctacggttccaccatacaattgatgtgttgttaaaattcttcctcccccttctgctactgcaagtaatgcataagttatagctgccattcctgatgcaacgcctaccgctgctatgccaccatccaaagaagctattctattttccaagacactaactgttggatttccaagtctgctataaataaaaccttcttctgaaagactcgctaacctatcaaatctttctgcttcacctacttcaaaagatgctgttgcatatatcggtactgatacagcatcattatgttcctttggattgtatcctcctctaactttaatagtatcgaacttgtaattactcatctttctccctccaaatttatcaattattgatgttaatttgcattaataattcttataaaaacgctcatatttaaaacctctataaatccatataatccctttcatcttttatatttggttggcttaaatccatctcaaacccgctatttatctataaatatttatatatttaaattcttatctagatacatatttaaatagttaaatttttttctatttaactatatacatatttaaactcttacatattttcatatttatctataggtgtttagcactctatcatatatatcctcaattgctctaagccccccattgtatcctgcgtaaccacaatttaatacaagtctatatgttactggcacactagtgataagcaaatctgcatttaattttgccgctaaatctctatcccagccacttccaagtattaaagccctgccttcttgaaaatctttttctttttccttttctatttccaattgaactgcgccagcatctacattaaattcaacttctgctgatctatactcagatatattcttaaattcttttattatagattctttatattgttctggtgtatcatcaataataaattgctttccaggaagtatacccagttcatttaataaaaatttagaaaaacctaaggaatatgatgaatccaaaatactgtagaattttctaggtaatccatatctaaactcaagcataaagtccgcagttttttctatatgaaaataaaatttttcttcctctttctttataaaattctcaactttatttttatctaaatgcccaaattcaccaatttgtcttaaaaatcttgatgtcgcaattgctcctattggcaagtatggaaaatgcacgtatggtgttttatatttattttttagatgttctgcaatatttaatcctacccatgaacttgcaactatattaaactctgcattaggtattgtcttccattcttcaataccattagattcatttccaaaaagtatatttacttctaaaccaataccttcaagaactctttttatttcttctaaatttccactccaatatggatcttgataaggtactgttgcaaatacatttacgagccccttttttactccattgctatttttgaatttatctacatattgatctattattgcattgacaacttcactatgacttacgtaattattgcttttaaatccacctgtctctacatatacaataggtttatctccttcttgatattttgacgtaacacttcctacatcatctccaacaatatctgatgtgcatccagtaagtaccacatacaaatcagcatctattacttggaaagctccctcaataacattcttaagttttcgttccccaccaaacactacatcagcttctgtagcattagtacacggaattgtatttcctccagcatagccttcaccttgtcctattaaagaactaattttattactgcatcctggtccagaatgtagtataggaactcctcgttttatggctattactgtttgctgtgctcctaaagcacaggaaaatctaggttgttcaataattttcgacactactattacctcctaagaaagtaaatggatcttgatctagccaccattttgtataaggcatagtactatgcttggctaaattacttacaaattctctattatcaagggtttcaactattcttgaagcataatttaaaactccctgatatccaaaaccaaattgctcatccccaattaataaagttggtattccaagctttgccccccacatagtcattccaccatgtcttgcaatcataagatctggttttactctgtttaatatattaaccaattcataggcttgtttattacaaacattgtagtgcttgatatcaccataaatattgactgtttgagctaaagcatccgaagttttatctttattgtcatatagaggatcatgatgaaatattgctgccccttgaacatttaacccaagctctctaagcattgctattattgcatgaccatgagcagctcccgctgttacatatgctgtcttcccttttagtttgtctctatattcttcaagtttaggtagtaccctttcatgctcttcttttataatttcttcaatttcttcctctttgcctaatactctgccaatctctctcatccatatatctgttccttctataccataggctggtggagactttatttctttgactccatattcttgttctaaagctgcccctaaataagtgctaagggatgggcatatatggattgttgctgctgcctctgaaatatactcaagttctgcaaccgttgaaaatggtacaatatattgtgcttcataacccaatctatttaaaaattcatcaaaaatatgacttccccagaaattagctacattgattttatttgttttctttctaggcggctttactaactttcttaaaattgagtgataagcagcatcaaagcctgttgtccatattttagatctaaacccttcacaagaacatgatataactggtatacctagctcttttgacaaattttcagttatcgcatctacatcctcacctatgatcccagatgcacaagaagttgtaacaaagattgcattaggtttggttcttttatatgcttctcttacggtatcctctaatttcttagctgcaccgaaaacagtatctttttcttcaatgcaggtactaaaatatcttcctattgtagccggaagctctcttttcatctgttcgactctataagtaaaattaaatccaaagaaatcacctgcgcatcctataggtgcatgattaacaacaactgcatctcttatcatagataattgacaaaaagcatgacctgcgttacatcccatacattgagaaaattttcttgaactatctttcaattttcccgcatgagcacatgtgacaagttccttggctgatccattaaagccagtaattgaacctaaccttgtctcccttatagtcactgaacattcttttaaattaattgttcccataattacgactttcctccttaaattatttagaataatatttttcttaaaaaagaaaagaggacatacttctattaattagaagtatgtcctctagctttccagtcagacttacttaaatattattcttttccatatcctcttattcatataagattgctgtgttttttatataatatattcttctcattcgtatatgtcaacatttttataaaaaattataaattattttattagaccaatattctttggtttcctaacatatactccttcacatgtaaatttttatcttattcttattttttcatttttatctacttgtataattactccatcttgtattatcaaagttatagacccataccttattttctcaaccatctttagtatttcttctagctttttattttctgtgaattctttactattaacagccacacaatcacccccgagatatacatataaataccttatatatttgtttttattatataaattatatataatttccctcaaaatttgatatataattcttttacgcctttgccttttttgaatgcatgtgagaaaaatctgcatataaaaacattttatataggagataaaaagttcttaaatgcgctccccactttttttataagtgtatatttccctttttattctctgacactcgtaaacttttcaataaactattccctcaagaaactgttgtataaatttctaaagaataaaataaaagacccctgttataaaacagaggcagaaaatttccgcggttccactctgattattatgcttaaaatttaatcggtcttacgcataacatctttatgtgctatatcaggcactactgctaagcctactaattcaagtatataaaataattgatctacaaaattaaatttaacgaccttattatttttaaacataccaaaaattcaacttagtactccaggatgcattctatagagttccatttagaattcctttcagctattttaagaattcctctctgaaaattttcctcaatatacttattcccttcatcgcattaaaattataattagtatatattaatatatactatacttttttcttattattcctattgaattactatgatttattattacctattatattctatatagt

SEQ ID NO: 82 - DNA, 28358 bp, Clostridium beijerinckii
tatatggagtattataataattatagatatcagtggggacttaaaaagctggctcctgtacaatacagaaaccagctcatagctgcctagcctttttcaaaatgtccttgacataggaaccattttagaaaatacccgccaccgtttttttatctaattgaattgcatcatttaaggccagatcatttaagctcaatggctttacttgatctatctttaccaagtcagctggaataacccaaggtttcccgccccctgtttcatcaatatatttgtttaatattgcatcccttcccgcttcgcttgctagttcttctgtcattgcatcaactgcaattattagtgatggtttccacttatcactcataaaagaatttttagtctttgcagcttgtttcaagttcataacaatatcttttaatacaaccttgtacccctggcccaaatatggcctttctggatctggatttacaatgaaatgcaatacttcatcataatcgtaagtgttagatccataacgcacctgataggctgctggtgtatcttggaatgaaacacctgaaggcttcaagggaatcaattcagatattagaccgttatccacttttggatatacaacactatttccattgcccgccaatagcattgaatgaacaatgttgtaaacccatgtttttcgtgtcattaatgaataagggcttatatcaatctttctggataaagcattttttacccttatatccccattatctgtattttgcattaaatgaattgtcatactagaaataagatccgcgatcttgtgggcagccattcggacctctggattgtctgacaaccttgtatagcctggaacgctcaaagattctgaatcattagataaaaaccagcttatcgcatccccttcggatctcctattcattttctttttattactttttgccaatctctcaccacctttcaagcaaaataaaaaaagtcctaattacaagacttttcctgaatcacgcgtgatatatattttttaatttcttcaagctccatttctttatctgcccctatgaaaatactacattctattagattattaagagtaaatttaaccttatacccctcgaaacgaaaaacagaatatacactttctgtatcaataccattggtcaaagtttcctcattacaaataacttctatatttaataatcttatgttcattaatactcctaacctttcaaccaagttgaagcggaatttgatttttcaatatcttctaattttctgacacaagcgaaaaccgctgcatcaaaaacatcaattcgctgctctggcataactttttcatactggatcatatcatctgttttttcgattgctcttacattttgtaaacaatactcaaatggatcggcatgaaggtaatataattttccttcctttgcctttgcttcgatccttctaaatccttcagactttttataaaaatactgcggctgatctatgatattaaaaccagcttttttcatcccaacaaaatactctctacaaaactttctatcatggccaacttgttttatcttaaatcccatctttcgcatttttacaaaccaatttacaatatcagcataattaacaactggattattgcacatatccagccagccatcatccttccagccaaaaagtggtattccatcttcatccgcttttttgtgagctgcaacgattgggaaccaggcgtggggaataataatatcaatgccctggtattctccatataaagcggtggcagttaaatcatgcaacttggataaatcggccccgccataccaagtaataggtagctttgcaagttgttttaaggtccattcatacttattgtccgaatttctaaactcatctaaattgaaataagctttcatggcacttgtataaatgttcattgacttcgccagaaaatcttttcgctgctgcggatcattttgagcttgcaacgcatcatttaaaatatcatctggcctgatgcttaccccatatgctgggtttgctttttcatgctggatcggattagtataatcaacctcgcctgtttcgtcttcatccgctttacaaatgaaaataaagtatgcttcatcctttacagttccatcaagtacctttttgcaatacattaaccgctggtaacaaaaagaattcatattgtcaccagcggtcgttatgcctatcattaacttatttgtatatgccttcatagcttcctttatgatgttgtattgcttcggtgttttatatgcgtgtatttcatccgcaatggcaatattacaattcaaactatcctgacgatctgggtttgctgcaagtgcttgaataaaaatgccgccatccccaagatccccttgtattgaatgttcctgattattgtcaataactctgaagttttgcttttctcccatagcttcaagattaaaattaataaaattgaaactttcaagggattgtttcaaagctgctgcggtaatatataccttacttccactttttcgctctagtaggcccaaggcccacgccaacgccgctgcaaatgaagtcttaatattctttctaggtataaaaataaacgcttctttgaagcgccttatcttagtacctttatggtaaaaacctaataagttatacacctggaatttatgaaatggttctaataaaaatggtgtgccccttaaaggcgttccatctagtttctcaccttgtgcatgaacaaaggttttttctattattccgattacaaattcagcatcctttggattaaattcataagctggattttttaaatcatttaaaaatctgttacaagcttgtatttgttctttacaagctatctttcttttttcaacaatactgttggcatattccattactaaattatagtttgtatattggatcattgtagctcctggagtaccgctgcaagttttgacttttgatttccttcaggtgtaacagatcccaaggcttttggatttaaacaaagtctatcagaatatgcaagaatatcttttcttagtgattcaagcgttgccacaattgcagactttttggtcccgccagctgcggtttctgtttcatattgatagccgctatcttcaaattcctttaatgcaacttcatattgaatattaagatcaacatatatgcctataaggctgctatattgctttttgtatactcctaaaactttcatatcttccaccacttgggccatcatttctgctttattttctggcatcctctcacctcctaaaaaaagtttttgggtagtcgatctattggaaaaggttatctccctcggttccttatcggttaactattttatctcaaaggtgggggaacagctttttaactattgtaatattgtattacaattatataaattagcataaataaaaagaagatgcttcttaatactagattcatcttcctaaattatcatattatattttcttgctctaattacttatttattccttattgaaattaattaaattttgcaataaattcatcaaattcatcttgcgatatattagttccgtttaatttatatgactcacctaaaccattattatggcagtcccaagaatctacctttatgcatttattattttctaatttatatcctgcaccccatatgtttccttgagtttgtgcatttattataaattcttttctatcactattatatccaacataccatccatgaccaaacggtatatgttctacttgaatattcccgtctttatatgtaaatattgatattgttaaacttcccatagaatttccatgtgttataatcatttcaaaagttccatcttgatctatatctataacattattaaataatgtaagaggattatcgcattgaatattatactttctcattaattgtttactttgtaaaatctccgcataacttttaagttctactccaccattactccaaacacccttattatttagataatagccatcaacaattttatcatgatccatatatccttcagagttaaaatagtaccaacctccatcaatttccttccaacctttacaatatgaactaccttcagcataccaccaacctgtagaatcctgtctccattctgcacttgcacctattggatttaatgctaatattgacgctactattaatgtactagccattacttttgttaattttaattttttcactacatatccccccattattgtttttacattattataacatcattactatattttataaattatattatttatgcctattgatcctaactacccaatcttcccctgactttgtcaattgattgttcgttctatcatgcattttatcatgacatttgttacataaactaataaggttatcactatttaattttagatctggcctttgatccaaaggaattacgtggtgtactgtagccgctgcgacactcctaccataccttaaacattctttgcaccgatattcgtcacgcttcaatatccttgatctcttggctatccacttaggatctttataaaacttatttacttgcttcattctatcctcattagttacttaatggctatatgaatactacttaaccaattgatgctgctgcataaagttagttgatgataccttatcattttgtttatatattgtgcctcaatatatttttgttaagatctaactttaaatagttttatcaattgttctttctattctttttcatagtcctcttatcatttgtttagattcagcaattgtgataacccaacataaacatctaaggcttaatgtaaaccgtaaaccaaaaaatttattaactctatatctgaaaggaggtgcataataaatgaaaataaaaatatgcaaaccttagatgcttatgttgagctatcttccaagctcattgccttttgctataatacaataataacatcatttcctcatggaaaactgttggcttattggtgaattattggcgaaaaactgtttaaatattggtgaaaaactggtgtgaaattgattcattgggatatatgtaagctgctaaatgatttattattttattcttagctttgcagcaattatctttatccatgcccaaactcattccaatctctatccatgtctttttccttcccttttgaaagtatcttaattcaactatctttaattcttcttccttcaatgattcaatcccattgtttatgagctgctgcaatataataagatcttgctttgattgcttcagcctttttaattcttcgcttatatgttcatcccttcggatcacttcattttcaactgatgaattaaaagcgttggtaggtcctgtcttttcttcatatgataccccagcaactgcaacatcattacttaatctttctatataaatatctatgcttttgattcttagatctatattcttatattcatacaaggctctttccgttttcttaaataggtgatccattattttattactcctttgtttatcaggttacaaattcactttttaaaactgtaaccgctggatttaagttatatcaatgctttaagctatattcgctctgatgggttacacaaaaatatatatacactctacttttataaaaataagcttatttactatatttccttataatatatatattattttttctgtaacttctgtaacttatatatatatatagtgcttaatgcaagtaatagccttattctttgcggttacaagttgggttacacacttaaaaatttgtgtaaccttgcttattttttgcaaccttttatttatagccagctgccaatatcatccacgttttttggctcgttaggcactagcgttaattttgccctttcctgactttcagtaccttcaaaagaatcaacgttaggaataaccaataaacctaattcagttaatttctttatactatatctgtccattcttagtgatttcttttggatcttaaaagttttattatatgctggctctttttggccttcctcatagtctttcaattcttcaggatcttgaacaatataacctgacagtctggcttgtttcttaaagtcatttactttaattggtgttatgtccaccgcatttgagttgttcgcatactccataacctttgcaacaagttctgttgtatacatatataagaactccccttcatgccttatcattccctcaatatatgggacttttccaaggcccgccatttcatcaaatagtgataacatctgttctactattgaataggcatcatctttattccctaatacttcggctttgattaattctgtgatctggtccacataatcaataataggatcaataccatttttaattaaaaccttattaaatatctcaattccaactgatatattacaagcggtgctttgcggcctgtcctttaggtctgtgaacttggctgctgcgacttgctgcatttgttcatattcttcgcttgataggtccaaaattgctgctataattgatctgcctagagaatttaattccttttcgtggtccattaaatatctaatagcttcggtattttcatttgttctggctgcctttgaaacatagactatacatgatctagttacaagggccttttcagcgtttgggtatgattcttcaccagccattattattggcctttgatactcatatttataaagcttttgcagcttgtttcccttttctcttaccccacgatcataaagatctcttagggtttgggatatttcatttaatttgttcttattcatcattgatggtttaaattcatcatacaaggctggataattgccagtgcatagatcttttagcattgcaaaacttgaacttcccatagtttttttgttatcttctggataattcaaaataggtgctataactttttcaagaattgtactttttccagacccagactccccaacgattaataagtgatgcagctttcgccctgtcttaatattctgatatactgctaaattattaactattgtgcccaaaatggctgctgctttatcaaaagataaatacccaagtaaggcatctttcaggcccttcaaactatctgcctttataggctcaatatccattatgttaattttgctatcctctgcatatatagaaacatctattttattatcttttttcattgctcccactcctgtcacaaatgataattcatcttttaactcaataaacctatcacctgaatatatttcttctgtatcaactaaataattgttattaatccaagctttataatcattcaatatggccatgctgccataaaaagttagatccatactgcccatgaaattcttaaaggaccttacatcatcaaaaacggtgctaaagccactcttttcgattgtcttaccatttgcactcctgaaggtgatcttcaccccttcggcatcatcttcaacataatgaaggatctttccatctataaccttaaaattacttactggaattttctttacttcctcatttttaattatgtttatgtatgttttgccaaactcacaataaaaatcatatttattattgaggtttgatgccctgtgaaatgctgcaaatagatcttctaggttgtggcccacttcgatccaatcggtaacatctttgttattgcccaaagctctaagatctgacaatttaatcattttaaaactatcgctgatctcctgaaactcaattcttattttttcaacataaatttcaccagcctggccagtatcaccaataacataaactgctttgatcctttgctctttgatttttgaaagatccttgcacccttttattgatgtggctacataattttttcttctaagcaatttattaattgtatttgcatccttttcgccttcaacaaatattattgtttttccattcttaatgccttgtagtacattgtaaaggttgtaaggaacatcaattatcccatccctattattaattatcttatcgcccataaatctataatacgaacttgcttttttaccatctggttttaagaatttagccttataataaataatttcattttgttcgttaacaaattcaaatacgcctaaaagtttataccctagtttatattcactatttttaatatcccaatcaattcggcttagtattttatcaaagcgtagctctatttcagttttttcgccttgtattcctaaaagttccctcgctgttttataatcaacatttctataattttgcatgaagtcgatcgcatcccctgaagctccacaagcaaaacatttatatctatacttatttttatcagggaagaatttaaccgataatgaaggcgtatgatctgaatgaaaagggcagtttatataaccttgcctattaaacctattacctaattcagtttcaattgtttcatgtaaattaatatcacttatttctttcattccctcacctcgttaaattcatttatcttttgttcgtaactcaattcctcaccagataaaaattctataaagaatattattccgcttaattgcctggtaacatcattgaaaagatccagatattttatacactcgctgacactattagtcttgaaaaatacttcagcttttttgttcctttctaatagctcattatatttgaccttcagggaatacagatctttttcactgtatttaatacctgaatccatctttatctatttgccttttcaacctttcaatcttcgcttcaataaacccatctatagtggcttggctgtagatcaatcgcaactcggcaacccttatttcaagttctgcaattccttcttctatattgtgcggttcgccagaaacatctttcaaaagtgcttcacttaatcccgctgctgcttgtgctgctcttatcttttgtgttgcttgtccgaatctacaaatagcttttattaatagatctttattcatttgtatctcactgtacatcttgaacctcccgcctattcccatttagtaattttaaaatttattaatgctgctaaagctatagcaataattatggtatatatattgattggtattttatagtccaataagctccatataatatcccttatggctttcatggtccagaacaaacctatatcaattaaaaattctagtataatcatttgtatcaacttcattgctactactccgctattgttaataaaagatcgttacttgcgatatgtttgattattttgcattcttcggttgcttctaaatgaatacataacccatatggggttgggaagttatcttcataatcttctaccctgttattagttaaatcaacgcccctgaagtaaatatcatcatttacaacaagccaaaccgctccattggccatcattaaaatatctcccctatctatattgtgaaaatctatttcggcatttacatcaataatcatttgttatcttctcctttataatcaattaaaatggcatatctccgttgtcaactggtgttatgtctgcgttaagttttgtattttcattgctgctgctattcttattttctaagaactcaaccccattaactggatctgccacaacttcggttatatatttttttatcccttggggatcgtcatatgatctggtgacaatcttcccagctataccaaccttagaaccttttctggtgtagttcgctacactttcagcacttttgccccaaaccactataggtatgtaatagacttttgcattttctccataaccatcattaaccgctatattaaaggtagcttttgctgtctgtttctctcccacatgacttaaattagcatcattagttaatcttcctataagtatagatttattcaccctttttccctccgctcttttcttgctggatcttatctttcttttcatttaacatcttcatgcaatacgccagatctctattctcgatctcctttatttcctttaccttggcccaggcgcaaaagttcattttatctgtattcgtttcctttattaagttttcaattacttttacatgaacgttactaattggatcgcgcgccccttcttcttccccttcggtttcggttgtatcattttccgcaatttcaaaggcattcatatataaatatcttttcgcatatgtcaaagctccacctatgttttgaattgcattgcatccttttaattctgatatagcaactggcatatcaaagcttatgaatttttctatatcttcgcaatcatatattaaaagtgttgcaacatctttagtcatattgaaaaccggattaacaccatgcttattgcatagctttgcaacatctggtaaaaagtcttttagttcaaaataatcatatttagaatatgtatttcttccagttttcctcaactctaccccttgcaaatctgccctcaccttttgcagctttgcaactacatttagcttgtttttttcttctgccatctgctttcttcctactttctccattcaaaagatacgcataccataaagtcattatctttgaattttatattttctttttcttcaatatctttcattaaaattgattttttctggcattctccattgttattaaagctgcattcactagctttgcaataaacaatcaatttttcatcccctttaaattcctatttgtttgatctgtttagttatatataagggcataacaaaagctgcttaaaggcccatatcattaaagaaaattttcattaatctttcagtatctttaagaaatatcctcattgttttgtcagtttcttcacacgccatggcaaattttaaaccgtcttctattatttccaatgtcccttggaattctgcaactcttaactcatatttcaatttatctctttcattatttgcttctaattccaatatggtaaattccttaatatctgctttgatttcttctattctttcttttaataattcaatcatcattgttttttatctcctttataaatgcctttatatcttccttaaaggcttcaaaatctttaggatataatatatatccatatcctttggctgcttttattaactcaatggtccttatttgcagcggtgatggtgttccaccttctttttttaattcgatcccaatgaaatggcctgaaatacaccctacaatatcaggaattccactttttgaataagcgcccgcccaatgtttgaaataccaaacttcaggagctaaacaatccagaaattttttaactttcttttcaaactctttttcactaggcatggttatactgctgctttacttctgataatgttcttctttgtattctctcaatggctttcatatgcttcgctatctgttccgcttggtgctggatcttatattcttttaaagcttctcttgaccttcctacccaaatattttgcttatattcttttacttcttcacctattttgcttttgtctatgcttttcatttcattcgctggcttgattatatattcatttttccctgattcgtacaccattacgtaccccataattaaataccccttttctctaataattcatttgttaagatgtattcaacttttatattgaatattttatctataactttcatgcttggcattgtctggccgctttcatacctttgtatggttctagtgcttttattaagtctcattgccagatcttcctgggttaacccttgcttacctctatacactttgatagcgtttccaatgttcatatatactccccctatattcaccgcccttcatgctggctcttgttaaatttcaatatctaatatattacgtaaggcttttaatacctcatcattcggctttctattgttattttcatatctacatattgcactatcactcaaattcaccctttgcccaagttctctttgtgacaaagactctttttctcttgcggatcttattttttctcctagtgtcatttatatttccccctcaaaaagcttgtctgtataatcctttctttgtttgagcgtttcaaaaatatcttcttcaatactcttttcagtaattagataataataaaagcatgatctttgctgccccatgcggtgggtacgctttttactttgttcaaaaagttcgctgctaagtgttaagctaaaataaatgatcttatttgccttttgcaaattaaggcccattgctcccgcctggtattggatcaatgttattgtattatcatgctgctcgtagttcttcagatctctttgccctccatttacaatagaaataggcttctttaatttcttgcagatctcttggagcttctggcattcatatttaaaattgtagaatataatcattcgatcctctgttgattccaaaagctctgtgaccttctcatatttgtttttgttatacattgctgcaagctggcgcaaatataacaaccttgtaagtgaagtgtcaccaactaactcattttcttcgatttcaattaaacgatcttttttaaattttttatactgcggaatgttttttattttaatctcatatgggatcacttcaggcagttcaataacttcttctgttttcataaaaaccgcaccatactgccgcaacatctgcttcaaatcgtctatatttttataccctgttacttttttctttttaaaccctcctagattcatcaaaaagaatttaatatacttgtcccaatatgcttcttttgtgatcttccagcctaacaatttgatctggctgaaaagttcctcatactttccccctgtaggtgttccagatagcaatattatgtttttagccttcatcttcaagataaatttagttcgattgctgctttcgtttttgatatagctgctttcatctaggatcaaagtgaatccttttagttttttaaattcatcccttcgccagatcaaatcataatttataattattactgtgttcggctggatctcttgcagctgctttttatatatgatcgttttatattttggataaaattcattgaaatgatcttcccaatcctccaattttgatttctggcataccactaaaataatgtttgtttccaattcttcagctttttcagtagcaacaaaggttttgccaaggcccatatctaaataataggcggctttattcatgccccttgtcatttctaaggcttttaactgatgtggaaataattttattttagccatttacttttatatccccttgcctttagtttatggtatctagtgcatatggcggtttctgttttctctagtgcgtaacttagcatttttaggccatcatatttataaaaatacatcaaataatcatcatcctctttggtccatggctggtcctgtcttgcgtgaaaatctggattgtattccatgcggccgcgtttattatatttgatctcatgggccattagaattcaaaacccaaacttctcaaataccatactctcccatatactgtagattcctttttttcaagtgcataactcatcattatgagtccatcaattttataatattccattaaatatagatcttcttcccatgtccatttttcatgctgcttgccgtggaactctgggttgtattccatttgaccctttttgttatactttatcgatgcttccattttttttactttcttgattgtccaatttttcaattttaattttattagtctttaagttcaatataaatttaattttcataattacctctcatatttgatcttttctgttagtggaatgccatgacattagtatacgtgacattattatactgctcaacgtctgaatcttgctaaaaattatagtttagcttaacaacactttgatttactctttttacttctgtaaatggaagtaaaattcaaaattattttccgtatacagaaaaacttcttcttctatttacttctttttacactatacttttccttttaaccctttgttatatctgagctatcggattttatatataaatacatcttgaatcacatattatatatgttatactattgttaacggaagtatgagaccaaaagaatattaccattacaaattatcaactagggggatataagattgagtgatattagtataataggtgaaaatataaaaaaaattagagttttaaaaaatctttctgcttatgagttagctaaacgcgctaacgttggtggtgcaactataagtgaaatagaaagtggtaaaagaaaaacattaaaaggagataccttagaaaaaattgctgctgctcttggtgttactgccaatgatctaatgggcaatactgaaacagtaagttttgaaacagataaccttatggatataattaacataattgattatattgaaaatccgatattggacgatagacaaattactaaagacgaaaagaaaatcttaatgtcagcaattgcaatgggtataagtacaattagatataatagacttaaataaaagtggtagcgagttcttaccacttttttttattagatttatggctcaattgtaacatgtagctttaaaaaaaaatacagtattatcgtaaaatactttatgtaatttattactatatattaatatattaccttaaagtattttcatataaagtgttattttttagatatactataactaatgacaaaaaggagaataaacatggaaagcaaatggatagatgctggtaacaggttaagagcaataagaaaagaaaccaatttgtcggttttcaaagtagcaaagaaagtacatataagcggaaattatttatcaatgcttgaacgaggtataaactgcccttcggatgctgttttatttaacttagctgaattctataatgtcgatccttctgaattgttcaaactttatgataaagtcacccctccaacaaaccaacaattaaaaaatatgccctctttaaaaggtttaattacacaactttccattgatcctaaattaacacctgaagaaaaggacaaattcgccgcacaattatatgagattgcaaacaaattatttcataaggagtgattacatggaaaaatggtttctagacttcgaagaatggcttggcggtaaatatggattttcatttgtagtacattttgaagatattattttatttgctgctggtgtattcttgggtatgcttattatgtctgtactttcagggcgggttgtttttaaacttcaaaaagttagcaatcttggatctaacaaaattaaattagttaaatttaaacatgaaggtacaaagcaatatattgcagatccgcaaacagtgggagaatcagtggaaacactacttcttgtcatattccgcccccttttccaatcaaacgattatacctatagggatgaaaaaaggacaaaatattttttaatttttcttactataatagggatcttattattcgctttggctcttacttgtatcactactgttgtacatgatggaaaataaaaatgagcttcatcataaattctactcttataatgcaactcattttatacggatattggtttacctaataaattattaaaacataaaagatcaacttattttgaaactattaataacaaaatctgtatctccaaatatcatgcttatcttcttggaatcaaaatcatagtaataaattgcatttgacattataggtgtactaccctccaactcttgaattattttagattttggagtagttcctaagaaataaaatccattttcacttaataagaattttggatatttaaccgaactaatattaatatcttgaaatttatcattaggttgtataagtatttgttctgaattatcattcaaatctaataaatagattttatttgtaggcatattattttctattgttgttgcatcaaatataattttatcaccttggttgttaacagatatattatttatagatttgtctgttgaatataacaattgtttgttttttccctcttcatcatatttaaatattttatgagttggtatttgtccactttccatttcattaatcgaacgttcaattgtgtatattttatgattatatttatcccaataaaaattaaatatatatacatcatcatctttattattccataattctgttgtactgtcctttagtgaatatactccaagcgtataacttttgcgatttttagtaggtgttctgaaaattattttgttatcacttacatcaaatatatcaccactgtagttagcgtttaatacactagttgccttttttgattcatttgacaactcagccttatatatatcatattttttatcaccaagttctgaataatatattgtattatttatttcatctatattaaaatcagaataatttttattctccctaaagaaaacatttttaactgacttattatatgtattgtatatactataggttgtcttataatcgtaagtactcataatatatatattatccttaccattaaccacaacattagttctattataatgtcttactgttattaataacactaatgatagtaatatcactactccacaaccgaacaacaattttcttttcatgccacttctcctatttattatataaattatgatttttaatttatataatattgaaataagccagacaatattaactgccgacttatttcaatattattaactctttctttaattatggtaatatcttccttgaaaatgtccaagactagaaggatgtccaaatttagcccatccactataagttaaatctaaaacaacacctgatggaaaattgccaacatcatatttgaaaaagtgatatgattttctgtttgtgtcatcatttacatatatttccgtaccagctggcgggttgtccacatattgtttagttgcacaatcactgctggttaatgttttcccatcataccctacttttccctcgccattgtaccgtgaaattaatccactagcagaataatattctgcctgcgctggtgcaggtataaataaacaacctagcaatgctacacttaatgtactaaatgcaatttttttaattttttttactatcataaacattcctcctaataattggtatataatatacattttacatatttttccttccgtatctctatattttttaataaatatccaattattttttagtttataatacatatgagcaatattgtcactttccttaataatattaaaatcgttatttattatccatatattccatttattgaattgtaatgcccttgtttacaggcttttaactttatgttacaatcaacttgcgagatcggtggtaactaaagttgctgccttttgtttttatttcatatactcatataagttttttgattcttccaatcctaacaaagctttttctaatgaatcataatcatactccctaggctcaaaattattgaattgtggaactgcccagtcctttttatacgggtttttgaattcaacttttattttcttctcattctttatggcccatcttgtatacttgaattcatcattgatattattttggctcttcatgtggtcaaacgcttttataatttttgcagcatcatttccactatcttttaataactctttagattgctttttgttaaatcctgtataattagcaatttgaattacttttttatcctctgaatcttccagaataacttcatctacgtgtatttgattttcaaggggttttttaccgttgctatcaactggtaattctttcggttcttctgttggtttctcttgtttctttgttccttcgccaacgtagaataaatatttatgtataaaatataaatttttattccctctaccttttttgatagtgatatactttttttcttccaatgcctttaaagtatctgaaacagttgcttttctattagttgataatgtaatcattaaatgctcatagttcggataagaatatccatctttatgactatgatataatattaagctacttagtaggatcttttcacttggttttagattgatatcattatttatatttagcattgtctttagtaaatctttaatcactatcattccccccttacttcctttgtttcttgttccttacatccttaaatataatctcgttttcttcttctgtatttaatcgtatttcgtaaccattggcaattaaatattctttaactgctttatttgttatcttactagcatcaatcatactttcatttttcatacgatataaagtgtcatacacttcaggctctagtctgcaagtaaatcgctcgagtgccattcatttacctccttccattcatcttacatatcaaatatactatagacgtctatacacgtcaatagtatactcaatttttttttactaatttgtcttaaactattattactataaaactaaactgataacgttgtttttaataataaatataaataataaatatatgtaatatatatatagtatcgaaaagcgtaacactctattactcaattagtaactctagtattactaaaatcgtacctctctattactaaaagagtaacactccacaaaaatagtgttactaaaagcgtaactctgtggataatgtgaacaatacgagctgactcttgactgcatcctaaattatgaaaattgaattaatattataaaagaggtgagatattaaaataatatctcacctcttttataatattaatttaaatacaatatatataagccatacaacaaagacgcatagtaatataatttcagatattatactactctttttaataggcttaattttaattatataataagacataaataataagagtactactaaatagcaacttactattaaatatcttgtattgctattttcacttaaagcaataaataccattatgaatatcataattaatgtatttatttgtttaaaatattttataatagttttcaatatattttaccaccattatttttaatcagaataatattcattgactattgtatcaccaatttggttgtttctatttgaatcagaatagaatgttgtcaaacttctttcagctcctggagtgctagttccaataatatatttataaaatacatcttgtccccaaaatacaagaggaatttcatcagctacaatggcaccagctacagcgcctattgcgcctgatgttccacctgatataggagtacctaatgatccaataacacctgcaattacaccagttactgcaattaatgtatatctttttatcctgcttgaaccaaagaatggggcactatattcccaatctgtcaaattttcatctggttctctataatctagatgtattccaccttgttgtttcatcttatttaaatttttcgcacttaaatccaatgaatcggtagttgtattatttgttttaacatctgtagtcttaatagttacctttccattttctacagttgttgttaaagtggaatctaattcataatctccagtttcgatatttttgacataaatcttactattaccatttgtaagtttagaattcatactttccataaccttataagatttgccatcttcatcataagtatacataacatgagccaaatttttatcccaaattttaaaattggactttcctgattttttaacgtcaatacttttattgactaccttagtgttgttatttgttgctgcaaaagttactgctggtgtaaagcttgttgctgtagcaagcattaaagttaaagcaacaaattttagtgttttagaattcatcattctcaatctctcctctttatataatattttattagtcaaccgcgggatttgtcgaaaatattgatacttcccctaattaactatatgttaaataatatatatactgacatattgagtcaattaaatatccttaaaacgtccaaattgaggaataaaaaggttactttgcattataaaaagaacctctttaaaggttcttaattttctattatattttctttaaaactacagtaattttctcattatcaatattaaatgttttattctctattgaatatttaacattattatagataattttattattagcacgtaactactttatctatcattccaatacaattttttattgccattaattgaatttcataacttttaattctactttctaactctctaatatataattccttctctagactttcgctagttgtttcaatacctaaatacctatgtacttcattcaatgtaattaaatactcttttcccgacttcacggctttcaactttccttgccttactgctagggttaatctagtaactggaatattatatcttgctgaaatctcttttattttaaagattgttttgtcatttgttgaattcattttcttcctcctaatttctttaatctatattaatataatatcaatttattatatttaataaaaaccttatattcctcttatagatgtatttaaatttgattttctttaaatatctttatttccgttaacaaattcttattatttccgtttacaaaagcaaattatttttatataatagttttgttgacagaattattggccagtaattgttttgttttcagaattattaaataaatctttaccaaaatgaaaatttaaaaagcgggtgaacaaatggcaacatataaacaaatatctaaatataattggagtgttagtgtaagtcttggatacgaagacggtaaacaaaacagaacaaaaaagcaaggttttaaaactaaaaaagatgctgaaaaatgggcaactgaaattgtatccaaaaaacataaagggtatgttcctacctctgaaagcaatatattattaaaagattttatcactaaatggttcaatgaattcaaaattaatactatatcaattaatactgtaagtaattataaatctcgaattaatacgcacataataccaaaattggggcattataaattaaataagattactaatatagtcgttcaagacttttataatagtctcattaatgagggtgccaaaccttcaagtgctaaaaagatattagaaactttaagcaattgccttagatatgcacaaaaaaataaattaatatatctggttcctgttgacattgatagagttccgattgaaaaaaataaagtttcattttggaacaaatctgaagttgatttttttttaaatgctataaaagataattatttaaatacaccaatattaattgaaatctttacaggtttacgaatcggtgaattatgtggtttacgttggtgtgatgtagatttagataatggatattttattattagaaaccaagctataattgataaaacaactaaaactttattcctttcagataaattaaaaacaaagacaagctatagaaaaattgcattacctgaaatattagtcaactatttaaaatctattaaagataatgcacttgatactgattttgtagtattaagtcgtgaagggcttatgtgtaatccacgtaatttatcaatgaattttactaaagaaatatcaagatataaattatcactggcagattataaaaaatctaaaaataagatggatagttatatgaacttgccccaacttagttttcatggtcttagacatactcatgctacattattgatatttaaaggtgaaaatataaaagttgtatctgaaagactaggccataaaagtattactgaaacactagatacttatactcatgttatggaagatatgagaaataatactgccgatttattaaatgatatgtttataaatgcaatctcaaactaagcaccgaataaacacataaaaacttttccaaggaaaacaaacaccaaataaacactttttcagaaaatagaaacggctcaacccgcatggttaagccgtttctttatacaacttggtactcccagcgggaatcgaacccacatctatcccttaggaggggattgttctatccatttaactataggagcataatatttaaatatccttttttgtttaatttgtacttataaattttattacaattatttgtcattgtcaaattaataatttatttttacataaaaaaataaattatattagatattaaaggtctgattaataacttttaaaaaaacaaatttttttataaatacttgataaaacacaaatattataacttattcttcttctagctccatatgaacttctaaactaataagcaaaaaatctgaatgtactaggccaaaactgtaaaaataaagcttaaataccctctatatgtatttaagccttataattttaaattgttttaactttaaatttcttattaactctaactctaaatatatctacaattttggttatcagaggactggatgctattattactgctagcgatatgagccaatgacttaattgtattttagttaaactaaatatatatcttcctattggtgttaagaaccctaacactattatcccaaacatagataaacacattatcgttttaaacttagttaacggtcttgccactctaagcaataccaccatactaattccagaaaacattagtactgctaaagttctactgtaatccattgggagattcatttgtattgatataataaatgttataagtataaatatagcaagtaatatcccgttaggaatactaacagttaatattcttgttaaaaatccctttttaactccacccgtgctaggcaataacgctaaaaagaatgatggaattcctatagcgcaacttcccactaatgacaactgtattggaagtattggatactctataaataatatagaacatacaaatgataaaattatgcaaaatacagttttggataaaaataattctgatactctctccaaattattaatttgctttcttccctcttcaagaactttaggaagcgcagtgaaatcagatttcattaatactaattgggctacagcctttgttgcatcagagccatttgccattgcaatgccgcaatcagatgattttaaagcaagtacatcatttactccgtcacctgtcattgcaacagtatgacccatctcctgaagagctaaaacaattcttttcttttgatgcggagtaactcttccaaaaacagtcatctcctgaatcaaattcttcaatttttcattatcctctggcaactctcttgcatccacatatttctcccagccacttacacctgctcttcttgcgacctctgaaacggtaataggactatctccagaaataatcttcacccctacgccttgactatcaaagtactttaatacatcaggtgctgcttctcttatgatatcctcaattagcaatagtgctacactttctatcttaccttctaatttttcattcaaattattatgaagatttgctagtaataaaactctttttccttttctagcttcttctttaactatttcttctattaactgatattccttacccaatattatttccggtgcgccaagtacccatgtcccaagcttttcaaaagtagctccactccattttcttttagatgagaaagcaattttgtctaaaactttgatttccttatcatattccttatatttttctaatatagctttctgagttggattattacttggtaaattatttattaatgctgctaatacattatctatatcttcagaacttttagaactaatattcttcacttctgacaatcttaactctccttgagtcaaagttcctgtcttatctaaacaaagtacatcaactcttgctaagacttctgtagcactcaactcttgaactaaagtatcatatttagataattttataattgacactatgaatgtggcactcgttagtaatactaatccctctggtatcattcctacaattcctgatactgctcctattaatgcatcctgccacgtattccctggtattcttagttgagttactattaataatgcagatagaggaggtacaatccatattattactctaaaaattttatctattgctgcttgtagctctgaatttattattttaaattgcttagcttcctcagcaagagtagacgaatatgtttctttacctacttttgtaacaatcgcatatccctctccagatactacgaaacttccagatagcaatatctctttgtaatttttagatattgcatcagcttctcctgttaacatagactcatctatttctaatccgttactatgcaaaacttctccatcagccaatacctgcatgccggtttccagataaatcacatcatccaatacaatttcttctattgcaatctcctttatttcaccatttctaagaacttttgcatgtgcagaacttatgactgataacttttctaatgtgcgcttagctttaatttcttgaaccactccaattaatgtattcactattataacgcccacaaatatagcattcttaggtgatcctgctagaataattattgctgcaagtacaaagtttattgcattaaaccttgtaaacaaattagctcttattatttgaggcatagttcttgatggtgttttcggaatgtgatttacttttccttctttaattctctgcttaacttcttcagatgttaagccaattatagtttcagcatctttctccttcatattcaaagtattattatttaaattcatcaaatttctcctgcctatgtaaattatttgctatactatttcatagaattatcattgtcttatatattatacattttttaatattattttaccctaattatttacttaattttaaattaattttattgaatttttaataggtatgtaatctatttagtctttcaatctattaatttttatactatactgattagtgtaaaaattaatagattaagggtgtgtaatttttaatgttaagaactatctatttttatctcggattaataataagtcttatattttcatctatttatagaattagaataaaaatcttaaccaataaaggcgatattgaaggaagaaaatatttcattcataaagtaagccattcttggggaaaatttataatgaaaatatcaggtgcaaaaattaatgttatcggcttagataatcttccaaaagatcaaactgtattatttgtatctaatcaccaaagtaactttgatattccattgcttctaagctgcatagacattccaaaaggatttattgcaaaaaaggagcttgaaaaactacctcttattagtacttggatgaaatatataaattgcatttttatggatagagataacttaagaaaatccgctgaatcaatagttgaaggcgttaatttattaaagtctggttattcaatggtaatattcccagagggcactagaagcaaaggcaagtctgtagatgagtttaaaagtggaagctttaagttggctacaaaatctaaatgtcctatagttccactaaccataaatgggacatataagcttatggaagaaaataataatgcaataaaaagttctgatatagaattagtgatacatcctctaatagatgttgctgctctaaacaaagacgagctagaaaaactccctgaaactgttcattctatcatatctagtgcttgcaagctacactaatataaaaagcgagttgccttaaattaggcagcttatttttatgcatcaatttaagtatattttatactaaatgctgctaataatatatttagattataatatcttttgacatgaatttatctattgtgttataatgaattcatttgacttatatataaaactttaatataagttatcgaaacaaaaataactaattttgaaacaaagaaacgaggatatttaatgaatgataatcaatttgctacattaggtcttaaagagagtattgttaaggcaatatcagaccttggttttacaaaaccatctcaaatacaagaacaaagtatccctgtaacacttagtggcgctgatttaatagggcaggcacaaactggtaccggaaaaactgcagcttacagcttaccaattatcaccaagatgagtgataatagaggaatcaaatctcttattttagcaccaacaagagaacttgctgttcaagttaatgaggagatacaaagactttctaaatatgagaaaattgtaactctagctgtttatggtggagattcaatcgacagacaaatcagagcactaagaaaaggtgatgtcgatattgtagttggaacacctggtagaatattagatcttgtaaaaagaaaatgccttcatttagaaagtatagaatttctagtactagatgaagctgacgaaatgcttaacatgggattcatcgatgatattcaagaaattcttagtcatacaccatctgaaagacaaactttattattttcagcaacaatgcctgatccaatagcaaagttggctaaaaagtatatgaaaccagatgctaaacttgttagtattaagaggagttcattaactgtatctaaaattgagcaaagttattttatgattaataataagcatagattagaagctctttgtaggttacttgatctagataatcctagttcggctataatattctgtagaactaaaagaggcgttgatgagcttgtacaagagctacaatcaaaaggttatatggttgaaggtatgcatggagatatgacacaagctcacagattaactactttaaataaatttaaagaaggtacactaaatctattaatagctactgatgttgctgctagaggtatagatgtagaaggtgtgactcatgtatttaactatgatttacctcaagatgtagaatcatatgttcacagaattggtagaactggtagagcaaataaaagcggtacagcttattctttagtaactccaaaggatttttcaatgcttaaacaaattcaaaatgttactaaaagttcaatcacacaaaagccagttccaactgcagaagaaattaataataaaaaatttaaggacatgatgtcagaggttgagagtactattaaagctggtgatcttactaagtttataccaagtgcaatagaattgactgaatcttatgatgcagtatcagttatttcagctctaatgaaaatgaagtttgaaaatgaaattgtatttgattacagttcaaacaaattagaagctcctaaaaaagaagatgttcgtttatttttctctgtcggcaaaagagacggtttgactccaaaagtattaattaattatattaaagatatgacaaaagttaatgcttcagcaattggtcaaatagaccttatggaaaacttctcatttgtaactgttgatgagtctatatcttctaaaatattaaaaaattgtcctggtggaaaaattaataagaagaaggttaatgttgaagttgctaataagcgtaagagataataaaactttttattcttaatactcttacttaagggaagatttaaatttaggtataatgcctagagcttatcctcccttttttgcttttattataaaaataactactctaaaaataacattaaaacatttcatgctattccttatacattactgtatatccgcatcatcttgataagaatccacatctattatattcgatgtattttctaacgaatactttttctgcattattatactaagaactccattatcaatacttttaagtatctgatttgtgtctatatcctcaatatcattaaattttttattataagccttcttaacaagagcagtattagaaaatatcccaaatccactttttttgatttctaatctatttaagtttatatctagtattcctggatcatatcttatgcttaactctctaagatcaataccttttagatctatagttagatgatacatatcatcataccgattaagttttataaaattattatattcttctctatttccttcatcagaagaaatatcctcattatttttagcaaattcatttatatcaaagttatctaaaaatgaattcataattccacttatcttttctatattgtttgtattaaaaacattatcaaatccaaaagtaaaaattttaaacatatcttcctcccaatatatttcttaacacttatataatatttataaacttccaatttgtttaaatcatttatcttaattttagttgtatttttaaactttaattagtgtatcaattctaaatattactcaattttttcaagtgtataatatcattactttttaatactctattaa

SEQ ID NO: 83 - DNA, 28247 bp, Clostridium beijerinckii
gtattttttacaaatagtgttataattaaactaagactatatatttctaggaggaactaagatggataaaatagcattaataactgatagtgcttctgatttgaatacaaatttcgtaatagaaaataatattaaaatagtcccgtttaaaattatattctctgataaagagtatattgatggaatagatataacgccaaaggccctatatgaatatttacctaaggagatacccaaaacttccttacctggtgttgatgattttacatttgctttagagcaagtaaaaaacgaaggatatacacatgcaattattataacaatatcaagtggcctttctggcgcttataactctgcaagacttgcatctgaaaatgtccctgaagtgaaaacttttgtatttgattctatgactttaaccatgtcagaaggagctatggtcattgaaactctaaacctaataaagcaagaaaaatcctttgatgaaatagtgataactttaccttcatttagagataagattgatgtgttttttacaatagatacattagaatacttaataaagggaggacgagttggtaaagttgccggaactatagcgggcgtgctcaatctaaagcctattattactgttggcgatgacggcatataccatacggtttgtaagataagaggcataaaacagtgtatatctaaattaacaaatatattaacaaattatctagaaaatcataaatgtaaagtttgggttttagacgggaatgcacctgaaaaatctaaaatgctttatgattctataaaagatattcctaatctaattgaatgtactttaggaggatcaataggccctgctcttggcgttcataccggacctggccttgttggatttatagttgaaagattagattaagcgaaaaatatatatgttaactattcattcataattaaagagctagatattaaaattcatatttttttatttagctctttgttattattatttacaagtatacttacttttctacttgtaaataataataacaaagaaatctttactgaaaggactgttttgttattatgaaaggttttatattagattcaacatacaaagatgctactattgttaatagaaatgatgatatattcaccatttcatcaaataaattgccaaatagcacaatcccacatcactctataaatttgattgcgtctagctcaaattcacattccaatttaagtaataataacaaatttaacacatacaatgtaattgactatctataataataggtataaaatagtataagtgtaatatatttataatgtgctaggggagccgagaggctgagatttgatattcataaacccttaaaacctgatctagttaattctagcgtagggaatgcaacctcttaaaaactttaaactatttatttggttgataatctccgagcacaattaaggaggtttttttatgtcaatttttaatgattggatcgaacaattttctaaacttttccagaatttctcccaaaacgttcaagatattcttgcaagtccaatgtcaattataactttattaggatgtattttactacttatagcattagctaaggcaaaaaagataaaattcacgccagaactaattgctagaattggtatagcattagcgttagccaccatattaaaaatgctaagattatatcattttcctcaaggtggtagcataactttaggcagcatgataccagtattgcttatagcattcatatacggtcctgaagttggatgtttaacaggatttctttatggtgtaataaccctaatactggatccatatatactacatccggttcaagttttatttgattatccattgccctttacagcattaggtcttgccggattcttcaaacaaagaagattagttggagtgagtattgcaatactggtcagatttttatgtcatcttatttctggtatagttttcttcgggtcatttgccccagaagggatgtctccagtagtttattctttacttgttaatggtccgatgattggaatagaaggaatcatatgcttagtaattttatccgttcttcctatagaaagaatttttcatgcatcatcagtaaatactatttcaaactaactatcatataaaacaatttatatatacaattaagtttccaagctatgcgaagtaactaaacatttcacttatcagcattttaagcttattaatacaaaatatatagaataaaaataggattaattttgttttataaaacaaaattaatcctatttttgatcaaataataaataactatgatttataaattatttattttagacgttttagtcgtattttgcaatcaaattttattcttctatttcaattgcatttactggacagctttcttctgcttcttttgcctcatctacacaaccttctggaacttcatcaactatagctcctgcttttccatcatcttgcatgtcaaagcactctggacatatagatggacataatccgcaagctatacaagtatctttatctacttttggtttcatggtttacttcatctcctctaatatcaaattacaagcttattatttcccaagaaatattaagttatgtatatttaataatataatttaaaatgatgaaataagtatagtataaggaaaagaagttttcttttaatacaatccttcaaatattagtgaatatagcggattctccttaacgtattcctctgcttttccttgctccaatgcttctgtaagttcaatattaattggtaactctcctattaaaggaattccaagatactccgcattttcttctgatgactttctgctaaatactcgtatctttttatcacaatctggacagtttatatatgccatgttctctactacgcccttaatcttcacccctatcttttgggccataataacaactttcttgactatcatggacaccatatcttgtggtgtagaaactattacaatttcatcaatagggaattcctgcattacagttaaagcaatatctcctgtacctggtggcatatctataagtaaatagtcaagctcttcccaattagtttctacaaacatctgctttaacacccctgtaattacaggtcctctccagattacaggttcatcttctaccgctgttaaaagattcatggaaattatttttatcccgctttctgtttccactggctcaaattttaccatatcattttctaatggaattattttagctcttttattgttaaccccaaaaaatctaggcatagatggacctgtaatatctgcatccaacactcctactttatatcccttcttagataacatacttgccatcattccagttacagttgatttaccaactccaccttttccacttataatacctataacatttttaatatttccatatctggatgttaactttaaactttcttcactacatcctgttcctttagattgacatgtgtctttacttttacaactttcacaactcatttatatatgctcctttacttaccaatcttgtgggaccttattaggctcacttattttaatatcccagtctttataattatattctgccgttacatagtaactttcaaaggaattatcctttttattatctactgttattagtgttttgaaaacagtactattatatcctctattttttactttaattattgtatcaaaatcttcataattattgtttactaaatcaacactaggtaaagttttgttcaaacttttcttaaaatcttctaaatccacagaaaatatgtatttcaaacaatctgtatctccagatatgttcactccaactttgtttccgttggataagctatcttttttcttatcaataacttttaatattgattgataatatatataattaaagtctcttggctttcttatgaatgaaagattttgcattattgtattctctaaatttttaggtactgaaaatgccttatcgtcatcataaaagtttcctgtcccatgttcgttagctccaactacatactgatactttctcacttcatctccggtacacacctcaaaaatataatctggatctaatgagcttttctttgaaacttcacttccatctgataaaatcttgtaaatgtcatctatggctttaggatcattaactacaaacctaaatccactatctctaacactttgtataataattttatccaccttattttgctttatataatcaaattgttgatttttaagattcattttaacttctatattatcaatgaagctacatcctgagagcatcatactagagaccaataccaatggtaaaactattgttaaaaacttactatttctcactattcttcttcgctcctttgaaaatcctatggttattaaatacaacaataccaatcaccaaagtaaatattgcgataaattgtgatgttgatagaatcccgacactccctcttggatcatctcttaaaaattctactaaaaatctacctatactatatactattaaatatagtcccactatctttcctgtttgtttttctttcttactatagtacaaaagtataaatcctagcaaaaagtcaaatattgatgaataaatttgcgttggatgcacgtgtattcctgctggtgctaaagatccttttggaaatgtaacacctattggtaattcggtttctgctccataacaacatccagccagaaaacatccaattctaccaaaaccttgggctattgcaagacctggaaccgtcatatccaacatttcaacaatgttccaagactttttcctagaatataagtacatagccaaggctcctccacctatggcaccatatataacaaatccatatccaaagttcagcaatatgcttggctctttaataatatctttaatctcagttaatataaataatccctttccaccaagcgctccacctattacagctaaaatcactaaatttaataaagaatcctcatcatagccttttttctttcctttatttataaatatagcagctgcaactattattccaattgcaatcattaatccataactctttatttgtatcccaaatatctcaaataatattatcctcattgctcgcctccaaacgtcaaataagtatcaaggagaagctattctggcctctccttgatacttaaattataatacttatgcttatccttggcaaatcttatttaactcatcaactcaacattcacacaattatatattttatatcaaacatataatgtagtcttttcatatcaaccacttataatccataaaactttatatacaataaattggctaatttcaactttgagatgatttaatacttgaaataatcgtatttaaaatagtcttcatattatccttataatcctttgacttaagattaaataatatctttgctgtcttaccttctcctaaatttagataatagcattcattgttaaaatcatatccattctttacttttgtttcatatttaactaatactccagaattataggaatttttaaaaggtgttaattctgaattataatattctaggcattgactatttaaatctttttctgcaaacacgtttatatcatctttggtatttactacttgcaataaaccagtaagcttattatttttgtctttaaaatctaattcataactcacatattgccctttactttctttttcctccacattccattcacttggcagagatataacatatttattctcgtcaaaagaatattctttaaatctatttattccctgatccataagaattacctgttcgaaattttctttaaagaagccctgggttatgaccagtatcaacatcaatgataacaatattgacgtaacaatcaactgcttcttattcataacaatgttctctatcttgccggaattacgattgaagaatttttaaaatcatagaacattaaccaatatccttggccattattactatcattagtccatgttacgaaacctgttcttccaccatatggttgatcatttttttctttgcttcctggtattgcatatataatatattgcatttctccatctttattgcatttatatcctaataagaaatgtccttttttactaatgtaaggataataatttaacattggataatatgctaatgtatatttgttataatttgtatcatttgataagtcttctataccatttacaatgattttataccacttacagaagtttatatcattcaattttccaataaatggcttaaagtcttgtgctaacttctcaaaatacttacctatatctccacttatagtgaatccctgatttgaagtattttgattattattattttcatttgatgtatctcccatatttaagtctagctgtcccatacctccagtttcaccgctagtctctggctgttccattgtctctgtgttcatttgattcattccagtatttgatgatgtttgatctattccagtattactgccggtctggttcatagctcctgtgccagtctgacttaccgagttccctgaccatggttgccacattgttcctgtattaatctggcccattccagtattagagttgccttgttccatagactcccctgtaccagtcgtattcatcgtagatgtatcatttgctcctgtggctccacctaaatttccttgttgaatattattttcatattcatcgaaatctattatgtccattctgtcggatgtatccacgtcattcaatttatccaatttaaagttttcttctattctcctagagctaacttgcacattatctatatcctgattttcatttctacatttcttttctaatttgaatttcttccatttagaattatcattcttcttatcctttataaatccatatactataacctcttcatacatgtgatgacttacttttaggtctattaccccatcataagtatctaatttattagctattttaccaataacatcatctatatcttcctctttttcaaaatagtcatacttatcatgtttatcatatttatcacacttattatatttttcatctttatcccatttatcatatttgtcgtacttatcatatttatccgctttatcatatttgtcatgtttatcgcatttatcgtgtttatcacacttatcatatttgtcttctttatcacatttatcgtgtttatcacacttgtcatatttatcttctttatcatgcttatcgcacttgtcatgtttataatctttctcacattttttgctctctttattcttgtttctttcctcatctaaattatctatagtttcagttatgttttgatgatcttctggaatcctattttgtttatcttcaactttagattctatgttcgctttaggttgaagatcaatatcatctttttttcgttcaactgattcatcttgtaatttaggtgcctttactaattcatcctctttcgtacctgattgagtgatagttttatttaatgtacttacagtcaaattttctttttccttagtttgtaatgttgttttatcaacatatttcctagaatcagcttttataatcttaaactttctccaattatcagcagattcttctccattcataaaaccatgcattacaaattctgtttcattatcttttaccctacatatagcagcaccagatattttttcataagatattccaagactagctatgttatttacataatattctttgctagtatctccttttccgacttcatttattgctaaaggtccaatatcaattaattgttttaaatccttcttacaacatataagtaccatggaataattatcttcctgcctaagattctgcgcataaaatgagattttacacttatcacctttagcctccaccttagcatatccagacaaagctttatcattagattgagaatatcctctttcatcttcttgtaatattataaagtttctatacaatttgttgtgtgccaaccctatattccctccacatatatttattccatatagtatatgtttggaaattagaattatgatttaactaatacttttctatattttcatactctatatagcccagcaattttaatagaaactaaaaagcagagaacgaataattcaataattactcattctccaccttttagtttcttatatcatatatacaatctgataaggccgcaaattcttctagtgttaatgtttcagctcttctcttaggatcaattcctgatttcttaaatgcttcttctaatttctctttatctacttttaatgtttttgctgcattccataaagtttttcttctcatattgaaacctgctcttacaatctcaaacataatattgatatccttagttttaactcttggttcatctaatctatctagtcttattactatagattcaacctttggtctaggaataaaacaagttggtggtaccttccttattatgtctgtattacaataatactgaactaaaaccgataatgcaccatattccttacaattaggttcagcattaattctctctgcaacttccttttgaatcattatagttaatgatttaaaattatatccaccttttagaagcttaactattataggggttgtaacatagtatggaagatttgctacaagcttaacacttttctcatctccaataagttcattaaaatccactttaagtgcatctttatgtattaaactaaaattcttgtgctcccccaactcttgctcaagtatcggaattaaatcattatctaattcaatagatgttacttttttagctttcatcaaaagttgagcggtaagcgtacctacacctggtccaatctctataataaaatcttcattgttaacttctgctccattaactatatcatcaagaacagaatcatcaactaagaaattttgcccaaggctttttgagaacttaaaattatattttttgactagttcctgagtttttatatcttttaaatccatttatttcttacctacttccaattgtttttctatttcttttatagcattagtaaattcttctttagttattccataattatttaatctagaaaccatctgcgccgcatttccataacctattcctaataacttaccaagcatatttcttctaatctttgaagtattatctcctgtaagcttgaaataaaacatatcctgcatagtaaaaaatgattgtttttcttcttgtgttatctttgccatttcaagcgccttcaaaataacttctgggcatgcattttctactccaatatctccgttcttaagtccatcttcttttgcaatatatgcatgttttattcctttaactctttttgctattattcttcttattttttcccctgcaaaatctgggtctgttaatacaattaccccttttcttttctgggcctcctgtattcttgctatgacctttgcatttattccaaatcctcctacagcgattatttctgcatctatagctttctttacagcgtcaacgtcatctctaccctcaacgactattacttcttttatcaatgtgttacttcctttctttattaataattactttattgcattcatatatctataccataaaatagccttaaatttattttatctcatttctaataatatgataaaacatccacaaattcaaagaaaaaaatagagataacatctgttatctcttaaaatagcttaccattgccctgggtaagcaactactaatacatcaactggtcttcttccccacgaatcacattcatttgacgaattaaggtatatgtcaattctgtcgccctttatagcaccacctgtatctgatgcaattgcatatccatacccttccacatatactttacttcctagcggtattacggatggatctactgcaatcgtactcataccaccttgatttctaacaggcgttcttcctgtagctgtagtagaatggttactataagctgttgctgtgcaattaatctttttcttataagttattctgtctccacctctgcttgcgtacacttgaccagttcctttgaccacaacttcattttgtggttccaatatggttttagtactctttacattacgagaaatttctaccccatctttatatattatttgataagtaatttgtttctcaccattaactccttcactcttaaccttctgaacactactgtccaaattttcatctttttctacaattgtatcgaagttaattggctgtttttcggtgacatcttttgtttccactttgacaagttggacactttcgttaccctctaacttagactctagggatggtgatacttcatctacgtctttgtcaaattctattccttgatcttttaatgtatttttctctgcatccagcatatcctcaaccgtatcctctgccgtttgcaattgtacttccattccaccagccttaatatctactggaacagccttttttactttaatagtttctttttcagatactttggattccaaggacggttgcactttatctttaggcgatacttctatcccattttcttgcaacacacctttaacagtccccttgtaagtgacaaaagtcgcttctttaccgtctatacttattacgagcgtttttcttatgctcattatagtcactgctgtaacaactacaaatgctatcgcaattgttccaattataatttttgccttcggaccgttagaaaaactttgcctaataaattgtctcaatttttctatcattattttccctcctttggcaagagtgtcttttgaattatatattaatattctagacttgtcaaattagtaaactcttgcaatataatgaagcattgtaataatgcactttgtgcataaaatataatatataaaaatgatagcggtatttaatattacttcattatgaaattaaaaatttaatgatatgaaattatagaaacatttattaaacttaatgataatttcagtttaatattagatttactttatgttgaatacagaaattatatttaaagtgtacatttaatattttaccttatttttcctttcttatcaatctaaaaaaattctcgttaaatctcaaatttgcctcataagggtcaatattcttaatttctgctatcttagttattatatattcaatatagtctgatttatttctctttcctctgtttggttcaggtgccatatacgggcaatcagtttctacaagtattttttctaaagggatttctctaactacttcaacaactttttttgcatttttaaatgtaacaacacctgttattcctatataatatcctagttttacgcattcccttgcaaattctacacttcctgaaaaacagtgaactacacctgtaacttctggaaattccttaattatttctaatgtgtcttgatgtgcatctctatcatgaataacaactggataatttagttctttagctaaattcatatggcttctaaatacatccttttgaatatctttaggtggattttcatcccaataatagtctaatccaatctccccaatagctactattttgtcattattcttaatataagatttaatttcatctagtgtatcgcctttcatctcattcgcattttccggatgtattcctaaagctccaaagacaaaattatgatctttagttagttgatctgttgtttttaaactatcatatgatgatgcgcaatttaggattccaataactccattttgattaatttcatttagcaaggattccctatcttcattaaaagcttcatcatcataatgagcatgactatctattattttaaatttttgattcataaaccaatattcctttcctattaacattatttccaaattgtcatattctaaaactactgcatttaaatttaggattacttatttaaataataacataaaattattacttatacctctttatgatagctttacttaaaactatatgatcaaatgcaaatcatagcaattaaaataaaaataaattcgtaaatactaatttttttacgaatttattatttgacacttaaatgacatattaatgcattaaaattaatattgtaaagtagttaaagcattattatttaccccttttaaccatttatttagtatggttaatgaacgtctcactcccctaagtgagacgttctattttttataattatcttacaatgctacctgttggaatctcacctggatccactgcttttaatatactgtcatcatctgttgcagcacataaaatcattccttgtgataattcgcctctaagttttactggctttaagttagcaactaaaactacatttttacctactatttcttctggtttataaaacttagatattccagaaaccacttgtctttcttctccacctaaatcaacttttaattttaataatttcttagctccctttattggttcacatgctaatacttttactactcttaaatcaaccttttcaaaatcatctattgttatttcttcttttataggtgtaatttctctcttagctggtgtttgagcagcctttaaagcttctaattcttctaatttcttatctacatctattcttgggaataagttgtcagcctttactaccttagttcctgccttaattccatcaaatgactttaatgattcccatgaaatttctgtagtattaatttgctcattaatcttcttagatgtttctggcaagaatgctgaaatcattactgatgcaaatcttaagctttcggctaaattataaagaactgttccaagtctagcctttttactttcatctttagctaatatccatggagttgtttcatctatatatttgtttgctcttcttattaattcaaaaacatattctaaagcttgaggtatatttaattcgtttattgcctcctcaattttagctggtgctgataatgctaaatttattaattcatcatcaatagcttctttttcatcttgagctggcatttctccaccaaaatatttttcaaccattgcaactgttcttgataaaagattacctaaatcattacaaaggtctgaatttattttctttataaatatttcattattaaataatccatctgctccaaatggaatttcttttaataaataatatcttacaggatcaactccaaattcatttacaagaacaactggatctactacattacctttagattttgacattttcccaccatcaacaagtagccatccatgaccgaaaacttgctttggaagaggtagatctagcgccattaacattattggccaataaatagtatggaatcttaaaatatcttttcctattagatgtacatctgctggccagtatttattatataaatctttattttcttggccatatccaagggcagtaatatagtttgataatgcatcaatccaaacatatacaacatgactttcatcaaaagttacaggtactccccagttaaagcttgttcttgaaacacaaagatcttgaagacctggtcttaagaaattatttagcatttcattttttcttgattctggttgaatgaactctggatggtcttcaatatatttgattaacttatcagcatacttgctcatcttgaagaaatatgcttcctcctttgatttttcaactggtcttccgcaatcagggcaatttccatttactaattgtgtatcagtccagaaagattcacaaggtgtgcaataccaaccttcataagaactcttatatatatctccttgatcatataatttcttaaatatatcttgaacagctttaatatgataatcatcagtagttctaatgaacttatcataacttatattcatcatgcgccaaagatctttaataccagcaacaacttcatctacatgttgttttggtgtgattcccttttcttcagctattctttggatcttttgaccatgttcatctgttcctgttaagaacattacatcatagcctgttaatctcttaaatcttgctaaagcatcagcagctacagttgtataggtattacctatatgaagctttgttgatggataataaattggtgtcgtaatataatatgtttttttacaatctgtacacattatttgtgtcctccttatattaaagcaattatttattgctatttttctattataatattaatttttaccttctatatattgtgtcataacatatccagcccgcatttttcaagcatattcttcagaatattagaatattagaatatatattctaaagaatatatattgttaagattattatcatcttcatgtttttgtcttcaaattatcttggctctatcttttaatcttttcataagcacaaaaaaatctctatataagtattaaaacctatatagagacgtattatacgtgttaccactctaattcttatttacctcacagcaaataactcagtaggtgaccaacatcaccctgcaatataacggtcgcttccgtatttccctaaccaaataattttgactcaagaaacatgctctgagaccatcttcataaaattcacaaacgctaactttcagcatatattagctctcttatagaatgattcttttattactcttctcttcatagcattctatttaattaatactagtttatttaagagattattttatgcaaactttatagataaaatttttaacctataatatatattaatccccaaattatttacattatactatttgttgcttacaagtgcaataacctatttataatgtttaaattatatttccttagttgattccttaagaaattgtttttcactatcacttaagaatggacttaatttatcataagtctctttatgataattatttaaccattctttttcatcctctgtcagcaattcaacattgattccacctaagtctattggacaatatgacatggtttcaaatttataaaattctccaaactcagcatttctttcgtcctcaacaactagcataatattttctgtccttattccatgtttgccttctctatatattcctggctcattagttaatatcattcccggttctaattctattgtattcggtactggccttattgtttgtggaccttcgtgaacgcttaagcagaatccaaccccatgacctgttccacatttgtaatctattccttcttcccataaaactcttctacttaaaatatctatattggatcctgtagttccttttaaaaattttgctttcataaggctgatatgtgcttttagaaccagcgtaaaatctcgtttttcttcttcagttaattttcccaaaacaatgctacgtgttatatctgtagtcccatcaaaatattgtccaccgctatcgactaacaatattccttctttttctaacttatatgcactttcttctgttgcagaataatgcatcatcgctgcatgttctttatatcctgcaattgttccaaagctttcctcaataaataaatctccttgactcctaaaatcgcataacttttccgctaaggtgatctctgttatatcttccttatctagaccttctttgatccacttaataaaccttaccattgcaactccatctttaagttgacaatttttaagattttctatttccttcttattctttatggcctttaattttgtagttatatttatttcttctatcttctttattcttttattaatctgattgtatatatacgcacttattttacttgggtctaatataacactatcttgtacttcttttatatcttcaaatatatcctcataattttttattattatgccttctttagttaatgttttttcatcagcagatgatatcttttctctatctatgtatagcacagctttctcttcatcaattaatgcatatgctaaagttactggtgtatactttacatcatttcctctaatattaaaaatccatgctatatcatctaatgatgatattatatatgactttccacatagctttttcatttcatttcttacttcttgaatcttttcatttgcagtttttccgcaatactttacttcatgcaaaaaaactttttctttaggcattttaggtttatcttcccatacttgttcaattaagtctttattcattactatgtttatatttttattttcttttatttttagaatttctttatattgattaaccgataatactcttccatcaaaacctaaagtttggccatccatcatattttccatcaaccactcttctaaagtcggccatccaggaattctcatcttaaaaagctctactccagaatcttttaattgttcattggcttgtataaagtatcttccatctgtccatagtattgctttttccattccgatcaatgctgttcctgctgaaccagtaaatcctgttatatatgctctagacttaaaacattcagccacatattcactttgatgaaaatcttcacttggcactatataataatctatattctcttttttcattatttctcttaatttttgtattctttctgatactctcatatttattccctcttttaaatatattttttaagaacgtcataagacctaataagtaaacacatatatgtatcttaatcttattaggttcttattttggcaacaatatattatttcatgaattcttcgatttcatcaatttccttaatcatgttctttgttaaaacttcacatccatctttagtaactaaaatatcatcttcaattcttatgcctatattttcttcagctatatatatacctggttccactgtaaataccattccttctgcaaatgtaaattctctaccaagtatacctaaatcatgagtatctaggcctaaactgtgacctattttatgccaataatatctgttaacttctgatttttcttttataagccctaatccaatacattcttgtgcaattaaatctttagcccatacatttaattctcttgaatccactccaggctttattctttcaattactgctttattaactctaagtacagcttcataaacttccttttgtctttgagtgaacttaccatttatagggaatgcccttgttatatctgcattatataaattccattgagctccaagatcaaatagaattaaatctccatcttttaactcactgttattatctacataatgaagtattgttgcatttttccctgctgctgctattgtcctaaaagcataatctttaacgcctcttgttttgcattcaaaatcaaaataagcctcgatttcatattccttcattccagccttcacatttttcattaaagactttacaccttcaatagttatttctattgctttcctcatttcttttatctcattctcagacttaaccattcttagaggtgcaattatacttgtaaaattctttatattaatatgtggatacttactaataatctcttttgcaaatctatttgatacagaatcactttcttcaaactcttctctatccaaatctagatacaaattaactttttcttttccctttattaatacatttaggtaggaagtaaactccttcatataagatacatcatttattccagatatctcttttccctcaaaatctcttaatgtttttccactccacatttctttatccaaatctaaatctgtcaaaaataacttttcacttactatattattatatttagataatacaaccaaatgtccgtcttcttgtattcctgttaaataataaaagttcttatctggagtaaattgatagaattcatctccagtctttttagctggtttacctgcaaataatatcattactgaattatcttctacactattcataagtttgcttctgttttctatataagtatctttattcataatttagcctcttttctactattaaaatatattcctatgttaatataatactccaatgattctaactaataaatattctgactaacaaattttatcaaataattaaacttgttattttaaaaacatatatttaccataaatatagccataattattgctgttgcatcagcaaatactgctgcccataaagtatgccttatcttttttaccttaattgctccaaaatacactgtaattgtataaaatatagtttctgtgcttcccattacaactgacgctataagacctgttcttgtatctggtcctaaactttttattatatctgtaaacacaccaattgcaccacttcctgacagtggttttattattagtaatggtattagatctttaggtaatcctattaaatttgcaagtggagcaattagattatttagtaaatccattaattttgcctctctaaatacttgcactgcaattatcatagctaaaagatatggaaatattcttaaggttaccatcaatccgtccttagcaccctctataaaccattcataaacctttcttcctttgaacataccatatgttattataattaaaaatattattggtattatgcttttacttaagtaattaaacataattctataatcctccttgcaacatttctaattaaattgcattgttgaaatttctaaaagtatttctgtaatatcttgcagcatattactccaactattgcagctgttgctgttgatgctatagtgggtaaaattattattccaggattaaccgaattacatgctgctcttatagatattatcgtcgatggaactaactgtatacatgtagcatttaagacaagaaaaagcgccatatcatttgaggctgtttctttatctgaattaagtctatccatttcttccatcgcctttattccaaaaggggttgctgcatttgacaatcccatcatattagcagtaagattcataacaatagcacctaaagccctttcatcctttgcagcctctttaaaaattcttttaagaataggctttaataactttgataatttttcagtgagtccgctattttcagcaaccttcataactccacaccaaaagcacattattcctgtaagttcaattataaaagttacagtattacctgacgaactaattattgctttggaaataagctctccatttccagtcaataatccaactagaattccaaaaaatattagaaaaaaccaaatataatttatcatattctcccccatagtatagttattctttacatttatattccttgcacttattttttagtagtgataggatataattactaaacataattatattattttaaggagaatttttatgaacgattcaaatttaaagatagctcaacaagatgtagaagaagctctaaagactgtagaagacatggaaaaagttataagcaatgatgaaccgtcaaaagaacagttaaaagaaaagtttatttgtttatcaaatagagttcagaaattagaagatattctaaaaaacgaaggaatcctttaaataaaataggtatgtctcaatatattaagaactacattgaggcatacctattcttttaattttctaaaataactttttgttcttttccatttcccattaaatcctttgatgtcttaacaaatacgatgagtgtaattataactgatagtatatcagatgttgctcctgcgatccatactccatctaatcctttgaaccttggaattattataagacatggaattaatattattacctgtctcaataagcttaaaaacatcgatatttttactcttcctattgattgaaagaaattcgtaattataatttgcgctcctataaatggcagcataattaaaaatattctcattccatgagcagttacttctataagcgatgattcattattaaaaatcttaactaatgtttctggaattccctcaattattataaatcctattaccactattattgtagctgtaataactccatattttactgcttgcttaactctatcatattttcttgcaccaaaattataacctattataggctgaagaccctgatttaatccaaatataggcattaaaaatatcatagctaagctgttcactatagtcattgctcctacagctaaatcaccaccatatgactgcaatgaattattagttattacttgaactgcactttgtgcaagctgcatgctaaatggactgacccctatagcaaaaatacttaaaactgcgtccttttccaattttaaatttttccttcttatcttaagtacactagatccctttgtgaaataatataaaatccatatactgcttattgcctgcgcaacaacagttccaagggctcctcctttaactccaaggcctaaaccgaatataaatattggatctaagatgatgtttataatagcactcattagcatagacgccattgctatttttgggcttccatcacttctaattgaatgattcaaaccgaaactcatcaaattaaatatacaaccgctaataattacccttataaaatcttcaccataacctataatattttcactcgctccaaatgctttcaaaagcggattagcaaatatatgaccaaacaacgttaacaatacaccaattattattatcaatgtaaacgcatttcctagaagcctttctgccccttccttatcatgctctccaagctttattgacacttttgtagctgtacctattccgattaacataccaaatgctaaaattataaacattattggcattgtaattccaacaccagccatggcgagttcacctatgccttctatatgcccaataaatattctatctattatgttatataatgtattaactaacattcctataacggcagggattgaaaactcaagcaacaattttcctacacccatttctcctaatctattctgcttattcatgaatatcctccttattaattaaagaactcttagataacttattcaacaaattcattaattcttgagattcctcatcagtaaaacacattctaatctcagattcccattcattcattatagaatatacatcatctttaatttgttctgctttctcagttagttccaatctatatgcacgcttatcactttctttttttattctccttacataaccttcatcctctaatttctttattgccctagctgttgtcgctttatctaatctaacctttttcgtcaattcttcttgtgttataccatcattttcataaagatttaaaagaaataagtactgaccagcccctatcccaaatttactaaatctcttgccaaagtacatatagctagatctatgtatttcaccaatatacttacctatatgctgatagcaatccatattacttctcccctaccttaatcatattaatatagtattaacaataatcatatttcatatccaaataattacatacaaattatattaacacaagttagttgtatatgcaactaattacaactttaacgctaataaaggactactcccaaatagctttaaactatcttgaagtagtcctctataaacatatacatttaatctttatactaactaaacataaaatttaattatttttctattaaactgtactttctctttcaactagctgatgttctaaaacataatgtggctcatctagctctttcttatttaaaagttttataagcattctcatagcaacagatcccatatcataagttggttgagaaattgttgtgatctttggatagaaaattgaagctgcaaaattatcattaaatccaattacacttacatcttttggaatatctaagttattatctcttagtgcattaattgcgcccattgcaatatcatcagaagcacatacaacacctctaaatttcttattttgctttatgaacttttgtatgccttcgtatccactctttactttcattgagcttagatgaactagttcaggatctatttctattcctgattccttcattgcattttcataaccaacgtatctatcaccccaagcatttttgctctctttttcagctcctataaaggcaatttcttttattcccttttcaattaataactttgtactatcatagctagctttaacattatcaattgttacacttggtagaactccttctttatccttagtttcaactaaaacagtttttatatctaattcattgattagttctaatatttcttcattaagagaactactcatataaattacaccatcaaccattttttctctaagtacccttaagtactctttttccttttctatatcaaggtctgaattacaaagtattatattgtaatcgtatatatttgaaacatcttcagcacctcttacaatttctgggtaaaactggtttgatatatcaggaagtaaaattcctattgtctttgttctttgagtttttaaacttcttgcaactatatttggtctgtatccaagcttttttattgcatctaaaactttcttcttagtatcttcgtttactacatcgatatcatttaaaactctagaaacggttgcaattgatactcctgcttcttttgcaacatccttaatagaagtagccattattattcctcctttgaatttttctagataatctcattatactaacatattgccttataaatcaacataacttaaaataaattattattttattgtaagttttgtcaaaaatcatagtttttaatcttaaatttataaacatattaactaatttacaatcttatataagaaatatatatgaaaaccatattaaatatgtatataaatattaaaatgactaggaatattaataaaatcttttattcctagtcattttagtttttatcttacaacttcaacattcatgtttaatgtttcactatttataactgtttctgaataattagattcttgattataaagaacttcacaagttaaagtctctttctttattgtttgttcgaatttcttaataacatcaattaacatatcgttatttgatacataaagatttattctatcagcaacttcaaatcctttatcttttctcatattttgaatctttgaaataacttctcttacatgcccttcctcttgaagttctggtgttacagttgtatctaaaacaactccaagttcaccttctcctgcgaatgcataaccttctaaaccttgcattgtaactaaaagattctcatttgtaagaactatttctgtatcattaacaattatagtttcacttccaccattttgaatcttttgagccaattccatttggttcttttcagaaattgcctttctgatttgaggaattaattttccatataacttacctataacaggtagattaggttttatttcaaagttaacatattttgaaaggtccgctccaagctcaacctttttaatatttaattcttcttttacaatatctccataataatctggaagagattttgttgatataagtaattcagaaagtggctgtctattcttaacatttgcagcatttctagcacttcttccaagcttaacaagcgtatacgctaaatccatttctttctctaattccttatttattgcagccttatcaacttctggccaagcacataaatgaatgctttcttgagcatttttatcaaggttaacaactaaattttgataaatttcttcagtcataaaaggtacaaatggtgatgccactttaattaaatttgttagtaccttatataaagttacataagctcctatcttatcgtttgttaactcttgtgaccaatatcttgatctgtttcttcttacataccagtttgataattcatcagtaaaatcttcaatcgctaatgctgcttgagtaattttataagtatttaatccatcatcaactgtttcgattaatgtgtttaatttagatataatccatttatccattatattatctgaaacaaaatcagagtacttagttggatcaaatttatctatttcagcatataaaacatagaaagaataaacattccacaatgttcctaaaaactttctttgagcttctgcaacatcatcaatagagaatcttgttggaagccatggtgcacttgcagtatagaaatgccatcttgtcgcatctgctccttgactatttaatacttcaaaaggatctacaacatttcctttgtgcttagacatcttaagtccctttttatctaaaacgtgacctaatactatacaattttcaaatgaatttgtgtcaaataaacatgttgaaatcgcaagtaatgtatagaaccaacctcttgtttggtcaactgcttctgagataaattgtgctgggaagttcttttcaaaagtttccttgttttcaaatggatagtgccattgtgcaaaaggcattgatcctgagtcaaaccagcagtctataacttcatgtgttctcttcatttctttaccacaatgtggacattttaactttattccatctacgtaaggtttatgcaattcaatccccttacaatctgtagttgctttttcttctaattcttctctgctgccaatacactcttgatgaccacattcacattgccatattggaagtggtgttccccaatatctgtctcttgaaataccccagtcaataacattttcaaggaatttacccattcttcctgttctagtgttatcaggataccaatttattttattattattttcaagtaacttatctctcattttagtcatcgcaacaaaccagctatcttttggatagtatagaagcggtgtatcacatctccagcaatgtggatatgagtgagtgtgcttttgtgctgtaaataattgattacgttcttctaaatatttaacaatactttcatcacacttcttaacaaactttcctgcccatggagtaacttcttcaacaaaattaccatttgtatctactaaatttataaatgcaattccatttttctttgaaacaagactatcatcttcaccataagctggtgcaatgtgtactattcctgtaccgtctgataatgttacataatctccatgaattactacgaaagcttttccttcaacttttgcaaaaggtaataattgttcgtattcagtacctagcaattcttcacctttaaactctttaactatttcgcattcagtatctcctaacaccttacctactaaatctttagctaaaacataaatttcttctcctacctttacttctgcatatgtataagatttatttatacataatgctaagttagatggtaatgtccatggagttgttgtccatgctaatatatatttattttcttcacctttaactttaaactttacagttgcagttaaatctttaacgtccttatatccttgagcaacttcatgagatgaaagcgctgttccacaccttgggcagtaaggcattactttgtggcccttatacaataagcccttattccacatttgctttaaagcccaccattcagactcaatataattatcatggtatgttacatatggatcatccatatcaacccagaatccaatttgttcagacatttccttccataagctaacatatgagaatacgctatctttacattcatgaacaaacttttctacaccaaagtcttctatttgctcttttcctgagattccaagtttcttttctatttctaactctactggaagtccatgagtatcccatccagctttcctaagaaccttataccctttcattactttatatcttggaattatatccttcataactcttgtcaaaatatgcccaacatgtggctttccatttgctgttggtggaccgtcataaaaagtaaaatattctccatctgaatttgagtcaaagctcttctttattatgtctttctctgtccaaagctttgctatgtctttttcaattttgacggtaccttttgatgaatctaccttattgtacattaaaaattcccctttcagctaagtaaactatattgttctctttaagaattgtttcctgattacatacttttctaaacataaaaaaactccatcctaaaggacgaagttaaattcgcaaaccacctaaggttaaaacatctaaatacaaaactaaatgttttatttcaagtacatacatactctatcctttaacgcaggctctacgtgataacttattcggcattaagcctttcagcctccaactcctaggtgattttctctaagatctattatagctttacaccaaacagctactctctaaaaataatatctaagatacttttcctaatcatcgtcttttattttaataattatatattaatgatttttaaatgtcaattgatgatcaccattaattgtatctttattactaattaatgtaataaagtaattgaatcctaatttcctcaatttaatgtgatgtcatcttagtaattttataacttaactgagatataaaatttaatatcttcatgaatataactacatatttgctcataagttgtattattaacaatactatactctattaatataaagtatcgccttaaagggggaaatatatgttttgtaagaattgcggacaacaaatagatgataacgctgccgtatgtatacattgtggtgttgctactggtaataatatgtcttctaaaagtactttagacaatccatctcacttagccggaattgcgtcttgttgctttccagtagtaggaataatcttatacttcttatggaaggatgaaaagcctcaaagtgctagcctagtatgtaaatggatgattggtggaataattatttgggtaattttttacgttctagcttttgtactcggaatgctaggaagcttatcatcatactaagttaaatgcttaattgtaaaaaagtcttaaactatatgtttttctgccatcaattacctgagagatcattcttttttagaggtcgtcaattcccattatgtgcgagatgcacgggaatattactgggatatatcctcggactcacatacgtaatattatctaaaaatattcatataattatagaattattactgatgctaccacttttaattgatggatttggtcaatatctcatgtactttaaaagtactaatacaaggagattaatcaccggaatcttagcaggcatatcaactatatgtttatttagattggcaatagttttaggtcttcaatctggacattggttttataattttattcatatataactgtactgatttcttactacagttataataatactaatataaaacatagctatctaaatctagtattcttaatgatttagatagctttacatttttgaataaaatagctatgtagaccctttagcaaataaaataacatttcctagtattatcttatttaattattttaggaattaataatataaattcagatccaatgccatattctgaattcacttttaacttaataccaaaattctttgagatagatttcaataaactaaggccaattcccgttccattaatattttgtcctctaactatatcgcttctataaaatctatcaaatattcgcttttcttcgtcattcttaattcctattccattatctacaacattaatataataataaaaattattatttaatataggatatttttttataattattgttataatattaattaactatacttttattttagattataaaatgtataattaagataaagttagtttttcaattaacttaaaaaatgtttttaggagatactattatggaaaataatttgaatgaagcaattttagataaattaacaaaaacttgcacttgtaaggcaatacctagatcaaaaattaaggaagctattaaaaatggggcttcaactataaaagaagtccaaaaggctactggtgcaggcagtggttcgtgcggaggtagaaattgttctccacgaataaatgatttactaaagcaatcaagagaaaacatataatcgtaaaacttttactcatagtaaattcgaaaagggagtgtcgcaaaatgattaaattttaatcaggagcgatgctccttttcggtttaagccagcaaatctccaaatatttgaaatacaatattaattatttaaagaattctgatttttaagcacact
